United States Patent Application Publication US 2018/0126003 A1 - sequence listing, part 98

SEQ ID NO: 177755 - DNA, 1272 bp, Artificial Sequence
  derived and/or modified sequence
atgatgtacagacccgacgtggtgagagccagaaagagagtgtgctgggagccctgggtgatcggcctggtgatcttcatcagcctgatcgtgctggccgtgtgcatcggcctgaccgtgcactacgtgagatacaaccagaagaagacctacaactactacagcaccctgagcttcaccaccgacaagctgtacgccgagttcggcagagaggccagcaacaacttcaccgagatgagccagagactggagagcatggtgaagaacgccttctacaagagccccctgagagaggagttcgtgaagagccaggtgatcaagttcagccagcagaagcacggcgtgctggcccacatgctgctgatctgcagattccacagcaccgaggaccccgagaccgtggacaagatcgtgcagctggtgctgcacgagaagctgcaggacgccgtgggcccccccaaggtggacccccacagcgtgaagatcaagaagatcaacaagaccgagaccgacagctacctgaaccactgctgcggcaccagaagaagcaagaccctgggccagagcctgagaatcgtgggcggcaccgaggtggaggagggcgagtggccctggcaggccagcctgcagtgggacggcagccacagatgcggcgccaccctgatcaacgccacctggctggtgagcgccgcccactgcttcaccacctacaagaaccccgccagatggaccgccagcttcggcgtgaccatcaagcccagcaagatgaagagaggcctgagaagaatcatcgtgcacgagaagtacaagcaccccagccacgactacgacatcagcctggccgagctgagcagccccgtgccctacaccaacgccgtgcacagagtgtgcctgcccgacgccagctacgagttccagcccggcgacgtgatgttcgtgaccggcttcggcgccctgaagaacgacggctacagccagaaccacctgagacaggcccaggtgaccctgatcgacgccaccacctgcaacgagccccaggcctacaacgacgccatcacccccagaatgctgtgcgccggcagcctggagggcaagaccgacgcctgccagggcgacagcggcggccccctggtgagcagcgacgccagagacatctggtacctggccggcatcgtgagctggggcgacgagtgcgccaagcccaacaagcccggcgtgtacaccagagtgaccgccctgagagactggatcaccagcaagaccggcatctag

SEQ ID NO: 177756 - DNA, 2136 bp, Artificial Sequence
  derived and/or modified sequence
agctggattcacacacttggatgtagacctcgaccttcacaggactcttcattgctggttggcaatgatgtatcggccagatgtggtgagggctaggaaaagagtttgttgggaaccctgggttatcggcctcgtcatcttcatatccctgattgtcctggcagtgtgcattggactcactgttcattatgtgagatataatcaaaagaagacctacaattactatagcacattgtcatttacaactgacaaactatatgctgagtttggcagagaggcttctaacaattttacagaaatgagccagagacttgaatcaatggtgaaaaatgcattttataaatctccattaagggaagaatttgtcaagtctcaggttatcaagttcagtcaacagaagcatggagtgttggctcatatgctgttgatttgtagatttcactctactgaggatcctgaaactgtagataaaattgttcaacttgttttacatgaaaagctgcaagatgctgtaggaccccctaaagtagatcctcactcagttaaaattaaaaaaatcaacaagacagaaacagacagctatctaaaccattgctgcggaacacgaagaagtaaaactctaggtcagagtctcaggatcgttggtgggacagaagtagaagagggtgaatggccctggcaggctagcctgcagtgggatgggagtcatcgctgtggagcaaccttaattaatgccacatggcttgtgagtgctgctcactgttttacaacatataagaaccctgccagatggactgcttcctttggagtaacaataaaaccttcgaaaatgaaacggggtctccggagaataattgtccatgaaaaatacaaacacccatcacatgactatgatatttctcttgcagagctttctagccctgttccctacacaaatgcagtacatagagtttgtctccctgatgcatcctatgagtttcaaccaggtgatgtgatgtttgtgacaggatttggagcactgaaaaatgatggttacagtcaaaatcatcttcgacaagcacaggtgactctcatagacgctacaacttgcaatgaacctcaagcttacaatgacgccataactcctagaatgttatgtgctggctccttagaaggaaaaacagatgcatgccagggtgactctggaggaccactggttagttcagatgctagagatatctggtaccttgctggaatagtgagctggggagatgaatgtgcgaaacccaacaagcctggtgtttatactagagttacggccttgcgggactggattacttcaaaaactggtatctaagagagaaaagcctcatggaacagataacatttttttttgttttttgggtgtggaggccatttttagagatacagaattggagaagacttgcaaaacagctagatttgactgatctcaataaactgtttgcttgatgcatgtattttcttcccagctctgttccgcacataagcatcctgcttctgccagatcaactctgtcatctgtgagcaatagttgaaactttatgtacatagagaaatagataatacaatattacattacagcctgtattcatttgttctctagaagttttgtcagaattttgacttgttgacataaatttgtaatgcatatatacaatttgaagcactccttttcttcagttcctcagctcctctcatttcagcaaatatccattttcaaggtgcagaacaaggagtgaaagaaaatataagaagaaaaaaatcccctacattttattggcacagaaaagtattaggtgtttttcttagtggaatattagaaatgatcatattcattatgaaaggtcaagcaaagacagcagaataccaatcacttcatcatttaggaagtatgggaactaagttaaggaaatccagaaagaagccaagatatatccttattttcatttccaaacaactactatgataaatgtgaagaagattctgtttttttgtgacctataataattatacaaacttcatgcaatgtacttgttctaagcaaattaaagcaaatatttatttaacattgttactgaggatgtcaacatataacaataaaatataaatcaccca

SEQ ID NO: 177757 - DNA, 1272 bp, Artificial Sequence
  derived and/or modified sequence
atgatgtatcgaccggatgtggtgcgagctaggaagcgtgtctgttgggagccctgggtgattggactcgttatttttatctcgctaatcgtcctggccgtttgtatcgggcttacagtgcactacgtgcgttataaccagaaaaagacctataactactatagtacactgtccttcactactgataaactgtacgccgaattcggtcgtgaggccagcaacaacttcacggagatgtctcaacgcctggaatcaatggtcaaaaatgctttttacaagagccccctaagggaggagtttgttaagtctcaggtcattaagttcagtcaacagaagcacggtgttctggctcacatgctgctgatatgccggtttcattccacggaggaccctgaaaccgtcgataagattgtgcaactggtgctgcatgagaaactgcaggacgccgtaggccctcccaaggtggacccccactccgttaaaataaaaaaaattaataagacagaaacagactcctacttgaatcattgctgcggaactcgccgtagtaagacactaggacagagccttcgcatcgtgggtggcaccgaggtggaagaaggcgaatggccttggcaggccagcctacagtgggacggcagccacagatgtggcgccaccctaatcaatgccacatggctcgtcagcgccgcacactgcttcactacttacaagaaccctgctaggtggaccgccagctttggcgtgaccataaagccatctaagatgaaacgtggcctgagaagaatcattgtgcacgagaaatacaagcacccctcacatgattatgacatttcactggcggagttatctagtccagtgccatatacaaatgccgtgcatcgagtttgcttacctgacgcatcctacgagttccagcccggcgatgtgatgttcgtgacgggtttcggcgcattgaagaatgacggctatagccagaatcacttgagacaggctcaagttacactgatagacgctactacgtgtaatgagcctcaagcctataatgatgccattacacctaggatgctgtgcgcaggctcactggagggtaaaactgacgcctgtcagggggacagcggcggccctctggtttcctccgacgcaagggacatatggtacctggccggcatcgtcagttggggcgacgagtgtgccaagcctaataagcccggagtatacacacgggttacagcccttcgggactggatcacgagcaagacgggcatctag

SEQ ID NO: 177758 - DNA, 1272 bp, Artificial Sequence
  derived and/or modified sequence
atgatgtacagaccagatgtggtgcgggccaggaagagggtgtgctgggagccctgggtgattggcctggtgatcttcatcagcctcatcgtgctggccgtgtgcatcggcctgactgtgcactacgtgcgctacaaccagaagaagacctacaactactacagcaccctgtccttcaccacagacaagctgtatgcagagtttggccgggaggccagcaacaacttcacagagatgagccagaggctggagagcatggtgaagaatgccttctacaagagccccctgcgggaggagtttgtgaagagccaggtgatcaagttcagccagcagaagcatggagtgctggcccacatgctgctgatctgccgcttccacagcacagaagatcctgagaccgtggacaagatcgtgcagctggtgctgcacgagaagctgcaggatgctgtgggcccccccaaggtggacccccacagcgtgaagatcaagaagatcaacaagacagaaacagacagctacctgaaccactgctgcggcaccaggaggagcaagaccctgggccagagcctgcgcatcgtgggcggcacagaggtggaggagggggagtggccctggcaggccagcctgcagtgggatggcagccaccgctgtggggccaccctcatcaatgccacctggctggtgtctgctgcccactgcttcaccacctacaagaacccagcccgctggacagccagctttggagtgaccatcaagcccagcaagatgaagaggggcctgcggcgcatcatcgtgcatgagaagtacaagcaccccagccatgactatgacatcagcctggccgagctgagcagccctgtgccctacaccaatgctgtgcaccgggtgtgcctgcctgatgccagctatgagttccagcctggagatgtgatgtttgtgacaggctttggagccctgaagaatgatggctacagccagaaccacctgcggcaggcccaggtgaccctgattgatgccaccacctgcaatgagccccaggcctacaatgatgccatcacccccaggatgctgtgtgccggcagcctggagggcaagacagatgcctgccagggcgacagcggcggccccctggtgtccagtgatgcccgggacatctggtacctggccggcatcgtgtcctggggagatgaatgtgccaagcccaacaagccaggagtgtacaccagggtgacagccctgcgggactggatcaccagcaagacaggcatctag

SEQ ID NO: 177759 - DNA, 1272 bp, Artificial Sequence
  derived and/or modified sequence
atgatgtaccggcccgacgtggtgcgggcccggaagcgggtgtgctgggagccctgggtcatcgggctggtgatcttcatctcgttgattgttctagccgtctgtatcggactgacagtgcactatgtgaggtacaaccagaaaaaaacatataactactatagtacattgtctttcactacagacaagttatatgcggaattcggacgggaagccagcaacaacttcaccgaaatgtcacagcgtttggagtctatggttaaaaatgctttctataaatctccactgcgcgaggagttcgtgaagtcgcaggtcatcaagttttcccagcagaagcatggcgtgctggcccatatgctcctgatctgtagattccacagcactgaggatcctgagacggtggacaaaatcgttcagttggttctgcacgagaagttacaggacgccgtcgggcctccaaaggttgatccccacagcgtcaagatcaagaaaattaataaaaccgagaccgactcttacctgaaccattgctgtggtaccaggaggtctaagacacttggacagagcctgagaatagtggggggtaccgaggttgaagagggtgaatggccatggcaggcaagtcttcagtgggacgggtcgcatagatgcggcgcaactctcatcaacgccacatggctggtgtccgcagcacattgctttactacctataaaaatcctgcccgctggacagcctccttcggagttaccatcaagccatcaaagatgaagcgcgggcttcggaggatcatcgtccacgagaaatataaacatcccagtcacgactatgacatttccctggccgaacttagttcccccgtaccgtacacaaacgctgtccacagggtctgccttccagacgcatcgtatgagttccagcccggcgatgtgatgtttgtcaccggctttggggctttaaagaatgacggttactcccagaatcatctaaggcaggcccaggtgacgctcatcgacgctacgacttgcaacgagccacaggcttacaatgacgcgatcaccccccgaatgctatgtgcgggcagtctggaaggtaagacagacgcctgccagggtgactcagggggccctcttgtaagcagcgatgcacgggatatctggtaccttgcaggcatcgtgagctggggagacgaatgcgcgaagcctaataaaccaggagtgtataccagagtgaccgcactcagagattggatcaccagtaaaacaggtatttag

SEQ ID NO: 177760 - DNA, 1272 bp, Artificial Sequence
  derived and/or modified sequence
atgatgtacagacccgacgtggtgagagccagaaagagagtgtgctgggagccctgggtgatcggcctggtgatcttcatcagcctgatcgtgctggccgtgtgcatcggcctgaccgtgcactacgtgagatacaaccagaagaagacctacaactactacagcaccctgagcttcaccaccgacaagctgtacgccgagttcggcagagaggccagcaacaacttcaccgagatgagccagagactggagagcatggtgaagaacgccttctacaagagccccctgagagaggagttcgtgaagagccaggtgatcaagttcagccagcagaagcacggcgtgctggcccacatgctgctgatctgcagattccacagcaccgaggaccccgagaccgtggacaagatcgtgcagctggtgctgcacgagaagctgcaggacgccgtgggcccccccaaggtggacccccagagcgtgaagatcaagaagatcaacaagaccgagaccgacagctacctgaaccactgctgcggcaccagaagaagcaagaccctgggccagagcctgagaatcgtgggcggcaccgaggtggaggagggcgagtggccctggcaggccagcctgcagtgggacggcagccacagatgcggcgccaccctgatcaacgccacctggctggtgagcgccgcccactgcttcaccacctacaagaaccccgccagatggaccgccagcttcggcgtgaccatcaagcccagcaagatgaagagaggcctgagaagaatcatcgtgcacgagaagtacaagcaccccagccacgactacgacatcagcctggccgagctgagcagccccgtgccctacaccaacgccgtgcacagagtgtgcctgcccgacgccagctacgagttccagcccggcgacgtgatgttcgtgaccggcttcggcgccctgaagaacgacggctacagccagaaccacctgagacaggcccaggtgaccctgatcgacgccaccacctgcaacgagccccaggcctacaacgacgccatcacccccagaatgctgtgcgccggcagcctggagggcaagaccgacgcctgccagggcgacagcggcggccccctggtgagcagcgacgccagagacatctggtacctggccggcatcgtgagctggggcgacgagtgcgccaagcccaacaagcccggcgtgtacaccagagtgaccgccctgagagactggatcaccagcaagaccggcatctag

SEQ ID NO: 177761 - DNA, 1272 bp, Artificial Sequence
  derived and/or modified sequence
atgatgtatcggccagacgtggtgcgcgctcgaaagagagtctgctgggagccttgggttataggcctcgtcatctttatctcactcatcgtgctggccgtatgtattggcctgaccgtgcactacgtcagatacaatcaaaagaagacatacaactactacagcacattatctttcacaactgataaactatatgctgagtttggccgcgaagcttcgaacaacttcactgagatgtcacagcgactcgagtcaatggtgaaaaatgcgttctacaaatctcctctccgggaagaattcgtaaaatcacaggttatcaagttttcacaacagaaacatggggttctggctcatatgctgctgatttgcagatttcatagcactgaggacccggaaacagtggacaagattgttcagctggtccttcacgagaagctgcaggacgctgttggaccaccaaaagttgatcctcagtccgttaagataaagaaaataaacaaaaccgaaacggactcatacctgaaccactgttgtgggaccaggaggtcgaaaactctcgggcagagtctgaggatcgtgggaggaactgaggtggaggagggcgagtggccttggcaggcttcactgcagtgggacggtagccaccgctgtggggccactctgattaacgcaacgtggttggtcagcgcagctcattgctttacgacctataaaaatcctgctcgctggacagccagctttggcgttacgattaagccatccaaaatgaaacgcggactgcggcgtataatagtacatgaaaaatacaagcatcccagccacgattacgacatctctctggccgagttgagctctccagtaccttacaccaatgccgtccacagggtatgtttacccgacgcctcttatgaatttcagccgggcgacgttatgtttgtgacaggtttcggcgccctcaagaacgacggttactcccagaaccatctgagacaggctcaggtgaccctgatcgacgctacaacttgtaacgagccacaagcctacaacgatgccatcacccccaggatgctctgcgcaggcagtctggaaggcaagacagacgcctgccaaggcgacagcggtggacctctagtgtcctccgatgcccgagacatctggtatttagctggtattgtaagttggggtgacgagtgtgccaagcccaataaaccaggcgtctatacccgcgtaactgccttacgcgactggattacttcaaaaacagggatttag

SEQ ID NO: 177762 - DNA, 1272 bp, Artificial Sequence
  derived and/or modified sequence
atgatgtacagaccagatgtggtgcgggccaggaagagggtgtgctgggagccctgggtgattggcctggtgatcttcatcagcctcatcgtgctggccgtgtgcatcggcctgactgtgcactacgtgcgctacaaccagaagaagacctacaactactacagcaccctgtccttcaccacagacaagctgtatgcagagtttggccgggaggccagcaacaacttcacagagatgagccagaggctggagagcatggtgaagaatgccttctacaagagccccctgcgggaggagtttgtgaagagccaggtgatcaagttcagccagcagaagcatggagtgctggcccacatgctgctgatctgccgcttccacagcacagaagatcctgagaccgtggacaagatcgtgcagctggtgctgcacgagaagctgcaggatgctgtgggcccccccaaggtggacccccagagcgtgaagatcaagaagatcaacaagacagaaacagacagctacctgaaccactgctgcggcaccaggaggagcaagaccctgggccagagcctgcgcatcgtgggcggcacagaggtggaggagggggagtggccctggcaggccagcctgcagtgggatggcagccaccgctgtggggccaccctcatcaatgccacctggctggtgtctgctgcccactgcttcaccacctacaagaacccagcccgctggacagccagctttggagtgaccatcaagcccagcaagatgaagaggggcctgcggcgcatcatcgtgcatgagaagtacaagcaccccagccatgactatgacatcagcctggccgagctgagcagccctgtgccctacaccaatgctgtgcaccgggtgtgcctgcctgatgccagctatgagttccagcctggagatgtgatgtttgtgacaggctttggagccctgaagaatgatggctacagccagaaccacctgcggcaggcccaggtgaccctgattgatgccaccacctgcaatgagccccaggcctacaatgatgccatcacccccaggatgctgtgtgccggcagcctggagggcaagacagatgcctgccagggcgacagcggcggccccctggtgtccagtgatgcccgggacatctggtacctggccggcatcgtgtcctggggagatgaatgtgccaagcccaacaagccaggagtgtacaccagggtgacagccctgcgggactggatcaccagcaagacaggcatctag

SEQ ID NO: 177763 - DNA, 1272 bp, Artificial Sequence
  derived and/or modified sequence
atgatgtaccggcccgacgtggtgcgggcccggaagcgggtgtgctgggagccatgggtcatcgggctggtcatattcatttccctgattgtgcttgctgtctgtattgggctcacagtccattatgtgcgctacaatcagaaaaagacctacaactattattccactctatcattcaccactgacaagctgtatgcggaattcggaagggaggcctcaaataacttcaccgaaatgtcccagcggctggagtcaatggtcaagaatgcattttacaagtccccactacgcgaagaattcgtcaagtctcaggtaataaaattttctcagcagaagcacggcgttttggcccacatgctactgatctgcagattccacagtacggaagatccagagacagtagataagattgtgcagctggtgctgcatgagaagctgcaagacgctgtgggcccgccaaaggttgatccacagtcagtgaaaattaagaagattaacaagactgagaccgacagttatcttaaccattgttgcgggactcgtagaagtaaaaccttgggacagagcctccgaatagtggggggcaccgaagtcgaggagggagagtggccctggcaggcgtctctgcaatgggatgggtcccaccgttgtggagctactctcataaacgcgacatggttggtctcagcagcccattgcttcactacatataagaatcctgcaagatggacggcatctttcggcgttaccattaaaccttctaagatgaagaggggtctgcgccggattatcgttcatgagaagtacaagcacccatcacacgattacgatatctccctggcggaactgagctcaccggtcccttatactaatgccgttcaccgggtctgcctcccagacgcaagctatgagtttcagccaggtgacgtcatgtttgttactggctttggtgctctgaaaaacgacggctattctcaaaatcatcttcgccaagcacaggtcacccttatcgatgcgacgacatgtaacgagccccaggcctacaacgacgctatcacccccagaatgctgtgtgccggatccttggagggcaagaccgatgcttgccagggtgacagcggtgggccactagtgagctcggacgccagggatatctggtacctggcgggtattgtgtcttggggggatgagtgtgccaagccaaacaagcctggagtgtacaccagagttacagctcttagagactggatcacatctaagactggtatttag

SEQ ID NO: 177764 - DNA, 1272 bp, Artificial Sequence
  derived and/or modified sequence
atgatgtatagacccgacgtggtgcgcgcaaggaaacgggtgtgctgggagccttgggtgatcggactcgtgattttcatctcccttatagtattggcagtgtgtatcgggctcacggtgcactacgtgcggtataatcaaaagaagacctacaactactacagtactctatctttcacgactgataagctatatgccgagtttggcagagaggcatcaaacaatttcaccgaaatgagccaacgattggaatcaatggtgaaaaacgccttttacaaatctcctttgcgcgaggaatttgtaaaatctcaagtgattaagttctctcagcagaaacatggagtgttagcccatatgcttctgatatgcaggtttcattctactgaggatccagagaccgtggataaaatcgttcagcttgtactgcatgagaagcttcaggacgccgttggaccacccaaggtcgatcctcaatccgtaaagattaaaaagatcaacaagaccgagactgattcctatctgaatcactgttgcggaacacgaagatctaagaccctgggccaaagcctgcggatcgtgggcggaactgaagtggaagaaggggaatggccttggcaggctagccttcaatgggacggttcccacaggtgcggggctaccttaattaacgctacctggttagtttcagctgcccactgctttaccacatacaaaaatccagcacggtggactgcctcttttggagtgactatcaaacctagcaaaatgaagagaggcctgcgcaggattattgttcacgaaaagtacaagcaccccagccatgattatgacatcagcctggcagagctttcttcgcctgtgccctacaccaacgcagtgcatagggtctgcctgcccgatgcatcctacgagtttcagccgggagacgtcatgtttgtcaccggttttggcgctctgaaaaacgatggctattcccaaaaccatctgaggcaagcacaagtcaccctcatcgatgctactacttgcaatgaaccccaggcttataacgatgccatcactccaaggatgttgtgcgccggatcactggagggaaaaacagacgcctgccagggagactctggaggacccttggtctcctctgatgctcgcgatatctggtatctcgccggtatcgtttcatggggggacgagtgtgccaagccaaacaaaccaggggtctacacccgcgtcacagctctgcgcgactggataacaagtaaaacggggatttag

SEQ ID NO: 177765 - DNA, 2136 bp, Artificial Sequence
  derived and/or modified sequence
agctggattcacacacttggatgtagacctcgaccttcacaggactcttcattgctggttggcaatgatgtatcggccagatgtggtgagggctaggaaaagagtttgttgggaaccctgggttatcggcctcgtcatcttcatatccctgattgtcctggcagtgtgcattggactcactgttcattatgtgagatataatcaaaagaagacctacaattactatagcacattgtcatttacaactgacaaactatatgctgagtttggcagagaggcttctaacaattttacagaaatgagccagagacttgaatcaatggtgaaaaatgcattttataaatctccattaagggaagaatttgtcaagtctcaggttatcaagttcagtcaacagaagcatggagtgttggctcatatgctgttgatttgtagatttcactctactgaggatcctgaaactgtagataaaattgttcaacttgttttacatgaaaagctgcaagatgctgtaggaccccctaaagtagatcctcagtcagttaaaattaaaaaaatcaacaagacagaaacagacagctatctaaaccattgctgcggaacacgaagaagtaaaactctaggtcagagtctcaggatcgttggtgggacagaagtagaagagggtgaatggccctggcaggctagcctgcagtgggatgggagtcatcgctgtggagcaaccttaattaatgccacatggcttgtgagtgctgctcactgttttacaacatataagaaccctgccagatggactgcttcctttggagtaacaataaaaccttcgaaaatgaaacggggtctccggagaataattgtccatgaaaaatacaaacacccatcacatgactatgatatttctcttgcagagctttctagccctgttccctacacaaatgcagtacatagagtttgtctccctgatgcatcctatgagtttcaaccaggtgatgtgatgtttgtgacaggatttggagcactgaaaaatgatggttacagtcaaaatcatcttcgacaagcacaggtgactctcatagacgctacaacttgcaatgaacctcaagcttacaatgacgccataactcctagaatgttatgtgctggctccttagaaggaaaaacagatgcatgccagggtgactctggaggaccactggttagttcagatgctagagatatctggtaccttgctggaatagtgagctggggagatgaatgtgcgaaacccaacaagcctggtgtttatactagagttacggccttgcgggactggattacttcaaaaactggtatctaagagagaaaagcctcatggaacagataacatttttttttgttttttgggtgtggaggccatttttagagatacagaattggagaagacttgcaaaacagctagatttgactgatctcaataaactgtttgcttgatgcatgtattttcttcccagctctgttccgcacataagcatcctgcttctgccagatcaactctgtcatctgtgagcaatagttgaaactttatgtacatagagaaatagataatacaatattacattacagcctgtattcatttgttctctagaagttttgtcagaattttgacttgttgacataaatttgtaatgcatatatacaatttgaagcactccttttcttcagttcctcagctcctctcatttcagcaaatatccattttcaaggtgcagaacaaggagtgaaagaaaatataagaagaaaaaaatcccctacattttattggcacagaaaagtattaggtgtttttcttagtggaatattagaaatgatcatattcattatgaaaggtcaagcaaagacagcagaataccaatcacttcatcatttaggaagtatgggaactaagttaaggaaatccagaaagaagccaagatatatccttattttcatttccaaacaactactatgataaatgtgaagaagattctgtttttttgtgacctataataattatacaaacttcatgcaatgtacttgttctaagcaaattaaagcaaatatttatttaacattgttactgaggatgtcaacatataacaataaaatataaatcaccca

SEQ ID NO: 177766 - RNA, 1272 nt, Artificial Sequence
  derived and/or modified sequence
augauguacagacccgacgugguacgagcaagaaagcgcguuugcugggagccaugggugauuggacuggucauauucauuucuuugaucgugcucgccgugugcaucggauugaccguacacuacgucagguauaaucaaaaaaaaaccuauaacuauuauucgacucugagcuucacaacugauaaacuuuaugcugaguucggccgggaagccucaaacaauuuuacugagaugagccaacgguuggaauccauggugaagaaugcauuuuacaaaucaccccuacgcgaagaguucgugaagucacaggucaucaaauucucucaacaaaaacacggaguccuggcacacaugcugcugaucugcagguuucacuccaccgaggaccccgaaaccguugauaagaucguccagcuagucuugcaugagaaacuucaggacgcgguagggccccccaaggucgacccacacucuguaaaaauaaaaaagauuaauaagacugaaacugacucauaccugaaucacugcugugguacacgccggucaaaaacucuaggucagucacuaagaauugucggggggacggagguagaggaaggggaauggcccuggcaggcuucacuucagugggaugggagucaccggugcggagccacacugauuaaugcuaccuggcuggugucugccgcacacugcuuuacaaccuacaaaaacccagcucgguggacugcuuccuuugggguuacaaucaaaccuagcaagaugaaacgggggcuucgucgcauaaucguucacgaaaaguacaaacauccaucccacgauuacgauauaucccuggcugaauuaagcucccccgugccauacacaaacgcggugcaccgggugugucugccagacgcauccuacgaguuucaaccaggugacguaauguuuguaacuggcuucggcgcuuugaagaacgacgguuacucucagaaccaucuccgccaggcucagguaacacucauagacgccacuacuugcaacgagccucaggcauacaacgacgcuaucacaccaagaaugcugugugcagguaguuuggaaggcaagacggaugccugucagggagacagugggggcccucucguuucuagugacgcgagagacauuugguaucucgccggcauaguuagcuggggcgacgagugcgccaagccaaacaagccuggcguauacacacgcgugaccgcccugagggacuggaucaccucuaaaaccgguauuuag

SEQ ID NO: 177767 - RNA, 1272 nt, Artificial Sequence
  derived and/or modified sequence
augauguaucgcccggaugucguuagggcacgaaaacggguauguugggagcccugggugauuggacugguuauuuucauuucuuugauuguucuggccguuugcauugggcuuacugugcauuacgugagguauaaucagaaaaagacauauaacuacuacaguacuuuaucauuuacuacagacaagcuguaugccgaauuuggcagagaggcaaguaauaauuuuacagagaugagccaacgauuggaaucaauggucaagaacgcauucuacaagucgccacucagagaagaauuugugaagucacaggucaucaaauucucucaacaaaaacacggaguccuggcacacaugcugcugaucugcagguuucacuccaccgaggaccccgaaaccguugauaagaucguccagcuagucuugcaugagaaacuucaggacgcgguagggccccccaaggucgacccacacucuguaaaaauaaaaaagauuaauaagacugaaacugacucauaccugaaucacugcugugguacacgccggucaaaaacucuaggucagucacuaagaauugucggggggacggagguagaggaaggagaauggcccuggcaggcaucauugcagugggacggaagucacagaugcggcgcaacacuaauaaacgcaacuuggcuugugucagcagcgcacuguuuuaccaccuacaagaacccugcacguuggacugcuucauucggaguaacaauuaaaccaaguaagaugaagagaggccugcgccggaucauuguccaugagaaguauaaacacccaucccaugacuaugauaucucacuagccgaacucuccuccccagugccguacaccaaugccgugcaccgugugugucuuccagacgcuagcuacgaguuucagcccggagacguuauguuugugacuggguucggcgcucuuaagaacgauggguauucucagaaucaccuccgacaggcacaggucacacugaucgacgcuaccaccuguaaugagccucaggccuauaacgacgcuauuacaccaagaaugcuuugcgcuggcucgcucgagggaaagacugaugccugccagggggauagugguggcccgcuagucagcagcgacgcccgggacauuugguaucuggccgguauugugagcuggggagaugagugcgcuaaaccaaauaaaccaggcguauauacacgagugaccgcccuccgcgauuggauuacaaguaagaccggcaucuag

SEQ ID NO: 177768 - protein, 137 aa, Artificial Sequence
  derived and/or modified sequence
MKPPAAQGSPAAAAAAAPALDSAAAEDLSDALCEFDAVLADFASPFHERHFHYEEHLERMKRRSSASVSDSSGFSDSESADSLYRNSFSFSDEKLNSPTDSTPALLSATVTPQKAKLGDTKELEAFIADLDKTLASM

SEQ ID NO: 177769 - DNA, 1126 bp, Artificial Sequence
  derived and/or modified sequence
gtggcgagggcggtgcctgggggcaggggcctcctcggagggcggcggggacagacccgtcgccccggctccgcagccccgccccggccccgcctccgctccggccgccgaaggctataagatctaggaacccgagccggtggtagggcgggcgcggaccgtgctgggagcggcgcggctggagcgcagcgccgaagggactggcagggctgaagtgtgcgggacagcaagcccccgaatagccccggctgccacctcgcaggacccaaggccacgcgcgccgggcccagctgagccgcctcatgaagccgcccgcggcgcagggcagccccgcggccgccgcggccgcagccccggccctggactcggcggccgcggaggacctgtcggacgcgctgtgcgagtttgacgcggtgctggccgacttcgcgtcgcccttccacgagcgccacttccactacgaggagcacctggagcgcatgaagcggcgcagcagcgccagtgtcagcgacagcagcggcttcagcgactcggagagtgcagattcactttataggaacagcttcagcttcagtgatgaaaaactgaattctccaacagactctaccccagctcttctctctgccactgtcactcctcagaaagctaaattaggagacacaaaagagctagaagccttcattgctgatcttgacaaaactttagcaagtatgtgaaacaagaagttctgggtcctttcatcataagggagaagcttcagaaagttccgaggacctgctaaaatcagctactagaatctgctgccagaggggacaaagacgtgcactcaaccttctaccaggccactctcaggctcaccttaaaatcagcccttgatcccatttctgggcaatttagacagtgaaactgactttgtttacctgcttgcagcatattagaacagacgatccatgctaatattgtattttctcttaaaacatagctttcctgtaatttaaagtgcttttatgaaaatatttgtaattaattatatatagttggaaatagcagtaagctttcccattataatatatttttgtatacaaataaaatttgaactgaagtctgcaaaaaaaaaaaaaaaaaa

SEQ ID NO: 177770 - DNA, 414 bp, Artificial Sequence
  derived and/or modified sequence
atgaagccccccgccgcccagggcagccccgccgccgccgccgccgccgcccccgccctggacagcgccgccgccgaggacctgagcgacgccctgtgcgagttcgacgccgtgctggccgacttcgccagccccttccacgagagacacttccactacgaggagcacctggagagaatgaagagaagaagcagcgccagcgtgagcgacagcagcggcttcagcgacagcgagagcgccgacagcctgtacagaaacagcttcagcttcagcgacgagaagctgaacagccccaccgacagcacccccgccctgctgagcgccaccgtgaccccccagaaggccaagctgggcgacaccaaggagctggaggccttcatcgccgacctggacaagaccctggccagcatgtag

SEQ ID NO: 177771 - DNA, 414 bp, Artificial Sequence
  derived and/or modified sequence
atgaagccacccgctgcccagggaagccccgcagctgcagcagctgcggcaccagcactggattccgctgccgctgaggatctgtcggatgcgctctgcgagttcgatgccgtgctggcagattttgctagccctttccatgagcgccactttcactacgaagagcacctcgaacgaatgaaaagacgcagtagcgcctcagtaagcgatagttccggcttttctgattctgaaagtgctgactctctgtatagaaacagtttcagcttttcagatgagaagctcaattcacctacagacagcacgcctgctctcctgtcggcgacagttacgccacagaaagccaaactgggcgatacaaaagagctggaggctttcatagccgacctggataaaactcttgctagtatgtag

SEQ ID NO: 177772 - DNA, 414 bp, Artificial Sequence
  derived and/or modified sequence
atgaagcccccagctgcccagggcagccctgctgctgctgctgctgctgccccagccctggacagcgctgctgctgaggacctgagtgatgccctgtgtgaatttgatgctgtgctggccgactttgccagccccttccacgagcggcacttccactatgaggagcacctggagaggatgaagaggaggagcagcgcctctgtgtctgacagcagcggcttcagtgacagcgagagcgctgacagcctgtacagaaattccttctccttcagtgatgagaagctgaacagccccacagacagcaccccagccctgctgagcgccaccgtgaccccccagaaggccaagctgggggacaccaaggagctggaggccttcatcgctgacctggacaagaccctggcctccatgtag

SEQ ID NO: 177773 - DNA, 960 bp, Artificial Sequence
  derived and/or modified sequence
gcggaccgtgctgggagcggcgcggctggagcgcagcgccgaagggactggcagggctgaagtgtgcgggacagcaagcccccgaatagccccggctgccacctcgcaggacccaaggccacgcgcgccgggcccagctgagccgcctcatgaagccgcccgcggcgcagggcagccccgcggccgccgcggccgcagccccggccctggactcggcggccgcggaggacctgtcggacgcgctgtgcgagtttgacgcggtgctggccgacttcgcgtcgcccttccacgagcgccacttccactacgaggagcacctggagcgcatgaagcggcgcagcagcgccagtgtcagcgacagcagcggcttcagcgactcggagagtgcagattcactttataggaacagcttcagcttcagtgatgaaaaactgaattctccaacagactctaccccagctcttctctctgccactgtcactcctcagaaagctaaattaggagacacaaaagagctagaagccttcattgctgatcttgacaaaactttagcaagtatgtgaaacaagaagttctgggtcctttcatcataagggagaagcttcagaaagttccgaggacctgctaaaatcagctactagaatctgctgccagaggggacaaagacgtgcactcaaccttctaccaggccactctcaggctcaccttaaaatcagcccttgatcccatttctgggcaatttagacagtgaaactgactttgtttacctgcttgcagcatattagaacagacgatccatgctaatattgtattttctcttaaaacatagctttcctgtaatttaaagtgcttttatgaaaatatttgtaattaattatatatagttggaaatagcagtaagctttcccattataatatatttttgtatacaaataaaatttgaactgaagtctgcttcct

SEQ ID NO: 177774 - DNA, 414 bp, Artificial Sequence
  derived and/or modified sequence
atgaagccccccgccgcccagggcagccccgccgccgccgccgccgcagcacccgcactggacagtgcagccgctgaagatctcagcgacgctctgtgtgaatttgacgcagtactggccgattttgcctctcctttccacgagaggcattttcattacgaagaacatctagagcgaatgaagcggaggtccagtgccagcgtttccgactcttcaggattctccgatagcgagagtgccgattcattatataggaattcattttcattttccgatgaaaagttaaatagccccacagacagtacacccgccctgctttcagcaacagtcacaccccagaaggccaagttgggcgatacaaaggagcttgaagcttttattgcagacctcgataagacattagcaagtatgtag

SEQ ID NO: 177775 - DNA, 414 bp, Artificial Sequence
  derived and/or modified sequence
atgaaaccgccagctgcccaagggtctcctgccgctgcagctgccgcagcgcctgccctggactctgcagctgccgaggacttatccgacgcactctgtgaattcgatgccgtgctggcagactttgctagcccctttcacgaaaggcacttccattatgaagagcatctggagcggatgaagaggcggtcctctgcctctgtgtccgatagttctggattcagcgacagcgagtccgccgactctctgtatcgaaattcattcagctttagcgacgagaagctgaattcccctacggattcaactcctgccctactttcggcgacggtgacgccacagaaagccaagctgggtgacacaaaggagctggaggcattcatcgctgacctggataaaaccctggcgtctatgtag

SEQ ID NO: 177776 - protein, 181 aa, Artificial Sequence
  derived and/or modified sequence
MFKKFDEKENVSNCIQLKTSVIKGIKNQLIEQFPGIEPWLNQIMPKKDPVKIVRCHEHIEILTVNGELLFFRQREGPFYPTLRLLHKYPFILPHQQVDKGAIKFVLSGANIMCPGLTSPGAKLYPAAVDTIVAIMAEGKQHALCVGVMKMSAEDIEKVNKGIGIENIHYLNDGLWHMKTYK

SEQ ID NO: 177777 - DNA, 546 bp, Artificial Sequence
  derived and/or modified sequence
atgttcaagaagttcgacgagaaggagaacgtgagcaactgcatccagctgaagaccagcgtgatcaagggcatcaagaaccagctgatcgagcagttccccggcatcgagccctggctgaaccagatcatgcccaagaaggaccccgtgaagatcgtgagatgccacgagcacatcgagatcctgaccgtgaacggcgagctgctgttcttcagacagagagagggccccttctaccccaccctgagactgctgcacaagtaccccttcatcctgccccaccagcaggtggacaagggcgccatcaagttcgtgctgagcggcgccaacatcatgtgccccggcctgaccagccccggcgccaagctgtaccccgccgccgtggacaccatcgtggccatcatggccgagggcaagcagcacgccctgtgcgtgggcgtgatgaagatgagcgccgaggacatcgagaaggtgaacaagggcatcggcatcgagaacatccactacctgaacgacggcctgtggcacatgaagacctacaagtag

SEQ ID NO: 177778 - DNA, 546 bp, Artificial Sequence
  derived and/or modified sequence
atgttcaaaaaatttgatgaaaaggaaaatgtgtctaattgtatacaactgaaaaccagtgtgataaagggcatcaagaaccagttaatcgagcagtttcccggaattgagccctggcttaaccagattatgcctaaaaaggatcccgtgaaaatagtccgctgccatgaacatattgagattttgactgtgaatggagagcttctcttcttcaggcagagagaggggcccttctacccaaccctgcgactcttgcacaagtacccgttcattttgccacatcagcaggttgacaaaggcgccatcaaattcgtgctgtcaggggcgaatattatgtgcccggggctcacatcgcctggggctaagctctatcctgctgccgtggacacgatcgtcgccattatggccgaaggcaaacagcatgccttgtgcgtcggtgtgatgaagatgtcagctgaggacattgaaaaggttaataaagggatcgggatcgagaatatccactatctcaacgatggactgtggcacatgaaaacatataagtag

SEQ ID NO: 177779 - DNA, 546 bp, Artificial Sequence
  derived and/or modified sequence
atgttcaagaagtttgatgagaaggaaaatgtgagcaactgcatccagctgaagaccagcgtcatcaagggcatcaagaaccagctgattgagcagtttcctggcatcgagccctggctgaaccagatcatgcccaagaaggaccctgtgaagatcgtgcgctgccacgagcacatcgagatcctgactgtgaatggagagctgctcttcttccggcagcgggagggccccttctaccccaccctgcggctgctgcacaagtaccccttcatcctgccccaccagcaggtggacaagggggccatcaagtttgtgctgagcggggccaacatcatgtgccccggcctgaccagccctggggccaagctgtacccagctgctgtggacaccatcgtggccatcatggccgagggcaagcagcacgccctgtgtgtgggcgtgatgaagatgtctgcagaagatattgagaaggtgaacaagggcatcggcatcgagaacatccactacctgaatgatggcctgtggcacatgaagacctacaagtag

SEQ ID NO: 177780 - DNA, 1018 bp, Artificial Sequence
  derived and/or modified sequence
gctacctccaactgctgaggaaccggttgcctaaaaggagccggcaaaagcgcctacgtggagtccagaggagcggaagtagtcagatttgactgagagccgtaaagcgcggctggctctcgttttccggataacgactacagctccgactgtcagtgccggccttcctcgtgtgaggggatctgccggacccctgcaaattcaatttctttcccattccgggcccttccctatcgtcgcccccttcaccttggatcatgttcaagaaatttgatgaaaaagaaaatgtgtccaactgcatccagttgaaaacttcagttattaagggtattaagaatcaattgatagagcaatttccaggtattgaaccatggcttaatcaaatcatgcctaagaaagatcctgtcaaaatagtccgatgccatgaacatatagaaatccttacagtaaatggagaattactcttttttagacaaagagaagggcctttttatccaaccctaagattacttcacaaatatccttttatcctgccacaccagcaggttgataaaggagccatcaaatttgtactcagtggagcaaatatcatgtgtccaggcttaacttctcctggagctaagctttaccctgctgcagtagataccattgttgctatcatggcagaaggaaaacagcatgctctatgtgttggagtcatgaagatgtctgcagaagacattgagaaagtcaacaaaggaattggcattgaaaatatccattatttaaatgatgggctgtggcatatgaagacatataaatgagcctcagaaggaatgcacttgggctaaatatggatattgtgctgtatctgtgtttgtgtctgtgtgtgacagcatgaagataatgcctgtggttatgctgaataaattcaccagatgctaaaattctgttagcttcagaaattattttaagttttcttaaactcaagttaaaattgggtagcaaacttggacattaaaaggtatctggtaagtaa

SEQ ID NO: 177781 - DNA, 546 bp, Artificial Sequence
  derived and/or modified sequence
atgttcaagaagttcgacgagaaggagaacgtgagcaactgcatccagctaaagacaagtgtcataaaaggcatcaaaaatcagctaatcgagcagtttccagggattgagccatggttgaatcagattatgccaaaaaaggatcccgttaaaatagtacgatgtcatgaacatatcgagatactcacagttaacggggaactgctgttctttcgccagagggagggtcccttttacccaaccctgcgcctgctacacaagtacccattcatattgccacatcaacaggtagataaaggagcaattaagtttgtgctgtcaggagccaatataatgtgtccagggttaactagtcctggcgccaaactgtaccccgccgccgttgatacgatcgtggcaatcatggcagaggggaaacagcacgctctttgtgtcggagtgatgaagatgtctgccgaagatattgaaaaagtgaataagggcatcggaatcgaaaatatacactacttaaacgacggactttggcacatgaagacttataaatag

SEQ ID NO: 177782 - DNA, 546 bp, Artificial Sequence
  derived and/or modified sequence
atgttcaaaaagttcgatgagaaagagaacgtttctaactgcatccagttgaagacttctgtaattaagggtattaagaatcagttgattgagcagtttcctggtatagaaccctggctgaaccagatcatgcctaagaaggatccggtgaaaatcgttaggtgccacgagcatatcgaaatattgacagtaaacggagaacttctgttttttaggcaaagggaaggaccattctaccctacgctgcgactgttgcacaagtatcctttcatcctcccccatcagcaggtggataagggagctatcaagttcgtgctgtctggcgcaaacattatgtgcccaggactgacatcacccggagccaaactgtatccggctgccgtcgacaccattgtagctattatggccgaggggaagcagcatgctttgtgcgtgggagtgatgaaaatgtctgcggaggatattgagaaggtaaataaggggattggtatcgaaaacattcactatctgaacgacggcctctggcacatgaagacctataaatag

SEQ ID NO: 177783 - protein, 219 aa, Artificial Sequence
  derived and/or modified sequence
MPRGRKSRRRRNARAAEENRNNRKIQASEASETPMAASVVASTPEDDLSGPEEDPSTPEEASTTPEEASSTAQAQKPSVPRSNFQGTKKSLLMSILALIFIMGNSAKEALVWKVLGKLGMQPGRQHSIFGDPKKIVTEEFVRRGYLIYKPVPRSSPVEYEFFWGPRAHVESSKLKVMHFVARVRNRCSKDWPCNYDWDSDDDAEVEAILNSGARGYSAP

SEQ ID NO: 177784 - DNA, 660 bp, Artificial Sequence
  derived and/or modified sequence
atgcccagaggcagaaagagcagaagaagaagaaacgccagagccgccgaggagaacagaaacaacagaaagatccaggccagcgaggccagcgagacccccatggccgccagcgtggtggccagcacccccgaggacgacctgagcggccccgaggaggaccccagcacccccgaggaggccagcaccacccccgaggaggccagcagcaccgcccaggcccagaagcccagcgtgcccagaagcaacttccagggcaccaagaagagcctgctgatgagcatcctggccctgatcttcatcatgggcaacagcgccaaggaggccctggtgtggaaggtgctgggcaagctgggcatgcagcccggcagacagcacagcatcttcggcgaccccaagaagatcgtgaccgaggagttcgtgagaagaggctacctgatctacaagcccgtgcccagaagcagccccgtggagtacgagttcttctggggccccagagcccacgtggagagcagcaagctgaaggtgatgcacttcgtggccagagtgagaaacagatgcagcaaggactggccctgcaactacgactgggacagcgacgacgacgccgaggtggaggccatcctgaacagcggcgccagaggctacagcgccccctag

SEQ ID NO: 177785 - DNA, 1461 bp, Artificial Sequence
  derived and/or modified sequence
gcgtggcaggagaggcggggccaattttgctgagctttctcgcgggcttgcagctgcggcaagtgctggcggcggctgctcgcgcaagtcagctggcgtgggaactaccctttgtagctgagaacggcttgtttattgctacaaagactctattgacattggtagcttcagcggcagcagcttcttacggtataaagctgttgcttcctgaagaggctacaagcatccttccctaggactgctgtaagctttgagcctctagcaggagacatgcctcggggacgaaagagtcggcgccgccgtaatgcgagagccgcagaagagaaccgcaacaatcgcaaaatccaggcctcagaggcctccgagacccctatggccgcctctgtggtagcgagcacccccgaagacgacctgagcggccccgaggaagacccgagcactccagaggaggcctctaccacccctgaagaagcctcgagcactgcccaagcacaaaagccttcagtgccccggagcaattttcagggcaccaagaaaagtctcctgatgtctatattagcgctcatcttcatcatgggcaacagcgccaaggaagctctggtctggaaagtgctggggaagttaggaatgcagcctggacgtcagcacagcatctttggagatccgaagaagatcgtcacagaagagtttgtgcgcagagggtacctgatttataaaccggtgccccgtagcagtccggtggagtatgagttcttctgggggccccgagcacacgtggaatcgagcaaactgaaagtcatgcattttgtggcaagggttcgtaaccgatgctctaaagactggccttgtaattatgactgggattcggacgatgatgcagaggttgaggctatcctcaattcaggtgctaggggttattccgccccttaagtagatctgaggcagacccttgggggtgtaaaagagagtcacaggtaccccaaggagtagatgccagggtcctaagttgaaaatgatgtcgattgggggcgggggacactgtatttgatatttgtgatcagtgatcattgttcaactgcgaaatagagtgtttgcttttgataatggaaaattgtattcgttttaaaattccgtttgttgagaataacaatatgtttaaaaatataattgaacaaatttttttctttgtttcctgtcattgacatttagtataacagttttgctaacgttctaaaatgaagtcgttccatcataatctatgatcttgtacagcacttatagaaataagctgttcttttgaagttgaaatacccagtaaaatgttgaagaaggatggaggatttcttcatatctgacgtttctgaaaccctttgtgtctgctgttgtgtgaagattgacatttaccatgattttccttagttactgcagaacatagagaaaaataaaagcctaacgaatagt

SEQ ID NO: 177786 - DNA, 660 bp, Artificial Sequence
  derived and/or modified sequence
atgccgcgcggcaggaaatccaggaggcgcaggaacgcccgggcagcagaggagaacagaaacaacagaaagatccaggcctctgaagcgagcgagaccccaatggcagcctcagttgtggctagcacccccgaggacgatctgtctggacccgaggaagacccttcaacccccgaagaggcgagcaccacacccgaggaggcaagcagtaccgcgcaggcccagaaacccagtgttcctcgttcgaattttcaggggaccaaaaaaagcctcctgatgagcatccttgcccttatcttcattatgggcaactccgctaaggaggcgctcgtctggaaagtgctcgggaagctggggatgcaacctgggcggcagcactccatatttggagatccaaagaagattgtcaccgaggagttcgtgcgccgcggttatctgatctataagccggtgcctcggagctctcctgtcgaatatgagttcttctggggaccgcgggcccatgtcgaaagctctaaactgaaagtgatgcacttcgtggctagggtacggaacagatgtagcaaagattggccttgtaactacgactgggatagcgatgatgatgcagaagtggaagcaatcctgaattctggagcaagaggttactccgctccctag

SEQ ID NO: 177787 - DNA, 660 bp, Artificial Sequence
  derived and/or modified sequence
atgccccggggcaggaagagcagaagaagaagaaatgcccgggctgctgaggagaacagaaacaacaggaagatccaggccagcgaggccagcgagacccccatggccgcctctgtggtggccagcaccccagaagatgacctgagcggccctgaggaggaccccagcaccccagaggaggccagcaccaccccagaggaggccagcagcacagcccaggcccagaagcccagcgtgcccaggagcaacttccagggcaccaagaagagcctgctgatgagcatcctggccctgatcttcatcatgggcaacagcgccaaggaggccctggtgtggaaggtgctgggcaagctgggcatgcagcccggccggcagcacagcatctttggagaccccaagaagatcgtgacagaggagtttgtgcggcggggctacctgatctacaagcctgtgcccaggagcagccctgtggagtatgagttcttctggggcccccgggcccacgtggagagcagcaagctgaaggtgatgcactttgtggcccgggtgaggaaccgctgcagcaaggactggccctgcaactatgactgggacagtgatgatgatgctgaggtggaggccatcctgaacagcggggcccggggctacagcgccccctag

SEQ ID NO: 177788 - DNA, 660 bp, Artificial Sequence
  derived and/or modified sequence
atgccccggggccggaagagccggcggcggcggaacgcccgggccgccgaagaaaacagaaacaatcggaaaatacaggcctcagaggctagtgagaccccaatggccgcgtccgtggtcgcgagcacaccagaagacgacctgagcggtccagaggaggatccttcaacccccgaggaggctagtaccacgccagaagaggcctcttccaccgcccaggctcagaagcctagcgtcccacgttctaattttcaaggcacaaaaaagagcctgctgatgagcattctggctttgattttcataatgggtaactctgctaaggaagccctggtttggaaagttttaggaaagctgggcatgcagcctggacggcagcactctattttcggggaccccaagaagattgttacagaggaattcgttcgccggggatatctgatatataaacctgtgccgaggtcctcccctgtggagtacgaatttttctggggtcctcgagcccatgtcgagagctcaaagctcaaggtgatgcattttgtcgcgcgggtgcgtaatcgctgctcaaaggactggccttgtaattatgactgggactcagatgacgacgccgaggtggaagccattttaaactccggcgcgagaggctattcggcaccctag

SEQ ID NO: 177789 - DNA, 660 bp, Artificial Sequence
  derived and/or modified sequence
atgccaaggggcagaaagagccgtcgacgccgaaacgccagagccgctgaggagaaccgtaacaacagaaagatccaggcctccgaggcgtcggagacgccaatggccgctagcgttgtggcttcaactccagaagatgacctttcaggcccagaagaagacccgtcaacgcctgaagaggcaagtacgactcccgaagaggccagttcgacggctcaggctcagaagccatctgtcccccgttctaattttcaagggacaaaaaagtctctgttgatgagcattctggccctgatttttataatgggcaactccgccaaagaggctctcgtttggaaagtcctcggcaaactgggcatgcagcccggacggcagcactctatatttggggatcccaagaaaattgtcactgaagagtttgttcgcagagggtacctcatttacaaacctgtcccaaggtctagtcctgtagaatatgaatttttctgggggcctcgggcacacgtggagagcagcaaactaaaggtgatgcactttgtcgctagagtcagaaatcgttgctccaaagattggccatgcaactacgactgggacagtgatgacgacgcggaagtggaggcaatcctcaattcaggggctagaggctattcagctccctag

SEQ ID NO: 177790 - protein, 412 aa, Artificial Sequence [sequence omitted]

SEQ ID NO: 177791 - DNA, 1239 bp, Artificial Sequence
  derived and/or modified sequence
atggcccccgtggaacacgtggtcgctgacgccggggccttcctgcggcacgccgccctgcaagacatcggaaagaatatttatactatccgggaagtcgttactgagatacgggacaaggccacacggagaaggctggcggttctcccctatgaattgcgttttaaggagcccctaccagaatacgttcgcctggtcaccgagttctcaaaaaagaccggagactatccgtccctgagcgccaccgacatccaagtgttggccttgacctaccagcttgaggctgagtttgtcggcgtgtcacacctgaagcaagagcctcagaaggtcaaggtgtccagctccattcaacatcccgagactcccctgcatatctccggcttccatcttccatacaaacctaaaccccctcaagaaactgaaaaggggcactccgcctgtgagcccgaaaacctcgagttcagttcattcatgttttggcggaatccactcccgaacattgaccatgagcttcaggaattattaatcgacagaggtgaagatgtgccgtccgaagaagaagaggaggaggaaaatggctttgaagatcggaaagatgattcagacgacgacggaggaggctggattaccccgagtaacatcaagcagatacagcaggaattagagcagtgcgacgtgcctgaggacgtgagggtgggatgccttacaaccgacttcgccatgcagaatgtgcttctgcagatgggcttacacgtgctagccgtgaacgggatgctcatccgtgaggcacgctcatatatcctgcgttgtcacgggtgttttaaaacaacatccgacatgtctcgagtgttctgctcccattgtggcaataagaccctcaagaaagtgagtgttacagtgtcagatgacgggacgcttcacatgcatttctctcggaaccccaaggttctgaacccacgaggcctgagatactcactgcctaccccaaaaggcggaaagtacgctatcaatccccacctgacagaagatcagaggttcccacagctgcgcttatcccagaaggcacgacagaaaaccaatgttttcgctccagattatatcgccggtgtttcaccatttgtggaaaatgacatcagctcacggtcagcgaccttacaggtgagagattccactctaggcgccgggaggaggcgactcaatccgaacgctagtaggaaaaaattcgtcaagaagaggtag

SEQ ID NO: 177792 - DNA, 1720 bp, Artificial Sequence
  derived and/or modified sequence
ctctcacgcagccaacatggctccagtggagcacgttgtggcggatgctggggctttcctgcggcatgcggctctgcaggacatcgggaagaacatttacaccatccgggaggtggtcactgagattcgggacaaggccacacgcaggcggctcgctgtcctgccctacgagctgcggttcaaggagcccttaccggaatacgtgcggctggtgactgagttttcaaagaaaacaggagactaccccagcctctctgccacggacatccaagtgcttgcactcacataccagttggaagcagagtttgttggggtgtctcacctaaaacaagaaccacagaaggttaaggtgagctcatcgattcagcacccagaaacacctctgcacatttctggtttccatctgccctacaagcctaaacccccacaagaaacagaaaaaggacactcagcttgtgagcctgagaacctggaatttagttccttcatgttctggagaaaccctttgcccaacatcgatcatgaactgcaggagctgctgattgacagaggtgaggacgttccaagtgaggaggaggaggaggaagaaaacgggtttgaagacagaaaagatgacagcgatgacgacgggggtggctggataacccccagtaacatcaagcagatccagcaggagctggagcagtgtgacgtccccgaggacgtgcgggttggctgcctgaccacagacttcgccatgcagaatgttctgctgcagatggggctgcacgtgctggcggtgaacggcatgctgattcgtgaggcccggagctacatcttgcgctgccatggctgtttcaagacaacgtctgacatgagccgagtgttctgctcacactgtgggaacaagaccctgaagaaagtgtccgtgaccgtcagcgacgacggcaccctgcacatgcacttctcccgcaaccccaaggtgctgaacccccgcggcctccggtactcgcttcccactcccaaagggggcaaatacgccatcaacccccatctcaccgaggatcagcgcttccctcagctgcgactctcccaaaaggccaggcagaaaaccaacgtgttcgcccctgactacatcgccggggtgtcaccctttgtcgagaatgacatctccagccgctcagctaccctgcaggtccgggacagcaccttgggagctgggcggagacgcttaaatcccaacgcttccagaaagaagtttgtgaagaaaaggtgaagagcgagttcccgcaggcaaattggatgggcgtctggccgccgtggagttccggtgacccatttccccagccgtgtcgtctccaggaccacccgatggaaataacaggcgggcttcacggtgcggctctgtccgcccatgccccgctgggtctgcagggaactggactgtcccatggcctgtgagcaccggagcgcctggctgcctgccaaggaagtgcaattgcataaaaacagaaagaacaacgccctggagccaatcttcaagaaaggaatttccaaaggataatatttttctaataaatgcggctgcaacctcctgtgcatttaattaaataggccaaatttttgctgcttaggtcatctcaaggctgatacttgagctgtgtgcccagagatcatgcatttagatttatatttttgccagaaaatacaaggttataataaaactaagaactaccatttc

SEQ ID NO: 177793 - DNA, 1239 bp, Artificial Sequence
  derived and/or modified sequence
atggcccctgtggagcacgtggtggctgatgctggggccttcctgcggcatgctgccctgcaggacatcggcaagaacatctacaccatccgggaggtggtgacagagatccgggacaaggccacccggcggcggctggccgtgctgccctatgagctgcgcttcaaggagcccctgcctgaatatgtgcggctggtgacagagttcagcaagaagacaggagactaccccagcctgagcgccacagacatccaggtgctggccctgacctaccagctggaggccgagtttgtgggcgtgagccacctgaagcaggagccccagaaggtgaaggtgagcagcagcatccagcaccctgagacccccctgcacatcagcggcttccacctgccctacaagcccaagccaccccaggagacagagaagggccacagcgcctgtgagcctgagaacctggagttcagcagcttcatgttctggaggaaccccctgcccaacatcgaccacgagctgcaggagctgctgattgacagaggagaagatgtgcccagcgaggaggaggaggaggaggagaatggatttgaggacaggaaggatgacagtgatgatgatggcggcggctggatcacccccagcaacatcaagcagatccagcaggagctggagcagtgtgatgtgcctgaagatgtgcgggtgggctgcctgaccacagactttgccatgcagaatgtgctgctgcagatgggcctgcacgtgctggccgtgaatggcatgctgatccgggaggcccggagctacatcctgcgctgccacggctgcttcaagaccaccagtgacatgagcagggtcttctgcagccactgcggcaacaagaccctgaagaaggtgtctgtgacagtgtctgatgatggcaccctgcacatgcacttcagcaggaaccccaaggtgctgaacccccggggcctgcgctacagcctgcccacccccaagggcggcaagtatgccatcaacccccacctgacagaggaccagcgcttcccccagctgcggctgagccagaaggcccggcagaagaccaacgtgtttgccccagactacatcgccggcgtgagcccctttgtggagaatgacatcagcagccgcagcgccaccctgcaggtgcgggacagcaccctgggcgccggcagaagaaggctgaaccccaatgccagcaggaagaagtttgtgaagaagaggtag

SEQ ID NO: 177794 - DNA, 1239 bp, Artificial Sequence
  derived and/or modified sequence
atggcccccgtggagcacgtggtggccgacgccggcgccttcctgagacatgcagcactgcaagatataggcaaaaacatctacactattagagaggtggtgaccgagatcagggacaaggctaccagaagaagacttgctgtcttaccctacgaactgcgcttcaaggaaccactgcccgagtatgttagactcgtaacagagtttagcaaaaagactggggactatccttcactgagcgcaactgacatccaggtactggcattgacgtaccagttggaggccgagttcgtgggggtaagccacctgaagcaggagcctcaaaaggtgaaagtgtcttcttccatccagcatcctgagacccccctgcacatttctggtttccacttgccatacaaaccaaagccccctcaggagaccgaaaagggccactccgcgtgcgaacctgagaatttggagtttagcagcttcatgttctggcggaatcctttgcctaatatagatcatgagctccaggaactccttattgacagaggggaggacgtgccttctgaagaagaggaggaggaggagaatggctttgaagatagaaaggatgactctgacgacgacggcgggggctggatcacacctagcaatataaaacaaatccagcaggaactggagcagtgcgatgttcctgaggacgtgagggtgggctgcctgacaactgacttcgccatgcaaaatgtcctgctccagatgggcctgcatgtgttggccgtaaatgggatgctgatccgggaggcaagatcctatatcctgcggtgccatggatgctttaagaccactagtgatatgagcagggtgttttgttcgcactgtggtaacaagactttgaagaaggtatcggtcactgtgtcggacgacggcaccttgcacatgcatttctcaagaaatcccaaggtcttaaacccacgtggcctgcgttacagcctccctacgccgaagggtggtaaatacgccatcaacccccatcttacagaggaccagcgatttcctcagctgcgcttatcgcagaaggcccgccagaaaaccaacgtgttcgctccagactacatcgccggcgtgtcccctttcgttgaaaatgacattagcagccggagcgctacactgcaggtcagggactctacactaggagccgggcgacgtaggctcaaccccaatgccagtcgcaaaaaattcgtgaaaaaacgctag

SEQ ID NO: 177795 - DNA, 1239 bp, Artificial Sequence
  derived and/or modified sequence
atggctcccgtggagcatgtggtggcagacgcgggtgcttttcttagacacgcggcactgcaagacatcggcaagaatatatacaccattcgtgaagttgtgactgagattagggataaagccactcgcagacgcttggccgtccttccttacgagctcagattcaaagaaccactgccggagtatgtgcgacttgttacggagttttcaaagaagacgggcgactatccatctcttagcgcaactgacattcaggtgttggcactaacataccagctggaggctgaattcgtgggagtatcccaccttaaacaggaacctcagaaagtgaaagtgagttctagcattcagcaccccgaaacgccgctgcacatcagcgggttccacctgccatacaagccaaaacctccgcaggaaacagagaagggacattcagcctgcgagccagagaacctcgagttttcctccttcatgttttggcgcaaccccctcccaaacatcgatcacgagctgcaagagttgctgatcgaccgcggtgaggacgtgccgagtgaggaagaggaggaagaggaaaacggctttgaggatcgaaaggatgacagtgatgatgatggcggaggatggatcaccccctctaacattaagcagatacagcaggagctggagcagtgtgacgtaccggaagacgtcagggtcggctgtctgactaccgacttcgcaatgcagaatgtgctgctacagatgggacttcatgtgttggcagtcaatgggatgctgatccgggaggctaggtcgtacattctgcggtgtcacgggtgctttaagactaccagtgacatgtccagggtgttctgtagccactgtggtaacaaaactttaaagaaagtgtccgtcaccgtgagcgacgacggtaccctgcatatgcacttttcccgtaatcccaaagtgctgaatcctagagggctgaggtatagccttccgacccccaaaggaggaaagtacgctataaaccctcacctgacagaagatcagcgattcccacagctgagactatcccagaaggctagacagaagactaacgtattcgcgccagactacatcgccggagtctctccgttcgtggagaacgatatcagctcaaggtcagcaaccctgcaggttagggattctactttgggggcaggccgtaggcgactcaatcccaatgcgagtcggaagaaattcgtgaagaagaggtag

SEQ ID NO: 177796 - DNA, 1239 bp, Artificial Sequence
  derived and/or modified sequence
atggcccccgtggagcacgtggtggccgacgccggcgccttcctgagacacgccgccctgcaggacatcggcaagaacatctacaccatcagagaggtggtgaccgagatcagagacaaggccaccagaagaagactggccgtgctgccctacgagctgagattcaaggagcccctgcccgagtacgtgagactggtgaccgagttcagcaagaagaccggcgactaccccagcctgagcgccaccgacatccaggtgctggccctgacctaccagctggaggccgagttcgtgggcgtgagccacctgaagcaggagccccagaaggtgaaggtgagcagcagcatccagcaccccgagacccccctgcacatcagcggcttccacctgccctacaagcccaagcccccccaggagaccgagaagggccacagcgcctgcgagcccgagaacctggagttcagcagcttcatgttctggagaaaccccctgcccaacatcgaccacgagctgcaggagctgctgatcgacagaggcgaggacgtgcccagcgaggaggaggaggaggaggagaacggcttcgaggacagaaaggacgacagcgacgacgacggcggcggctggatcacccccagcaacatcaagcagatccagcaggagctggagcagtgcgacgtgcccgaggacgtgagagtgggctgcctgaccaccgacttcgccatgcagaacgtgctgctgcagatgggcctgcacgtgctggccgtgaacggcatgctgatcagagaggccagaagctacatcctgagatgccacggctgcttcaagaccaccagcgacatgagcagagtgttctgcagccactgcggcaacaagaccctgaagaaggtgagcgtgaccgtgagcgacgacggcaccctgcacatgcacttcagcagaaaccccaaggtgctgaaccccagaggcctgagatacagcctgcccacccccaagggcggcaagtacgccatcaacccccacctgaccgaggaccagagattcccccagctgagactgagccagaaggccagacagaagaccaacgtgttcgcccccgactacatcgccggcgtgagccccttcgtggagaacgacatcagcagcagaagcgccaccctgcaggtgagagacagcaccctgggcgccggcagaagaagactgaaccccaacgccagcagaaagaagttcgtgaagaagagatag

SEQ ID NO: 177797 - protein, 406 aa, Artificial Sequence
  derived and/or modified sequence
MAANLSRNGPALQEAYVRVVTEKSPTDWALFTYEGNSNDIRVAGTGEGGLEEMVEELNSGKVMYAFCRVKDPNSGLPKFVLINWGAHVTINARAEEDVEPECIMEKVAKASGANYSFHKESGRFQDVGPQAPVGSVYQKTNAVSEIKRVGKDSFWAKAEKEEENRRLEEKRRAEEAQRQLEQERRERELREAARREQRYQEQGGEASPQSRTWEQQQEVVSRNRNEQESAVHPREIFKQKERAMSTTSISSPQPGKLRSPFLQKQLTQPETHFGREPAAAISRPRADLPAEEPAPSTPPCLVQAEEEAVYEEPPEQETFYEQPPLVQQQGAGSEHIDHHIQGQGLSGQGLCARALYDYQAADDTEISFDPENLITGIEVIDEGWWRGYGPDGHFGMFPANYVELIE

SEQ ID NO: 177798 - protein, 382 aa, Artificial Sequence
  derived and/or modified sequence
MAANLSRNGPALQEAYVRVVTEKSPTDWALFTYEGNSNDIRVAGTGEGGLEEMVEELNSGKVMYAFCRVKDPNSGLPKFVLINWTGEGVNDVRKGACASHVSTMASFLKGSVYQKTNAVSEIKRVGKDSFWAKAEKEEENRRLEEKRRAEEAQRQLEQERRERELREAARREQRYQEQGGEASPQSRTWEQQQEVVSRNRNEQESAVHPREIFKQKERAMSTTSISSPQPGKLRSPFLQKQLTQPETHFGREPAAAISRPRADLPAEEPAPSTPPCLVQAEEEAVYEEPPEQETFYEQPPLVQQQGAGSEHIDHHIQGQGLSGQGLCARALYDYQAADDTEISFDPENLITGIEVIDEGWWRGYGPDGHFGMFPANYVELIE

SEQ ID NO: 177799 - protein, 431 aa, Artificial Sequence
  derived and/or modified sequence
MAANLSRNGPALQEAYVRVVTEKSPTDWALFTYEGNSNDIRVAGTGEGGLEEMVEELNSGKVMYAFCRVKDPNSGLPKFVLINWTGEGVNDVRKGACASHVSTMASFLKGAHVTINARAEEDVEPECIMEKVAKASGANYSFHKESGRFQDVGPQAPVGSVYQKTNAVSEIKRVGKDSFWAKAEKEEENRRLEEKRRAEEAQRQLEQERRERELREAARREQRYQEQGGEASPQSRTWEQQQEVVSRNRNEQESAVHPREIFKQKERAMSTTSISSPQPGKLRSPFLQKQLTQPETHFGREPAAAISRPRADLPAEEPAPSTPPCLVQAEEEAVYEEPPEQETFYEQPPLVQQQGAGSEHIDHHIQGQGLSGQGLCARALYDYQAADDTEISFDPENLITGIEVIDEGWWRGYGPDGHFGMFPANYVELIE

SEQ ID NO: 177800 - DNA, 1221 bp, Artificial Sequence
  derived and/or modified sequence
atggccgccaacctgagcagaaacggccccgccctgcaggaggcctacgtgagagtggtgaccgagaagagccccaccgactgggccctgttcacctacgagggcaacagcaacgacatcagagtggccggcaccggcgagggcggcctggaggagatggtggaggagctgaacagcggcaaggtgatgtacgccttctgcagagtgaaggaccccaacagcggcctgcccaagttcgtgctgatcaactggggcgcccacgtgaccatcaacgccagagccgaggaggacgtggagcccgagtgcatcatggagaaggtggccaaggccagcggcgccaactacagcttccacaaggagagcggcagattccaggacgtgggcccccaggcccccgtgggcagcgtgtaccagaagaccaacgccgtgagcgagatcaagagagtgggcaaggacagcttctgggccaaggccgagaaggaggaggagaacagaagactggaggagaagagaagagccgaggaggcccagagacagctggagcaggagagaagagagagagagctgagagaggccgccagaagagagcagagataccaggagcagggcggcgaggccagcccccagagcagaacctgggagcagcagcaggaggtggtgagcagaaacagaaacgagcaggagagcgccgtgcaccccagagagatcttcaagcagaaggagagagccatgagcaccaccagcatcagcagcccccagcccggcaagctgagaagccccttcctgcagaagcagctgacccagcccgagacccacttcggcagagagcccgccgccgccatcagcagacccagagccgacctgcccgccgaggagcccgcccccagcacccccccctgcctggtgcaggccgaggaggaggccgtgtacgaggagccccccgagcaggagaccttctacgagcagccccccctggtgcagcagcagggcgccggcagcgagcacatcgaccaccacatccagggccagggcctgagcggccagggcctgtgcgccagagccctgtacgactaccaggccgccgacgacaccgagatcagcttcgaccccgagaacctgatcaccggcatcgaggtgatcgacgagggctggtggagaggctacggccccgacggccacttcggcatgttccccgccaactacgtggagctgatcgagtag

SEQ ID NO: 177801 - DNA, 1149 bp, Artificial Sequence
  derived and/or modified sequence
atggccgccaacctgagcagaaacggccccgccctgcaggaggcctacgtgagagtggtgaccgagaagagccccaccgactgggccctgttcacctacgagggcaacagcaacgacatcagagtggccggcaccggcgagggcggcctggaggagatggtggaggagctgaacagcggcaaggtgatgtacgccttctgcagagtgaaggaccccaacagcggcctgcccaagttcgtgctgatcaactggaccggcgagggcgtgaacgacgtgagaaagggcgcctgcgccagccacgtgagcaccatggccagcttcctgaagggcagcgtgtaccagaagaccaacgccgtgagcgagatcaagagagtgggcaaggacagcttctgggccaaggccgagaaggaggaggagaacagaagactggaggagaagagaagagccgaggaggcccagagacagctggagcaggagagaagagagagagagctgagagaggccgccagaagagagcagagataccaggagcagggcggcgaggccagcccccagagcagaacctgggagcagcagcaggaggtggtgagcagaaacagaaacgagcaggagagcgccgtgcaccccagagagatcttcaagcagaaggagagagccatgagcaccaccagcatcagcagcccccagcccggcaagctgagaagccccttcctgcagaagcagctgacccagcccgagacccacttcggcagagagcccgccgccgccatcagcagacccagagccgacctgcccgccgaggagcccgcccccagcacccccccctgcctggtgcaggccgaggaggaggccgtgtacgaggagccccccgagcaggagaccttctacgagcagccccccctggtgcagcagcagggcgccggcagcgagcacatcgaccaccacatccagggccagggcctgagcggccagggcctgtgcgccagagccctgtacgactaccaggccgccgacgacaccgagatcagcttcgaccccgagaacctgatcaccggcatcgaggtgatcgacgagggctggtggagaggctacggccccgacggccacttcggcatgttccccgccaactacgtggagctgatcgagtag

SEQ ID NO: 177802 - DNA, 1296 bp, Artificial Sequence
  derived and/or modified sequence
atggccgccaacctgagcagaaacggccccgccctgcaggaggcctacgtgagagtggtgaccgagaagagccccaccgactgggccctgttcacctacgagggcaacagcaacgacatcagagtggccggcaccggcgagggcggcctggaggagatggtggaggagctgaacagcggcaaggtgatgtacgccttctgcagagtgaaggaccccaacagcggcctgcccaagttcgtgctgatcaactggaccggcgagggcgtgaacgacgtgagaaagggcgcctgcgccagccacgtgagcaccatggccagcttcctgaagggcgcccacgtgaccatcaacgccagagccgaggaggacgtggagcccgagtgcatcatggagaaggtggccaaggccagcggcgccaactacagcttccacaaggagagcggcagattccaggacgtgggcccccaggcccccgtgggcagcgtgtaccagaagaccaacgccgtgagcgagatcaagagagtgggcaaggacagcttctgggccaaggccgagaaggaggaggagaacagaagactggaggagaagagaagagccgaggaggcccagagacagctggagcaggagagaagagagagagagctgagagaggccgccagaagagagcagagataccaggagcagggcggcgaggccagcccccagagcagaacctgggagcagcagcaggaggtggtgagcagaaacagaaacgagcaggagagcgccgtgcaccccagagagatcttcaagcagaaggagagagccatgagcaccaccagcatcagcagcccccagcccggcaagctgagaagccccttcctgcagaagcagctgacccagcccgagacccacttcggcagagagcccgccgccgccatcagcagacccagagccgacctgcccgccgaggagcccgcccccagcacccccccctgcctggtgcaggccgaggaggaggccgtgtacgaggagccccccgagcaggagaccttctacgagcagccccccctggtgcagcagcagggcgccggcagcgagcacatcgaccaccacatccagggccagggcctgagcggccagggcctgtgcgccagagccctgtacgactaccaggccgccgacgacaccgagatcagcttcgaccccgagaacctgatcaccggcatcgaggtgatcgacgagggctggtggagaggctacggccccgacggccacttcggcatgttccccgccaactacgtggagctgatcgagtag

SEQ ID NO: 177803 - DNA, 1221 bp, Artificial Sequence
  derived and/or modified sequence
atggccgccaacctctcccggaatggcccggcgctgcaggaggcctacgtccgagttgtaacagaaaagtcacctaccgactgggccctgtttacctacgaaggaaactctaacgacatcagagtggcaggaactggggaagggggactggaagaaatggttgaggagttgaattctggcaaggtgatgtacgctttctgtagggtcaaggatcctaactctggccttccaaaatttgtcttgatcaattggggtgcgcatgtgactataaatgcccgcgctgaagaagatgtggagcctgagtgtatcatggaaaaggtcgccaaggcctcaggggcaaactattcattccacaaagaaagtggccgattccaggacgtgggaccccaggccccagtcggctccgtttaccagaagacaaatgcagtgtcagaaattaagcgggttggcaaggacagtttctgggcgaaagcggaaaaggaggaagagaataggcgtcttgaggaaaaacgcagagccgaagaagcccagcgccagcttgagcaggagcgacgggagcgagagctccgtgaggcagccagaagagagcagaggtaccaagaacagggcggcgaggcctccccgcagtccagaacctgggagcaacagcaagaggtggtttcccggaacaggaatgagcaagagtctgccgtccatccacgcgagatcttcaaacagaaggagcgggcgatgagcacgacttccatttcctcgccgcagcccggaaagctcagaagtccattcttacagaaacaactgacgcagcctgagactcattttggtagagagccggccgccgccattagcagaccgcgggcggatctacccgccgaggaaccagctcctagcacccccccatgcctggtgcaggcagaggaggaagcagtgtatgaggagccccctgagcaggagactttttacgagcaacctccccttgtgcagcagcagggggccggatccgaacatattgaccaccatatacagggacaaggactatcaggccagggcctgtgcgctagggcattgtacgattatcaggctgcagacgatacagagattagctttgaccctgagaatctgataaccggcattgaggtgatcgacgagggatggtggcgggggtacggcccagacggccacttcggcatgttccccgccaactatgtggaattgatcgaatag

SEQ ID NO: 177804 - DNA, 1149 bp, Artificial Sequence
  derived and/or modified sequence
atggcggctaatctatcacggaatggccccgccctccaggaagcttacgtgcgggtagtgactgagaaatcccctacagactgggccctatttacgtacgaaggaaattcaaatgacataagagtggctggaactggtgagggtggcctagaggagatggtcgaggagctcaactcaggtaaagtgatgtatgcgttctgtcgggttaaagacccgaattccggtttgcctaagtttgtgctgattaactggacaggcgagggcgtcaatgacgtcagaaaaggcgcctgtgcttcccacgtgtccacgatggcatcttttttaaaggggagcgtgtaccagaagaccaatgctgttagcgagattaagcgggtaggcaaggacagtttctgggctaaagctgaaaaagaggaggagaaccgcagactggaggagaaaagaagagccgaagaggcccaacgccagctggagcaggagagacgggagcgggagctgagagaagccgctcggagggagcagcggtaccaagagcaagggggcgaagctagtcctcaatctcggacctgggagcagcagcaggaggtcgtgtctcggaatcggaatgagcaagagagtgctgtgcaccctcgtgagatttttaagcagaaagaacgggctatgtctacaacttctatttcgagccctcagccgggaaaactccggtcaccttttttgcagaaacagctgacacagccagagacccactttggtcgcgagccagcggctgccatatctcgccctcgcgccgacttaccagcagaagaacccgccccatccacgccgccttgtctggttcaggccgaagaagaggctgtatatgaagagccaccggagcaagagaccttctatgagcaaccacccttggtgcagcagcagggcgcagggtccgagcacatagaccatcatatccagggtcagggcttgtcggggcagggtctttgtgccagggcgctctacgactaccaggccgccgatgatacggagatttccttcgatcccgagaatctgatcacgggcattgaggttattgatgaggggtggtggcgcggatatggccctgatggacactttggcatgttccccgctaactacgtagagcttattgagtag

SEQ ID NO: 177805 - DNA, 1296 bp, Artificial Sequence
  derived and/or modified sequence
atggctgccaacctcagtagaaacggcccagctctgcaggaagcatacgttcgagtggtcacagaaaaatcacccactgattgggctctgtttacctacgagggtaattccaacgacatccgggtagcgggtaccggcgagggtggcttggaggaaatggtagaggagctgaacagcgggaaggtcatgtacgcgttctgtcgggtcaaagatcctaacagcggcctacccaagtttgtgttgattaattggacaggagagggggtcaacgatgtcagaaaaggtgcctgcgcctcacatgtctccactatggcgtcctttttgaaaggggcacacgtcaccataaacgctcgggctgaagaagacgtggagccggagtgcatcatggagaaggtcgctaaagcttctggcgcaaactactcattccacaaagaatctggcagatttcaggacgtgggacctcaagcccccgtggggagcgtataccagaagacaaatgccgtcagcgaaattaagcgggtggggaaagacagcttctgggccaaggccgaaaaggaagaggagaaccggcggcttgaggagaaaaggagagcggaggaagcccagcgccagttggagcaggagaggcgagagagagaattacgggaggctgccagaagggagcaaaggtatcaagagcagggcggtgaggcttctccccagagtagaacgtgggagcagcaacaggaagtcgtgtctagaaatcgtaacgaacaagagtctgccgtgcatcccagagagatctttaagcagaaggaaagagctatgtccactacgagcatatccagcccacaaccaggtaaactgcggtcccccttcctccagaaacagttaactcagccggagacacactttggaagggagccagctgccgctatcagccggcctagagccgacctgcccgcagaggagcctgcaccgagcactcctccgtgcctcgtgcaggctgaggaggaggccgtgtacgaagaacctcctgagcaggagactttttatgaacagccaccattggtacagcagcagggtgcagggagcgagcatatagaccatcacatccagggccagggcctgtctggtcaggggctttgcgcaagggccctgtacgactaccaggcggcagatgataccgagatttctttcgatcctgaaaacttgatcaccggcattgaagtgatcgatgaaggctggtggcggggatatggcccagatgggcatttcggaatgtttccagccaattacgtcgagttgattgaatag

SEQ ID NO: 177806 - DNA, 1221 bp, Artificial Sequence
  derived and/or modified sequence
atggccgccaacctgagcagaaatggacctgccctgcaggaggcctacgtgcgggtggtgacagagaagagccccacagactgggccctcttcacctatgagggcaacagcaatgacatccgggtggccggcactggagagggcggcctggaggagatggtggaggagctgaacagcggcaaggtgatgtatgccttctgccgggtgaaggaccccaacagcggcctgcccaagtttgtgctgatcaactggggcgcccacgtgaccatcaatgcccgggcagaggaggatgtggagcctgagtgcatcatggagaaggtggccaaggccagcggggccaactacagcttccacaaggagagcggccgcttccaggatgtgggcccccaggcccctgtgggctctgtgtaccagaagaccaatgctgtgtctgagatcaagagggtgggcaaggacagcttctgggccaaggccgagaaggaggaggagaacagaaggctggaggagaagagaagagctgaggaggcccagaggcagctggagcaggagcggcgggagcgggagctgcgggaggccgcccggcgggagcagcgctaccaggagcagggcggggaggccagcccccagagcaggacctgggagcagcagcaggaggtggtgtccaggaacagaaatgagcaggagagcgctgtgcacccccgggagatcttcaagcagaaggagcgggccatgagcaccaccagcatcagcagcccccagcccgggaagctgcggagccccttcctgcagaagcagctgacccagcctgagacccacttcggccgggagcctgctgctgccatcagccggcccagggctgacctgcctgctgaggagcccgcccccagcaccccaccctgcctggtgcaggccgaggaggaggccgtgtatgaggagcccccagagcaggagaccttctatgagcagccccccctggtgcagcagcagggcgccggcagcgagcacatcgaccaccacatccagggccagggcctgagcggccagggcctgtgtgcccgggccctgtatgactaccaggccgcagatgacacagagatcagctttgatcctgaaaatctcatcactggaattgaggtgattgatgagggctggtggaggggctacggcccagatggccacttcggcatgtttcctgccaactacgtggagctgattgaatag

SEQ ID NO: 177807 - DNA, 1149 bp, Artificial Sequence
  derived and/or modified sequence
atggccgccaacctgagcagaaatggacctgccctgcaggaggcctacgtgcgggtggtgacagagaagagccccacagactgggccctcttcacctatgagggcaacagcaatgacatccgggtggccggcactggagagggcggcctggaggagatggtggaggagctgaacagcggcaaggtgatgtatgccttctgccgggtgaaggaccccaacagcggcctgcccaagtttgtgctgatcaactggacaggagagggcgtgaatgatgtgaggaagggggcctgtgccagccacgtgtccaccatggccagcttcctgaagggctctgtgtaccagaagaccaatgctgtgtctgagatcaagagggtgggcaaggacagcttctgggccaaggccgagaaggaggaggagaacagaaggctggaggagaagagaagagctgaggaggcccagaggcagctggagcaggagcggcgggagcgggagctgcgggaggccgcccggcgggagcagcgctaccaggagcagggcggggaggccagcccccagagcaggacctgggagcagcagcaggaggtggtgtccaggaacagaaatgagcaggagagcgctgtgcacccccgggagatcttcaagcagaaggagcgggccatgagcaccaccagcatcagcagcccccagcccgggaagctgcggagccccttcctgcagaagcagctgacccagcctgagacccacttcggccgggagcctgctgctgccatcagccggcccagggctgacctgcctgctgaggagcccgcccccagcaccccaccctgcctggtgcaggccgaggaggaggccgtgtatgaggagcccccagagcaggagaccttctatgagcagccccccctggtgcagcagcagggcgccggcagcgagcacatcgaccaccacatccagggccagggcctgagcggccagggcctgtgtgcccgggccctgtatgactaccaggccgcagatgacacagagatcagctttgatcctgaaaatctcatcactggaattgaggtgattgatgagggctggtggaggggctacggcccagatggccacttcggcatgtttcctgccaactacgtggagctgattgaatag

SEQ ID NO: 177808 - DNA, 1296 bp, Artificial Sequence
  derived and/or modified sequence
atggccgccaacctgagcagaaatggacctgccctgcaggaggcctacgtgcgggtggtgacagagaagagccccacagactgggccctcttcacctatgagggcaacagcaatgacatccgggtggccggcactggagagggcggcctggaggagatggtggaggagctgaacagcggcaaggtgatgtatgccttctgccgggtgaaggaccccaacagcggcctgcccaagtttgtgctgatcaactggacaggagagggcgtgaatgatgtgaggaagggggcctgtgccagccacgtgtccaccatggccagcttcctgaagggggcccacgtgaccatcaatgcccgggcagaagaagatgtggagcctgagtgcatcatggagaaggtggccaaggccagcggggccaactacagcttccacaaggagagcggccgcttccaggatgtgggcccccaggcccctgtgggctctgtgtaccagaagaccaatgctgtgtctgagatcaagagggtgggcaaggacagcttctgggccaaggccgagaaggaggaggagaacagaaggctggaggagaagagaagagctgaggaggcccagaggcagctggagcaggagcggcgggagcgggagctgcgggaggccgcccggcgggagcagcgctaccaggagcagggcggggaggccagcccccagagcaggacctgggagcagcagcaggaggtggtgtccaggaacagaaatgagcaggagagcgctgtgcacccccgggagatcttcaagcagaaggagcgggccatgagcaccaccagcatcagcagcccccagcccgggaagctgcggagccccttcctgcagaagcagctgacccagcctgagacccacttcggccgggagcctgctgctgccatcagccggcccagggctgacctgcctgctgaggagcccgcccccagcaccccaccctgcctggtgcaggccgaggaggaggccgtgtatgaggagcccccagagcaggagaccttctatgagcagccccccctggtgcagcagcagggcgccggcagcgagcacatcgaccaccacatccagggccagggcctgagcggccagggcctgtgtgcccgggccctgtatgactaccaggccgcagatgacacagagatcagctttgatcctgagaacctgatcaccggcatcgaggtgattgatgagggctggtggaggggctacggcccagatggccacttcggcatgtttcctgccaactacgtggagctgattgaatag

SEQ ID NO: 177809 - DNA, 1221 bp, Artificial Sequence
  derived and/or modified sequence
atggccgccaacctgagccggaacggccccgccctgcaggaggcctatgttagagtagtgactgaaaagagtccaaccgactgggcattgttcacatacgaaggaaacagcaacgacatccgtgtggcaggaactggcgaaggcggcttggaagaaatggtggaggagctgaatagtgggaaggtcatgtacgccttctgtcgtgtgaaggacccaaatagcggcctccccaagttcgtgctgatcaactggggcgcacacgtgaccatcaatgcccgtgccgaagaggatgtggagccagagtgcattatggagaaggttgcaaaggcctcaggggccaactacagcttccataaggagagcggcaggtttcaggatgtgggccctcaggctccggtggggtcagtctatcagaaaaccaacgccgtctccgagatcaagagggtaggcaaagacagcttttgggcaaaagccgagaaggaggaagagaataggagattggaggagaagaggagagctgaggaagcacagaggcagctagagcaggaaagaagagagcgcgaactgagagaggccgcacgaagagagcaacggtaccaagagcagggaggggaggctagccctcagtcgcggacttgggaacagcagcaggaggttgtttcaaggaacagaaatgaacaggaaagcgcagtacatccccgcgagatattcaagcagaaagagcgtgctatgtcaacaaccagtattagttcaccacagccaggcaaacttagaagtccttttcttcagaagcagctaactcagcccgaaacacacttcggacgcgaacctgccgccgccatcagtcggccacgggctgatctgccggccgaagaacctgctcccagcacccccccttgtctggtgcaggccgaggaggaggcagtatacgaggaaccccctgagcaagaaaccttctacgagcaacccccgctggttcagcaacaaggggctggatccgaacatattgaccaccacattcagggtcagggactgtcgggacagggcctgtgcgctcgtgcgctctacgactaccaggccgccgacgataccgagatctcattcgacccagagaacttgattacagggattgaggtaattgacgaggggtggtggcggggctacgggcctgacggccacttcggaatgttcccagccaattatgtcgagttgatagagtag

SEQ ID NO: 177810 - DNA, 1149 bp, Artificial Sequence
  derived and/or modified sequence
atggccgccaacctgagccggaacggccccgccctgcaggaggcctatgttcgtgtggttacggaaaagtcacctacagactgggcgctcttcacctatgaggggaactccaacgacatccgcgtcgccggaacaggcgaagggggattggaggagatggtggaggagctgaactctggcaaagtaatgtatgccttctgcagggtgaaggacccgaactcaggcctgccaaagttcgtgttgattaactggaccggtgaaggtgttaacgacgttcggaagggggcctgcgcttctcacgtgagcaccatggcttcctttctgaaaggcagtgtctaccagaaaaccaatgcagtctcagagatcaagagggtaggaaaagactcattttgggccaaggcagagaaagaggaggagaaccggcgcctggaggaaaaacggcgagccgaggaggctcagaggcagctggaacaagagcggcgggaacgtgagctgcgagaagcagctcgacgcgagcagcgttatcaagagcaaggaggcgaggcctccccacagtctagaacctgggagcaacaacaagaggtagtcagtagaaacaggaacgagcaggagtccgccgtgcacccacgggaaatatttaaacagaaagagcgagcaatgtcaaccacctccatctcttctccgcagcccggaaaacttcggtcaccttttctgcagaagcaactgactcagcccgaaactcattttggccgggagcccgccgccgccatttccaggccaagagctgacttgcccgccgaagagcccgccccctccactcccccctgtctcgtgcaagctgaggaggaggccgtctacgaggagccgccagaacaggaaaccttctacgagcaacctccgctggtccagcagcagggagcagggtctgagcacattgatcaccacatccagggccaggggcttagcggccaggggctgtgcgccagggctttgtatgattaccaggcagccgatgatacagagatttctttcgatcccgagaatttaatcaccggaattgaggtaatcgacgaagggtggtggcgaggttacgggccagacggacatttcggaatgttcccagctaattatgtggagctgatcgaatag

SEQ ID NO: 177811 - DNA, 1296 bp, Artificial Sequence
  derived and/or modified sequence
atggccgccaacctgagccggaacggccccgccctgcaggaggcctacgtgagggtggtgacagaaaagtccccgactgactgggccctgtttacctatgagggaaactcaaacgacatcagggtggctggtactggcgaaggaggactagaggaaatggtggaggagctgaactctggcaaagtgatgtacgctttttgcagagttaaagatccaaactccgggctgcccaagttcgtactgatcaactggacaggcgagggcgtcaatgatgtgaggaagggagcctgcgcatcccacgtgagcaccatggcctccttcctgaagggtgcgcacgtcacaattaacgcccgagccgaggaagatgtggaaccagagtgcatcatggagaaggtggctaaggcctctggggctaattactcctttcataaggaaagtggtcggtttcaggatgtgggcccacaagcccccgtgggaagtgtctatcaaaagactaatgccgtaagcgagattaagcgagtgggtaaggactcgttctgggccaaagcagagaaggaggaagaaaaccgtcgcctggaggagaagaggagggccgaggaggctcaacgccagttggagcaggagcgaagagagcgagagctgcgggaagcagcccggcgggaacagaggtatcaagaacagggtggagaagcgagccctcagtcccgcacgtgggagcaacagcaggaagtggtgagccgcaacaggaatgaacaagaatctgccgtgcatccaagggaaatcttcaagcagaaagaacgggccatgtccacaacctctatctcaagtccccagccaggtaagttaagatcccccttcttgcagaaacaactgacccaaccggagacccattttggccgcgaaccagccgccgccatatctcgtcctcgggctgatcttcctgcggaagaaccagccccaagtacaccaccttgcctggtgcaggctgaggaggaggccgtttacgaagagcctccagaacaggaaactttctatgagcaaccacctctggtccagcaacagggcgctggcagcgagcatatcgatcatcatatccagggccagggcctgagcggtcaggggttatgcgcacgggcgttatacgactaccaagccgctgacgacactgagatctcttttgacccagagaatctcattactgggatagaggttattgacgagggatggtggaggggatatggcccagacgggcatttcggcatgttcccggccaattatgtggagttgatcgaatag

SEQ ID NO: 177812 - DNA, 1221 bp, Artificial Sequence
  derived and/or modified sequence
atggccgctaacctcagccggaatggccctgctttgcaggaggcctatgtgcgcgtcgtgacggagaagtctccaacagactgggccctttttacatacgaaggcaacagcaacgatatacgcgtggccggaacgggtgagggagggctggaggaaatggtcgaggagttaaatagcgggaaggtaatgtacgccttttgtagagtgaaggacccaaacagtggcctgcccaaattcgtcctgataaattggggagcacacgtgactatcaacgcacgggctgaagaggacgtggaaccggagtgcattatggaaaaggtcgcaaaggccagcggtgctaactactcttttcataaggagagcgggagattccaggatgtgggaccacaggcccctgtgggatccgtctaccaaaaaacgaatgccgtcagcgaaattaaacgcgtaggcaaggacagcttctgggctaaggctgaaaaagaggaggagaacagacgtctcgaggagaagcgaagggccgaagaagctcagagacagttagaacaggagcggcgagaaagggaactgcgagaggctgcaaggagagagcaaaggtaccaggaacaaggcggagaggctagtcctcaaagccgtacatgggagcaacagcaggaggtggtgagccgcaaccggaatgagcaggagagcgctgtccatccaagagagatcttcaaacagaaggaacgtgctatgtctactacgtccatttcatcccctcagcccggaaagctcaggagtccttttctgcagaaacagctcacccagccggagactcactttggccgtgaacccgctgcagccatcagccggcctagggccgatcttcccgctgaggaaccggcaccttcaaccccaccttgtcttgtccaagccgaagaggaggccgtgtatgaggaaccacctgaacaggagactttctacgaacagccacccctggtgcagcagcagggtgccggatccgagcacattgaccaccatatccaggggcaaggactcagtggtcaagggttgtgtgcacgggctttatacgattaccaggccgcagacgacaccgaaatctcattcgatcccgaaaacctcattacagggatcgaggtgatcgatgaaggttggtggcgcggatatggaccagatggtcactttggcatgttcccagctaactacgtcgagcttatcgaatag

SEQ ID NO: 177813 - DNA, 1149 bp, Artificial Sequence
  derived and/or modified sequence
atggccgcaaacctctctcggaacgggccagccttgcaggaggcttatgtacgggtagtgaccgaaaagtctccaaccgattgggctttattcacttatgagggtaattccaatgacatacgcgtcgccggaacgggcgaagggggtctggaggagatggtggaggaactcaacagcggtaaggtgatgtacgcattttgcagagtgaaggatcccaactctgggctgcccaaattcgtgcttattaactggacaggtgagggagtcaatgacgtgaggaagggcgcatgcgcttctcacgtctcaacaatggcctcctttttgaaaggatctgtgtaccagaaaaccaacgcagtttctgagataaaaagagtaggaaaggatagtttttgggctaaggcagaaaaagaggaggaaaacaggcgtctcgaagagaagcggagggcggaagaagctcagcgccagcttgagcaggagagaagggaacgggagttacgagaggctgcacgtagggaacagcggtaccaggagcaggggggagaggcatccccccagtctcggacttgggaacagcagcaggaggtagtttcaaggaaccgcaatgagcaagagagcgccgtgcatccgagagaaatcttcaagcagaaggagcgggctatgagcacaacatctatctcaagcccacagccaggcaaactccgctccccattcctgcagaaacagctcacgcagccggagacgcacttcggcagggagccagctgccgctatctccaggcctagggccgatcttcccgctgaggaaccagccccatccactccaccttgccttgtccaagccgaagaggaagcagtgtacgaggaacctccagaacaagagaccttctatgaacagccgccactggtccagcaacagggggctgggagtgagcacatcgatcatcatattcagggccagggactgtctggccagggattgtgcgccagagccctgtacgactaccaagccgcagatgacactgagataagcttcgaccccgagaacctaataacgggaattgaggtgatcgatgaagggtggtggcgtggttacgggcctgatgggcatttcggcatgtttccagccaactatgtcgaacttatcgagtag

SEQ ID NO: 177814 - DNA, 1296 bp, Artificial Sequence
  derived and/or modified sequence
atggctgcaaacctatcccgcaacgggcctgccttacaggaggcatatgttcgggtggttacggagaagagtcccaccgattgggcgctgtttacttacgagggtaactccaatgacatccgggtggccggtaccggcgaggggggactggaagagatggtggaggagttgaatagtggtaaagtcatgtacgccttctgccgtgtcaaggatcccaactccggcctgccaaagttcgtgctgatcaactggaccggggaaggggtcaatgatgtcagaaaaggcgcttgcgcaagtcacgtttctacaatggccagtttccttaagggcgctcacgtgacaatcaacgcacgtgcagaggaagatgttgagccagagtgtatcatggaaaaggttgctaaggcttctggagctaattatagttttcacaaggaatccgggagattccaggatgttggcccacaggctccggtgggctccgtgtatcagaagactaatgccgtgagtgaaattaagcgagtgggtaaagacagtttttgggccaaggccgaaaaggaagaagaaaatcgcaggttagaggaaaaacgaagggcagaagaagcacagagacagttggagcaggagcgcagagagcgggagctgcgggaggcagcccgacgggaacaaaggtatcaagagcagggaggtgaggcttcgccccagtctcgaacatgggagcagcagcaggaagtggtgagcagaaacagaaacgagcaggagtccgccgtccatcctcgcgaaattttcaaacagaaagagcgagctatgtctaccacatctatatccagccctcagccaggaaagctgcggtcacccttccttcaaaagcagcttacccagccagaaactcattttggtagggagcccgctgccgctatttccaggccccgtgctgatctgcctgccgaggaaccggctccttccacaccaccttgccttgtgcaggcagaggaagaggcagtttacgaagaaccccctgagcaagaaaccttttacgagcaaccgcctttagtgcagcagcagggtgcgggttccgaacacattgaccatcacatccaaggtcaaggtctgtcaggccaggggttgtgcgcacgcgcactgtacgattatcaagccgcagatgacactgaaatttcctttgatcccgaaaatctcatcacaggtatcgaggttattgatgaagggtggtggcgcggatacggcccagacgggcacttcggaatgttcccggctaactacgttgaactgattgaatag

SEQ ID NO: 177815 - DNA, 1513 bp, Artificial Sequence
  derived and/or modified sequence
agctacagcagcggcgcggagactgcggggcgggccatggcggcgaacctgagccggaacgggccagcgctgcaagaggcctacgtgcgggtggtcaccgagaagtccccgaccgactgggctctctttacctatgaaggcaacagcaatgacatccgcgtggctggcacaggggagggtggcctggaggagatggtggaggagctcaacagcgggaaggtgatgtacgccttctgcagagtgaaggaccccaactctggactgcccaaatttgtcctcatcaactggggggcccatgtgaccatcaacgcacgggccgaggaggatgtggagcctgagtgcatcatggagaaggtggccaaggcttcaggtgccaactacagctttcacaaggagagtggccgcttccaggacgtgggaccccaggccccagtgggctctgtgtaccagaagaccaatgccgtgtctgagattaaaagggttggtaaagacagcttctgggccaaagcagagaaggaggaggagaaccgtcggctggaggaaaagcggcgggccgaggaggcacagcggcagctggagcaggagcgccgggagcgtgagctgcgtgaggctgcacgccgggagcagcgctatcaggagcagggtggcgaggccagcccccagagcaggacgtgggagcagcagcaagaagtggtttcaaggaaccgaaatgagcaggagtctgccgtgcacccgagggagattttcaagcagaaggagagggccatgtccaccacctccatctccagtcctcagcctggcaagctgaggagccccttcctgcagaagcagctcacccaaccagagacccactttggcagagagccagctgctgccatctcaaggcccagggcagatctccctgctgaggagccggcgcccagcactcctccatgtctggtgcaggcagaagaggaggctgtgtatgaggaacctccagagcaggagaccttctacgagcagcccccactggtgcagcagcaaggtgctggctctgagcacattgaccaccacattcagggccaggggctcagtgggcaagggctctgtgcccgtgccctgtacgactaccaggcagccgacgacacagagatctcctttgaccccgagaacctcatcacgggcatcgaggtgatcgacgaaggctggtggcgtggctatgggccggatggccattttggcatgttccctgccaactacgtggagctcattgagtgaggctgagggcacatcttgcccttcccctctcagacatggcttccttattgctggaagaggaggcctgggagttgacattcagcactcttccaggaataggacccccagtgaggatgaggcctcagggctccctccggcttggcagactcagcctgtcaccccaaatgcagcaatggcctggtgattcccacacatccttcctgcatcccccgaccctcccagacagcttggctcttgcccctgacaggatactgag

SEQ ID NO: 177816 - DNA, 1241 bp, Artificial Sequence
  derived and/or modified sequence
gtcaaaggggcggcccggcccggcccggaagctacagcagcggcgcggagactgcggggcgggccatggcggcgaacctgagccggaacgggccagcgctgcaagaggcctacgtgcgggtggtcaccgagaagtccccgaccgactgggctctctttacctatgaaggcaacagcaatgacatccgcgtggctggcacaggggagggtggcctggaggagatggtggaggagctcaacagcgggaaggtgatgtacgccttctgcagagtgaaggaccccaactctggactgcccaaatttgtcctcatcaactggacaggcgagggcgtgaacgatgtgcggaagggagcctgtgccagccacgtcagcaccatggccagcttcctgaagggctctgtgtaccagaagaccaatgccgtgtctgagattaaaagggttggtaaagacagcttctgggccaaagcagagaaggaggaggagaaccgtcggctggaggaaaagcggcgggccgaggaggcacagcggcagctggagcaggagcgccgggagcgtgagctgcgtgaggctgcacgccgggagcagcgctatcaggagcagggtggcgaggccagcccccagagcaggacgtgggagcagcagcaagaagtggtttcaaggaaccgaaatgagcaggagtctgccgtgcacccgagggagattttcaagcagaaggagagggccatgtccaccacctccatctccagtcctcagcctggcaagctgaggagccccttcctgcagaagcagctcacccaaccagagacccactttggcagagagccagctgctgccatctcaaggcccagggcagatctccctgctgaggagccggcgcccagcactcctccatgtctggtgcaggcagaagaggaggctgtgtatgaggaacctccagagcaggagaccttctacgagcagcccccactggtgcagcagcaaggtgctggctctgagcacattgaccaccacattcagggccaggggctcagtgggcaagggctctgtgcccgtgccctgtacgactaccaggcagccgacgacacagagatctcctttgaccccgagaacctcatcacgggcatcgaggtgatcgacgaaggctggtggcgtggctatgggccggatggccattttggcatgttccctgccaactacgtggagctcattgagtgaggctgagggcacatcttgcccttcccc

SEQ ID NO: 177817 - DNA, 2117 bp, Artificial Sequence
  derived and/or modified sequence
gcggagactgcggggcgggccatggcggcgaacctgagccggaacgggccagcgctgcaagaggcctacgtgcgggtggtcaccgagaagtccccgaccgactgggctctctttacctatgaaggcaacagcaatgacatccgcgtggctggcacaggggagggtggcctggaggagatggtggaggagctcaacagcgggaaggtgatgtacgccttctgcagagtgaaggaccccaactctggactgcccaaatttgtcctcatcaactggacaggcgagggcgtgaacgatgtgcggaagggagcctgtgccagccacgtcagcaccatggccagcttcctgaagggggcccatgtgaccatcaacgcacgggccgaggaggatgtggagcctgagtgcatcatggagaaggtggccaaggcttcaggtgccaactacagctttcacaaggagagtggccgcttccaggacgtgggaccccaggccccagtgggctctgtgtaccagaagaccaatgccgtgtctgagattaaaagggttggtaaagacagcttctgggccaaagcagagaaggaggaggagaaccgtcggctggaggaaaagcggcgggccgaggaggcacagcggcagctggagcaggagcgccgggagcgtgagctgcgtgaggctgcacgccgggagcagcgctatcaggagcagggtggcgaggccagcccccagagcaggacgtgggagcagcagcaagaagtggtttcaaggaaccgaaatgagcaggagtctgccgtgcacccgagggagattttcaagcagaaggagagggccatgtccaccacctccatctccagtcctcagcctggcaagctgaggagccccttcctgcagaagcagctcacccaaccagagacccactttggcagagagccagctgctgccatctcaaggcccagggcagatctccctgctgaggagccggcgcccagcactcctccatgtctggtgcaggcagaagaggaggctgtgtatgaggaacctccagagcaggagaccttctacgagcagcccccactggtgcagcagcaaggtgctggctctgagcacattgaccaccacattcagggccaggggctcagtgggcaagggctctgtgcccgtgccctgtacgactaccaggcagccgacgacacagagatctcctttgaccccgagaacctcatcacgggcatcgaggtgatcgacgaaggctggtggcgtggctatgggccggatggccattttggcatgttccctgccaactacgtggagctcattgagtgaggctgagggcacatcttgcccttcccctctcagacatggcttccttattgctggaagaggaggcctgggagttgacattcagcactcttccaggaataggacccccagtgaggatgaggcctcagggctccctccggcttggcagactcagcctgtcaccccaaatgcagcaatggcctggtgattcccacacatccttcctgcatcccccgaccctcccagacagcttggctcttgcccctgacaggatactgagccaagccctgcctgtggccaagccctgagtggccactgccaagctgcggggaagggtcctgagcaggggcatctgggaggctctggctgccttctgcatttatttgccttttttctttttctcttgcttctaaggggtggtggccaccactgtttagaatgacccttgggaacagtgaacgtagagaattgtttttagcagagtttgtgaccaaagtcagagtggatcatggtggtttggcagcagggaatttgtcttgttggagcctgctctgtgctccccactccatttctctgtccctctgcctgggctatgggaagtggggatgcagatggccaagctcccaccctgggtattcaaaaacggcagacacaacatgttcctccacgcggctcactcgatgcctgcaggccccagtgtgtgcctcaactgattctgacttcaggaaaagtaacacagagtggccttggcctgttgtcttcccctattttctgtcccagctcatccgtgtctctgaagaacaaatatgcttttggaccacgaa

SEQ ID NO: 177818 - protein, 224 aa, Artificial Sequence
  derived and/or modified sequence
MSAVGAATPYLHHPGDSHSGRVSFLGAQLPPEVAAMARLLGDLDRSTFRKLLKFVVSSLQGEDCREAVQRLGVSANLPEEQLGALLAGMHTLLQQALRLPPTSLKPDTFRDQLQELCIPQDLVGDLASVVFGSQRPLLDSVAQQQGAWLPHVADFRWRVDVAISTSALARSLQPSVLMQLKLSDGSAYRFEVPTAKFQELRYSVALVLKEMADLEKRCERRLQD

SEQ ID NO: 177819 - DNA, 675 bp, Artificial Sequence
  derived and/or modified sequence
atgtccgccgtgggagccgctaccccttaccttcaccatcctggggactctcacagcggcagagtttcctttcttggagcccagcttccccctgaggtggcggccatggcccgccttttaggcgatttagatcggtctactttcagaaaactgcttaagttcgttgtgtcatctctgcagggcgaggactgcagggaagccgtgcaacgtctaggagtttccgccaaccttccagaagaacagctcggtgccctccttgcaggcatgcacacactactccagcaagcactgcgcctgccaccaacttcattgaaacccgatacatttcgggatcagctgcaggagctgtgcatcccacaggatctggtaggtgatctggccagcgtagtgtttgggtctcagaggccccttctggactctgtggcccaacagcaaggagcgtggcttcctcacgtggccgacttccggtggagggtggatgtggccatctccaccagcgccctcgcgaggtccctgcagccttctgtcctgatgcagctgaaacttagcgatggatccgcctatcggtttgaagtcccgactgctaagttccaagaactgcgatatagcgtggcactggtactgaaagagatggcggacctcgaaaagagatgtgaacggcgcttgcaggactag

SEQ ID NO: 177820 - DNA, 675 bp, Artificial Sequence
  derived and/or modified sequence
atgtccgcagtaggggcagctacgccttatctccaccaccccggggactcgcactccggaagagttagcttcctgggcgctcaactcccaccagaagttgccgcaatggcccggttgctgggcgatctagacagatccacattcagaaaactgctgaagtttgttgtgtcaagccttcaaggagaggactgccgcgaggcggttcaacgcctcggggtgtctgcaaaccttcctgaggaacaacttggtgccttgttagcaggcatgcatactcttctacagcaagcactgcgcctgccacccacctccctgaaacctgacacatttagggatcaactccaggagctttgcatcccgcaggatctggtgggagacttagcctccgttgtgttcggttctcagcgtccactgctggactccgtggcccagcagcagggcgcatggctgcctcacgtcgctgactttcgttggagggtggacgtggctatcagcacgagtgccctggctcgtagcctgcagccctcagtgcttatgcagcttaagctctctgacgggtccgcctacaggttcgaggtgcctactgcaaagtttcaggaacttcggtacagcgtggcacttgtcctgaaggagatggctgatctcgagaaacgctgcgagcgccgtttacaggactag

SEQ ID NO: 177821 - DNA, 675 bp, Artificial Sequence
  derived and/or modified sequence
atgagcgccgtcggggcagctacaccgtaccttcaccatcctggcgacagccactcagggcgtgtcagcttcctgggcgctcaactgccacccgaggtagctgccatggcccgactgctgggcgacttggataggtctacttttaggaaactgttgaagttcgtagtcagttccctgcagggcgaggactgtcgcgaggcggtccaaaggctcggggtgtcagcaaaccttcccgaagagcagctgggggccctgctggcgggcatgcatacgttgctccagcaggctctccgcctgccacccaccagcctaaaacccgatactttcagagatcagctgcaggagctctgcattccgcaggatctcgtcggagacttggccagcgtggtgttcgggtcccagaggcctttactagacagtgtggcgcagcagcagggcgcgtggctcccgcacgtggcagacttcaggtggcgagtagatgtcgccatctccactagcgcgctggctcggtccctgcagccatccgtgctcatgcagctgaagctttcagatggctccgcatatcggtttgaggttccaacggcaaaatttcaggagttgcgttatagcgttgctttggtgctgaaggagatggccgaccttgagaagaggtgtgagaggcgcctccaagactag

SEQ ID NO: 177822 - DNA, 675 bp, Artificial Sequence
  derived and/or modified sequence
atgtctgctgtgggcgccgccaccccctacctgcaccaccctggggacagccacagcggccgggtgtccttcctgggcgcccagctgcccccagaggtggccgccatggcccggctgctgggggacctggacaggagcaccttcaggaagctgctgaagtttgtggtgagcagcctgcagggcgaggactgccgggaggccgtgcagaggctgggcgtgtctgccaacctgcctgaggagcagctgggcgccctgctggccggcatgcacaccctgctgcagcaggccctgcggctgccccccaccagcctgaagccagacaccttccgggaccagctgcaggagctgtgcatcccccaggacctggtgggggacctggcctctgtggtgtttggcagccagaggcccctgctggacagcgtggcccagcagcagggcgcctggctgccccacgtggccgacttccgctggagggtggatgtggccatcagcaccagcgccctggcccggagcctgcagcccagcgtgctgatgcagctgaagctgagtgatggcagcgcctacagatttgaggtgcccacagccaagttccaggagctgcgctacagcgtggccctggtgctgaaggagatggctgacctggagaagagatgtgagcggcggctgcaggactag

SEQ ID NO: 177823 - DNA, 675 bp, Artificial Sequence
  derived and/or modified sequence
atgagcgccgtgggcgccgccaccccctacctgcaccaccccggcgacagtcactctggacgcgtgtcattcttgggtgcacagttgcctcctgaggttgcagcgatggcacgcttactaggcgacctcgatagatccaccttccgtaagctgttgaagttcgtagtgtcatctcttcagggcgaggattgtcgggaggctgtccaacgcctgggagtgtcagccaacctgcccgaagagcagctgggcgctctgctggcagggatgcacaccttgcttcagcaagctctgagattaccacccacttccctgaagccagatacgtttcgggaccagctgcaggaactgtgcatcccacaggatctcgtcggcgacctcgcttctgtggtcttcgggtctcagcgaccccttctggacagcgttgcccagcagcagggggcctggctcccgcacgtggcggactttcgctggcgcgtggacgtcgccattagcacatctgcgttagcccgaagtctccagcctagtgtgctgatgcagctgaaactcagcgacggcagcgcttatcgctttgaggttcccactgcaaaattccaggagctgaggtatagcgtcgccctggtcttaaaggagatggcggatctggagaagaggtgtgaacgcaggctgcaggactag

SEQ ID NO: 177824 - DNA, 675 bp, Artificial Sequence
  derived and/or modified sequence
atgagcgccgtgggcgccgccaccccctacctgcaccaccccggcgatagtcatagcggcagggtgtcttttctgggggcgcaactgcccccggaagtcgctgcgatggctaggctcctgggagatctcgaccgctcaacgttcaggaagctgctcaaatttgtggtgagctcactgcagggggaggactgccgggaagctgtgcagagactcggagtgagtgctaatctacctgaggaacagctcggggccctgctggctgggatgcatactctcctgcaacaagcactcagacttccgcctacatcactgaagccggacacctttcgggatcagctgcaggagctttgcataccgcaggatctcgttggagacctcgcaagtgtggttttcgggtcacaaaggcctttgttagattcagtggcacagcagcagggggcatggctcccacatgtggccgatttcaggtggcgggttgatgtcgctatctccacgagcgccctcgcacgctcgttgcaacctagcgtgttgatgcaactgaaactcagtgacggttcagcctaccggttcgaggttccaacagccaagtttcaggagctgagatattcagtcgccttagtcttgaaagaaatggccgatctcgaaaaaagatgcgagcggcgcctccaggattag

SEQ ID NO: 177825 - DNA, 675 bp, Artificial Sequence
  derived and/or modified sequence
atgagcgccgtgggcgccgccaccccctacctgcaccaccccggcgactcccatagtggaagagtgtcatttctgggcgctcagcttccgcctgaagtggcagccatggcccgcctgctgggcgatctcgacagaagtacgttcaggaagctgctgaaattcgtggtcagctcattacagggcgaagactgcagggaggccgttcaacggctcggggtgtcagccaatttaccagaggaacaactcggagccttgctggccggcatgcacacactactccagcaggcgctcaggttgccaccaacaagcctgaagccagacaccttccgtgaccagctccaggaattgtgcattccccaggatctagttggggatctggcatctgttgtctttggcagccagcggcctcttctagattctgtggcacaacagcagggtgcatggctgccacatgtggccgattttaggtggcgcgtggatgtggccatctccacatccgccttggctcgctccttgcagccctctgtccttatgcaactcaagctgagtgatggaagcgcctacaggttcgaggtacctacagcgaagttccaggagttacgctattctgtggcacttgttctgaaggaaatggcagacctggagaagcgttgcgaaaggcgcctccaggattag

SEQ ID NO: 177826 - DNA, 675 bp, Artificial Sequence
  derived and/or modified sequence
atgagcgccgtgggtgcagcaacaccttatctgcatcaccctggcgattcacattccggcagagtatcttttttaggcgcacagctgcctcccgaagttgccgctatggccaggctcttgggcgacctggacagatcaacctttcggaaacttcttaaattcgttgtctcgagcctccagggagaggattgtcgcgaggccgtgcagcgtctgggggtgtccgcaaacctcccggaagagcagttgggggcactcctggccggaatgcacacattgctgcaacaggctcttaggctgccccctacctctctgaagcctgatacattccgtgaccagttacaggaactctgcatacctcaggatcttgtcggtgacttagctagcgtggtgttcggaagccagcgccctctccttgactccgtggcgcagcagcagggcgcatggttgccacacgtagccgattttcgctggagagttgatgttgccatctccaccagcgccctggctaggagcctgcagccgtccgtgctgatgcagcttaaactgtctgacggatccgcctacagattcgaggttcctactgccaaatttcaagagctgcgctacagcgttgcgctcgtcctcaaggagatggctgatctggagaagagatgtgagaggcgcttacaggactag

SEQ ID NO: 177827 - DNA, 675 bp, Artificial Sequence
  derived and/or modified sequence
atgagcgctgtaggagccgctactccctacctccaccacccaggcgatagtcatagcgggagggtctcatttttgggggcacagttgccgcctgaagtggcggcaatggctcgcttgctcggcgatctggatcgatctacattcagaaagctcctgaaatttgtagttagcagccttcaaggggaggactgcagggaagctgtgcagcgtcttggcgtgtccgccaatcttcctgaggagcaactaggcgctctgctggcagggatgcatactcttctacagcaggccctccgattgccacccacctcccttaagcctgatacattcagagatcaattacaagagttgtgtattccacaagatttggtcggcgacctcgctagcgtcgtcttcggttcacagagaccattgttggactcagtcgcccagcagcaaggggcttggctgcctcacgtcgccgacttccgctggcgcgtggacgtggctatatccacatcggcacttgctaggagcctgcagcctagcgttctgatgcagttgaaactgtcagacggatctgcttaccgatttgaagtaccgaccgccaagttccaggaactccggtacagcgtggctctggtcctaaaggaaatggccgacttagaaaaaagatgcgagaggagactgcaggattag

SEQ ID NO: 177828 - DNA, 675 bp, Artificial Sequence
  derived and/or modified sequence
atgagcgcagtgggcgcagccaccccttacctccaccatcccggtgattctcattccggcagagtcagtttcctgggagcccagctccccccagaggtggctgcaatggccagattgctgggcgacctggacaggagcactttcagaaagttgcttaagtttgtggtgagttccctccagggtgaagattgcagggaagcagttcagcgactcggcgtctctgccaacctgcctgaagagcaacttggggcactgctggcaggcatgcacacgctcctgcagcaggccctccggttgccaccaacctcccttaaaccggatacatttagagatcagttacaggagctatgcatcccccaggatcttgttggggacctggcctctgttgtgttcggcagtcaacgccctctgctcgactccgtcgcccagcagcagggggcatggctgccccatgtggccgattttcggtggcgagtggacgtcgcaatcagcactagcgctctggcccgtagcctgcagccttctgtcctgatgcagctcaagctgagcgacgggtcagcataccggttcgaagttccaaccgccaagttccaagaacttcggtattctgtcgcgctggtcttaaaagagatggcagatctcgagaaaaggtgcgagcggagactacaggactag

SEQ ID NO: 177829 - DNA, 1373 bp, Artificial Sequence
  derived and/or modified sequence
ggcccgcttttggctgcatcagccggggattgccggcgccaggtgctgggggcgactcggacagcgggagcgtggggtggagtaggatggagtctccctcccgagctgggggtgtgggcctaggaaaggctgcttcgccgctgtgttcggagagctctggatactgcggggcttttccgcggaggagcgcccgccggcatctgcatctgggaccgacctcctgggctggctgatcaaagaggaagcagcagcaatgtctgctgtgggggctgcaactccatacctgcatcatcctggtgatagtcacagtggccgagtgagtttcttgggggcccagcttcctccagaggtggcagcaatggcccggctactaggggacctagacaggagcacgttcagaaagttgctgaagtttgtggtcagcagcctgcagggggaggactgccgagaggctgtgcagcgtcttggggtcagcgccaacctgccggaggagcagctgggtgccctgctggcaggcatgcacacactgctccagcaggccctccgtctgccccccaccagcctgaagcctgacaccttcagggaccagctccaggagctctgcatcccccaagacctggtcggggacttggccagcgtggtatttgggagccagcggcccctccttgattctgtggcccagcagcagggggcctggctgccgcatgttgctgactttcggtggcgggtggatgtagcaatctccaccagtgccctggctcgctccctgcagccgagcgtcctgatgcagctgaagctttcagatgggtcagcataccgctttgaggtccccacagccaagttccaggagctgcggtacagcgtggccctggtcctaaaggagatggcagatctggagaagaggtgtgagcgcagactgcaggactgacccctcacttgaccagtcccattcagatccggcttggacaggcacctgagatggtgccaaagtgcagctgactcttcccacgacagccctgcccttcccatgaggcaggctcttcagtgagtgtttgaacgtaattatgtagttttctgtttaattgaaaaagagagctatgcctttttttctttttggaagtaaagcagctaaaaacatgtttctataggtgagtgttggacctcacaccctccccttccctgtacatttgtctttggtgctggacgtggccatgtgaggccaggttgaggccctttgtagacaacatacagttgctcagcctggccccatgtagccaggtgcttttgtagatcttgtgttttaggttgggcattttcactcttctgccttaaatccctgaccccatggagctgacattctagtgcggctgagg

SEQ ID NO: 177830 - DNA, 1297 bp, Artificial Sequence
  derived and/or modified sequence
cggaagtggctctcagggcgcttccggggaccaggcccgcttttggctgcatcagccggggattgccggcgccaggcatctgcatctgggaccgacctcctgggctggctgatcaaagaggaagcagcagcaatgtctgctgtgggggctgcaactccatacctgcatcatcctggtgatagtcacagtggccgagtgagtttcttgggggcccagcttcctccagaggtggcagcaatggcccggctactaggggacctagacaggagcacgttcagaaagttgctgaagtttgtggtcagcagcctgcagggggaggactgccgagaggctgtgcagcgtcttggggtcagcgccaacctgccggaggagcagctgggtgccctgctggcaggcatgcacacactgctccagcaggccctccgtctgccccccaccagcctgaagcctgacaccttcagggaccagctccaggagctctgcatcccccaagacctggtcggggacttggccagcgtggtatttgggagccagcggcccctccttgattctgtggcccagcagcagggggcctggctgccgcatgttgctgactttcggtggcgggtggatgtagcaatctccaccagtgccctggctcgctccctgcagccgagcgtcctgatgcagctgaagctttcagatgggtcagcataccgctttgaggtccccacagccaagttccaggagctgcggtacagcgtggccctggtcctaaaggagatggcagatctggagaagaggtgtgagcgcagactgcaggactgacccctcacttgaccagtcccattcagatccggcttggacaggcacctgagatggtgccaaagtgcagctgactcttcccacgacagccctgcccttcccatgaggcaggctcttcagtgagtgtttgaacgtaattatgtagttttctgtttaattgaaaaagagagctatgcctttttttctttttggaagtaaagcagctaaaaacatgtttctataggtgagtgttggacctcacaccctccccttccctgtacatttgtctttggtgctggacgtggccatgtgaggccaggttgaggccctttgtagacaacatacagttgctcagcctggccccatgtagccaggtgcttttgtagatcttgtgttttaggttgggcattttcactcttctgccttaaatccctgaccccatggagctgacattctagtgcggctgaggggaggggaaacattgtaaaataaatcataaaaattaactggaata

SEQ ID NO: 177831 - DNA, 1573 bp, Artificial Sequence
  derived and/or modified sequence
agttttattgggctataattcacataccatataattcacccattttgtacaattcaatgattttggcatattattttttaactatggtaaagtacatgttaaataaaatggctcggccattgtttcggaccgagctcctgcgctagggcccaacagagcagcccaaagcggaaccgagtcacgcgcgccggacgccacccgacaggaggggaaacggggcagctctcaaaaccctggaggcgcagaccgtccacacgggacagggacgcccgctcggctccgctccgcgctgatcctcaaggtctcgcggtttccccgccgcccacccggacgccgacgaaagccagcgagctcctcagcctcaggcatctgcatctgggaccgacctcctgggctggctgatcaaagaggaagcagcagcaatgtctgctgtgggggctgcaactccatacctgcatcatcctggtgatagtcacagtggccgagtgagtttcttgggggcccagcttcctccagaggtggcagcaatggcccggctactaggggacctagacaggagcacgttcagaaagttgctgaagtttgtggtcagcagcctgcagggggaggactgccgagaggctgtgcagcgtcttggggtcagcgccaacctgccggaggagcagctgggtgccctgctggcaggcatgcacacactgctccagcaggccctccgtctgccccccaccagcctgaagcctgacaccttcagggaccagctccaggagctctgcatcccccaagacctggtcggggacttggccagcgtggtatttgggagccagcggcccctccttgattctgtggcccagcagcagggggcctggctgccgcatgttgctgactttcggtggcgggtggatgtagcaatctccaccagtgccctggctcgctccctgcagccgagcgtcctgatgcagctgaagctttcagatgggtcagcataccgctttgaggtccccacagccaagttccaggagctgcggtacagcgtggccctggtcctaaaggagatggcagatctggagaagaggtgtgagcgcagactgcaggactgacccctcacttgaccagtcccattcagatccggcttggacaggcacctgagatggtgccaaagtgcagctgactcttcccacgacagccctgcccttcccatgaggcaggctcttcagtgagtgtttgaacgtaattatgtagttttctgtttaattgaaaaagagagctatgcctttttttctttttggaagtaaagcagctaaaaacatgtttctataggtgagtgttggacctcacaccctccccttccctgtacatttgtctttggtgctggacgtggccatgtgaggccaggttgaggccctttgtagacaacatacagttgctcagcctggccccatgtagccaggtgcttttgtagatcttgtgttttaggttgggcattttcactcttctgccttaaatccctgaccccatggagctgacattctagtgcggctgaggggaggggaaacattgtaaaataaatcataaa

SEQ ID NO: 177832 - DNA, 675 bp, Artificial Sequence
  derived and/or modified sequence
atgagcgccgtgggcgccgccaccccctacctgcaccaccccggcgacagccacagcggcagagtgagcttcctgggcgcccagctgccccccgaggtggccgccatggccagactgctgggcgacctggacagaagcaccttcagaaagctgctgaagttcgtggtgagcagcctgcagggcgaggactgcagagaggccgtgcagagactgggcgtgagcgccaacctgcccgaggagcagctgggcgccctgctggccggcatgcacaccctgctgcagcaggccctgagactgccccccaccagcctgaagcccgacaccttcagagaccagctgcaggagctgtgcatcccccaggacctggtgggcgacctggccagcgtggtgttcggcagccagagacccctgctggacagcgtggcccagcagcagggcgcctggctgccccacgtggccgacttcagatggagagtggacgtggccatcagcaccagcgccctggccagaagcctgcagcccagcgtgctgatgcagctgaagctgagcgacggcagcgcctacagattcgaggtgcccaccgccaagttccaggagctgagatacagcgtggccctggtgctgaaggagatggccgacctggagaagagatgcgagagaagactgcaggactag

SEQ ID NO: 177833 - protein, 325 aa, Artificial Sequence
  derived and/or modified sequence
MSLQSRLSGRLAQLRAAGQLLVPPRPRPGHLAGATRTRSSTCGPPAFLGVFGRRARTSAGVGAWGAAAVGRTAGVRTWAPLAMAAKVDLSTSTDWKEAKSFLKGLSDKQREEHYFCKDFVRLKKIPTWKEMAKGVAVKVEEPRYKKDKQLNEKISLLRSDITKLEVDAIVNAANSSLLGGGGVDGCIHRAAGPLLTDECRTLQSCKTGKAKITGGYRLPAKYVIHTVGPIAYGEPSASQAAELRSCYLSSLDLLLEHRLRSVAFPCISTGVFGYPCEAAAEIVLATLREWLEQHKDKVDRLIICVFLEKDEDIYRSRLPHYFPVA

SEQ ID NO: 177834 - DNA, 978 bp, Artificial Sequence
  derived and/or modified sequence
atgagcctgcagagcagactgagcggcagactggcccagctgagagccgccggccagctgctggtgccccccagacccagacccggccacctggccggcgccaccagaaccagaagcagcacctgcggcccccccgccttcctgggcgtgttcggcagaagagccagaaccagcgccggcgtgggcgcctggggcgccgccgccgtgggcagaaccgccggcgtgagaacctgggcccccctggccatggccgccaaggtggacctgagcaccagcaccgactggaaggaggccaagagcttcctgaagggcctgagcgacaagcagagagaggagcactacttctgcaaggacttcgtgagactgaagaagatccccacctggaaggagatggccaagggcgtggccgtgaaggtggaggagcccagatacaagaaggacaagcagctgaacgagaagatcagcctgctgagaagcgacatcaccaagctggaggtggacgccatcgtgaacgccgccaacagcagcctgctgggcggcggcggcgtggacggctgcatccacagagccgccggccccctgctgaccgacgagtgcagaaccctgcagagctgcaagaccggcaaggccaagatcaccggcggctacagactgcccgccaagtacgtgatccacaccgtgggccccatcgcctacggcgagcccagcgccagccaggccgccgagctgagaagctgctacctgagcagcctggacctgctgctggagcacagactgagaagcgtggccttcccctgcatcagcaccggcgtgttcggctacccctgcgaggccgccgccgagatcgtgctggccaccctgagagagtggctggagcagcacaaggacaaggtggacagactgatcatctgcgtgttcctggagaaggacgaggacatctacagaagcagactgccccactacttccccgtggcctag

SEQ ID NO: 177835 - DNA, 978 bp, Artificial Sequence
  derived and/or modified sequence
atgtcactgcagtctagattgtcaggccgcctcgcacagctgagagctgccggccagctcctggtccctccacggcccagacccggccatttggcgggagctacccgcacgaggagcagcacttgtgggcccccagctttccttggagtgtttgggaggcgcgcccgcacaagtgcaggtgtgggtgcatggggggcagccgccgtagggaggacggcaggggtaagaacgtgggctcccctggcgatggcagcaaaggtggatttatcaactagcacggactggaaggaagcaaagtcgtttcttaaaggcctttcggataaacagagagaagagcactatttttgtaaagatttcgtccggctaaagaagatacctacatggaaggaaatggctaaaggagtcgcggtaaaggtggaggagccccggtacaaaaaggataagcagctaaacgaaaagataagtctgctgagaagcgatatcacaaagctcgaagtggatgctatagtcaacgccgctaactcaagcttgcttggtggcggaggcgtggatggctgcatccacagggcagcgggccccttactcacagacgagtgcaggactttgcaatcatgtaagacgggcaaggctaagatcactggcggttatagactgccagcgaaatacgtcattcataccgtggggccaatcgcctatggggagccttccgccagccaggcagcagagttgaggtcatgttacctgagcagcttggatctgctgctcgaacatcgcctgagaagcgtggcttttccctgtatatctaccggggtgtttgggtatccatgcgaggcagctgccgaaattgtcctggcaactctgcgagagtggctggagcagcacaaggataaggtggaccgtctcattatctgcgttttcctcgaaaaagacgaagatatctaccggtcaaggttacctcactacttccccgtggcatag

SEQ ID NO: 177836 - DNA, 1205 bp, Artificial Sequence
  derived and/or modified sequence
gagagacactcccgagcgccgtaaatagagtccaagtgggcggagagccgtcccgcgccgcccgctcatgtctctacagagccgactgtccggccgcctggcacagctgcgcgcggcggggcagctgctcgtccccccgcgcccccggcccggacacttggcgggtgccacgaggacccgcagcagcacgtgcggtcccccggcgttcctgggcgtgttcggccgccgtgcgcggacctcggcgggagttggggcgtggggggcggcggcggtggggcggacagccggggtgcgcacttgggcccccctggccatggcggcgaaggtggacctgagcacctccaccgactggaaggaggcgaaatcctttctgaagggcctgagtgacaagcagcgggaggaacattacttctgcaaggactttgtcaggctgaagaagatcccgacatggaaggagatggcgaaaggggtggctgtgaaggtggaggagcccaggtataaaaaggacaagcagctcaatgagaaaatctccctgctccgcagcgacatcaccaagctggaggtggacgccatcgtcaacgccgccaacagctccctgctcggaggcggtggcgtggacggctgcattcatcgggccgccggccccctgcttaccgacgagtgccggaccctgcagagctgtaagactggcaaggccaagatcaccggcggctatcggctcccggccaagtacgtcatccacacagtggggcccatcgcctacggggagcccagcgccagtcaggctgccgagctccgcagctgctacctgagcagtctggacctgctgctggagcaccggctccgctcggtggcgttcccctgcatctccaccggcgtgtttggctacccctgtgaggcggccgccgagatcgtgctggccacgctgcgagagtggctggagcagcacaaggacaaggtggaccggctgatcatctgcgtgttcctcgagaaggacgaggacatctaccggagccggctcccccactacttccccgtggcctgaggctcccgcagcccaccctgaccgggactgacccgccttcgggaccccgctcccagctctgagaggtcgccaaagcctgcagcctggcctgggcctggccaccccttctttccctccgcgccccgcccccgaggagcctaataaagatctcgttgtggca

SEQ ID NO: 177837 - DNA, 978 bp, Artificial Sequence
  derived and/or modified sequence
atgagcctgcagagccggctgagcggccgcctggcccagctgcgggctgctggccagctgctggtgcccccccggccccggcccggccacctggccggggccaccaggaccaggagcagcacctgtggccccccagccttcctgggcgtgtttggaagaagagcccggaccagcgctggggtgggcgcctggggcgctgctgctgtgggccgcacagctggggtgaggacctgggcccccctggccatggccgccaaggtggacctgagcaccagcacagactggaaggaggccaagagcttcctgaagggcctgagtgacaagcagcgggaggagcactacttctgcaaggactttgtgcggctgaagaagatccccacctggaaggagatggccaagggcgtggccgtgaaggtggaggagccccgctacaagaaggacaagcagctgaatgagaagatcagcctgctgcggagtgacatcaccaagctggaggtggatgccatcgtgaatgctgccaacagcagcctgctgggcggcggcggcgtggatggctgcatccacagagctgctggccccctgctgacagatgagtgcaggaccctgcagagctgcaagacaggcaaggccaagatcactggaggctaccgcctgcctgccaagtatgtgatccacacagtgggccccatcgcctacggggagcccagcgccagccaggccgctgagctgcggagctgctacctgagcagcctggacctgctgctggagcaccggctgcggtctgtggccttcccctgcatcagcactggagtgtttggctacccctgtgaggccgctgctgagatcgtgctggccaccctgcgggagtggctggagcagcacaaggacaaggtggacaggctcatcatctgtgtgttcctggagaaggatgaggacatctaccgcagccggctgccccactacttccctgtggcctag

SEQ ID NO: 177838 - DNA, 978 bp, Artificial Sequence
  derived and/or modified sequence
atgagcctgcagagccggctgagcggccggctggcccagctgcgggctgcaggccagctcctcgtacctccccgaccccggcctgggcacttggccggggccacccgcacgagaagctccacttgcggaccacctgcatttttgggggtcttcggcaggcgggcccggacctccgcaggtgtgggtgcttggggggccgccgccgtgggccgtacggctggggtgcggacctgggcccccctggcaatggcagccaaggttgacctgagcacatcaaccgactggaaagaggctaagagcttcctcaagggattgagtgacaagcaacgcgaggagcactatttttgcaaggatttcgttcgactaaagaaaatccctacgtggaaagagatggcaaagggcgttgctgtgaaggtggaagaaccgcggtacaaaaaggacaaacaactaaatgagaagatcagcctgctgcggagtgacatcactaaacttgaggtcgatgcaatcgttaacgccgccaattcttctctgctgggtgggggtggcgtagacggctgtatccacagagccgcaggcccattacttactgacgagtgtaggaccctacagtcttgcaaaactggcaaagctaagatcacaggtgggtacagactgccggctaagtacgtgattcacacagtgggccctattgcgtatggtgagccatcggcatcccaggccgctgagctgcgtagttgctacctctcatccctcgacctcctcctggaacatagactgcgctctgtggcttttccatgtattagcaccggcgtttttgggtacccatgcgaagctgccgctgagatcgtcctcgccaccctaagagagtggctcgagcagcacaaggacaaggtggacagattaatcatctgcgtttttctggaaaaagatgaagacatctatcgatccaggctgcctcattattttccggtggcctag

SEQ ID NO: 177839 - DNA, 978 bp, Artificial Sequence
  derived and/or modified sequence
atgtcattgcaaagcagactgagcggtcgccttgctcaactgcgtgctgccggacagctactggtgcctcctcgcccaagacctggccacctggcgggtgccacacgaacacgctcatctacatgcgggccacccgcttttttaggtgtatttggacgcagagcaagaacttcagctggtgtaggcgcatggggagcggctgctgtcggccgaacagccggagtacgcacttgggccccactggctatggctgctaaagtcgacctaagcacctctacagactggaaggaggctaagagttttctgaaggggctgtctgacaagcaacgggaagaacactacttctgcaaagactttgttcgcctcaaaaaaatcccgacatggaaggaaatggctaagggtgttgccgtcaaagtggaagaaccaaggtacaaaaaggacaagcagctgaatgagaagatctcactactgcggtcggacatcacaaagctggaagtcgatgctatagtgaacgctgccaacagtagcctgttgggtggtggaggagttgatgggtgtattcacagagccgcaggcccactactgaccgatgagtgtcgcactttacagagctgcaaaacgggaaaagccaagattaccgggggataccggttaccagcaaaatatgtaatccacaccgtcgggcctatagcatacggcgagcccagcgctagccaagcggctgaactcaggagctgttacctcagttcactggatctgcttctggagcaccgacttcggtctgtggcttttccgtgcatatcaaccggagtttttggctacccttgtgaggccgctgcggagatagttctggctacacttcgtgagtggctggaacagcacaaagataaggtcgatagactcatcatctgcgtcttcttggaaaaggacgaagacatatacaggtctagactgcctcattattttccagtggcctag

SEQ ID NO: 177840 - protein, 152 aa, Artificial Sequence
  derived and/or modified sequence
MTCTDQKSHSQRALGTQTPALQGPQLLNTDPSSEETRPPHVNPDRLCHMEPANHFWHAGDLQAMISKEFHLAATQDDCRKGRTQEDILVPSSHPELFASVLPMAPEEAARLQQPQPLPPPSGIHLSASRTLAPTLLYSSPPSHSPFGLSSLI

SEQ ID NO: 177841 - protein, 104 aa, Artificial Sequence
  derived and/or modified sequence
MEPANHFWHAGDLQAMISKEFHLAATQDDCRKGRTQEDILVPSSHPELFASVLPMAPEEAARLQQPQPLPPPSGIHLSASRTLALTLLYSSPPSHSPFGLSSLI

SEQ ID NO: 177842 - protein, 152 aa, Artificial Sequence
  derived and/or modified sequence
MTCTDQKSHSQRALGTQTPALQGPQLLNTDPSSKETRPPHVNPDRLCHMEPANHFWHAGDLQAMISKEFHLAATQDDCRKGRTQEDILVPSSHPELFASVLPMAPEEAARLQQPQPLPPPSGIHLSASRTLAPTLLYSSPPSHSPFGLSSLI

SEQ ID NO: 177843 - protein, 150 aa, Artificial Sequence
  derived and/or modified sequence
PQTDQKSHSQRALGTQTPALQGPQLLNTDPSSEETHPHVNPDRLCHMEPANHFWHAGDLQAMISKEFHLAATQDDCRKGRTQEDILVPSSHPELFASVLPMAPEEAARLQQPQPLPPPSGIHLSASRTLALTLLYSSPPSHSPFGLSSLI

SEQ ID NO: 177844 - DNA, 459 bp, Artificial Sequence
  derived and/or modified sequence
atgacctgcaccgaccagaagagccacagccagagagccctgggcacccagacccccgccctgcagggcccccagctgctgaacaccgaccccagcagcgaggagaccagacccccccacgtgaaccccgacagactgtgccacatggagcccgccaaccacttctggcacgccggcgacctgcaggccatgatcagcaaggagttccacctggccgccacccaggacgactgcagaaagggcagaacccaggaggacatcctggtgcccagcagccaccccgagctgttcgccagcgtgctgcccatggcccccgaggaggccgccagactgcagcagccccagcccctgcccccccccagcggcatccacctgagcgccagcagaaccctggcccccaccctgctgtacagcagcccccccagccacagccccttcggcctgagcagcctgatctag

SEQ ID NO: 177845 - DNA, 315 bp, Artificial Sequence
  derived and/or modified sequence
atggagcccgccaaccacttctggcacgccggcgacctgcaggccatgatcagcaaggagttccacctggccgccacccaggacgactgcagaaagggcagaacccaggaggacatcctggtgcccagcagccaccccgagctgttcgccagcgtgctgcccatggcccccgaggaggccgccagactgcagcagccccagcccctgcccccccccagcggcatccacctgagcgccagcagaaccctggccctgaccctgctgtacagcagcccccccagccacagccccttcggcctgagcagcctgatctag

SEQ ID NO: 177846 - DNA, 459 bp, Artificial Sequence
  derived and/or modified sequence
atgacctgcaccgaccagaagagccacagccagagagccctgggcacccagacccccgccctgcagggcccccagctgctgaacaccgaccccagcagcaaggagaccagacccccccacgtgaaccccgacagactgtgccacatggagcccgccaaccacttctggcacgccggcgacctgcaggccatgatcagcaaggagttccacctggccgccacccaggacgactgcagaaagggcagaacccaggaggacatcctggtgcccagcagccaccccgagctgttcgccagcgtgctgcccatggcccccgaggaggccgccagactgcagcagccccagcccctgcccccccccagcggcatccacctgagcgccagcagaaccctggcccccaccctgctgtacagcagcccccccagccacagccccttcggcctgagcagcctgatctag

SEQ ID NO: 177847 - DNA, 453 bp, Artificial Sequence
  derived and/or modified sequence
ccccagaccgaccagaagagccacagccagagagccctgggcacccagacccccgccctgcagggcccccagctgctgaacaccgaccccagcagcgaggagacccacccccacgtgaaccccgacagactgtgccacatggagcccgccaaccacttctggcacgccggcgacctgcaggccatgatcagcaaggagttccacctggccgccacccaggacgactgcagaaagggcagaacccaggaggacatcctggtgcccagcagccaccccgagctgttcgccagcgtgctgcccatggcccccgaggaggccgccagactgcagcagccccagcccctgcccccccccagcggcatccacctgagcgccagcagaaccctggccctgaccctgctgtacagcagcccccccagccacagccccttcggcctgagcagcctgatctag

SEQ ID NO: 177848 - DNA, 459 bp, Artificial Sequence
  derived and/or modified sequence
atgacctgtaccgaccaaaagtcccactcacagcgcgcactcgggacacaaacccctgccctgcaagggcctcagctgttgaatacggatccatcatccgaggagacgaggccaccgcacgtcaatccggacaggctctgccacatggaaccggctaaccacttttggcatgcaggggacctgcaggccatgatttctaaggagttccatctggccgccacgcaggatgattgccgaaaaggcaggacacaggaagacatccttgtgccctcgtcccatccagagctatttgcgagtgtacttcctatggcaccggaggaggcggcccggctgcagcagcctcaacccctgccccccccatcaggaatccatttatctgcctcccgaactcttgctccaacgctcctctactccagtccaccctcgcactcgccgttcggtctgagttctcttatctag

SEQ ID NO: 177849 - DNA, 315 bp, Artificial Sequence
  derived and/or modified sequence
atggagcctgccaatcacttctggcatgccggcgaccttcaggcaatgatcagtaaggagttccacttagcggctacacaggacgactgtaggaaaggtagaacacaggaagacatccttgtgccatcctcacaccccgaattatttgcatctgtgctgcctatggctcctgaagaggcagccaggctacagcaaccccagccgctccctccaccaagcggaatccacctgtccgcctctagaacgctggctttaacactgctctatagctctccgccaagccacagccctttcggcctcagctccctgatttag

SEQ ID NO: 177850 - DNA, 459 bp, Artificial Sequence
  derived and/or modified sequence
atgacctgtacggatcagaagtcccacagccaacgtgccctaggaacacagacccccgcactgcagggcccgcagctgttgaataccgacccctcatctgaggagaccaggccgccacacgtgaatcccgatcgattatgccatatggaacctgccaaccatttttggcacgccggtgacctgcaggcgatgatctcaaaggagttccacctggccgcgactcaggacgactgcaggaaaggtcgcacacaggaggacatcctagttccaagctcacaccctgaacttttcgcctcagtgttgcccatggcacccgaagaggcagctcgattgcagcagccccagcccctgccacctcccagcgggatccatcttagtgcatctcgtacgctagcccctaccttgttgtacagttccccgccatcacactcacccttcggcctgtctagcttaatttag

SEQ ID NO: 177851 - DNA, 459 bp, Artificial Sequence
  derived and/or modified sequence
atgacatgcactgatcagaaaagtcattctcagagagcgcttgggacccagacaccagccttgcaggggccccaactgctgaacacagatccgagctcaaaggagactaggccacctcacgtcaatcccgacaggttatgtcatatggagccagcgaaccatttctggcatgccggcgatctccaggctatgatttctaaggaatttcacttggcagccactcaagacgactgccgcaaaggacgaactcaggaggacatattagtgcccagttcccatccagaattgtttgcgagcgttttgccaatggcgcctgaagaggctgccaggctgcagcagcctcagcccctacctccccctagcggcatccatctgtccgccagtcggactttggcccccactctgctctatagtagcccaccaagccatagtccattcggactctcatcacttatctag

SEQ ID NO: 177852 - DNA, 459 bp, Artificial Sequence
  derived and/or modified sequence
atgacatgtacagatcagaagagccactcacagcgggctctcggcacacaaaccccagctctgcaaggccctcaactgctgaataccgacccatcgtctgaggaaacacgccctccccacgtgaatcccgacaggctttgccacatggagcctgctaaccatttctggcacgccggggatttgcaagcaatgatttccaaggagttccacctggcagcgactcaagatgattgtcggaaggggcggacccaggaggatatactggtcccctcctctcatcccgagctcttcgcctcagtgctccctatggcccccgaagaggccgctcgcctgcagcagcctcaaccattgccacctccctctggaattcacctttcagcctctcgaaccttggcccccactctgctttactcctcaccaccgagccacagtccctttggcctaagctctctgatctag

SEQ ID NO: 177853 - DNA, 459 bp, Artificial Sequence
  derived and/or modified sequence
atgacctgtaccgaccagaagtctcattctcaacgtgctctggggacacagacaccggcacttcagggaccccagctgctgaatacggatcccagctctgaggaaacacgtccacctcacgtaaaccccgacaggctctgtcacatggaaccggcaaatcatttttggcatgccggagatctgcaggccatgatttccaaagagtttcacctggccgcaacccaggatgattgcagaaaagggagaacacaagaagatatccttgtcccaagttctcatcccgagttgttcgcctccgtacttcccatggccccggaggaggcagcgcgcctgcagcaaccccagccactgcccccacccagcggaatccacctgtcagcctcaagaactctggcaccaacactgctctactcatcgcctccatcccattcaccgtttggtttgtcctccctaatttag

SEQ ID NO: 177854 - DNA, 453 bp, Artificial Sequence
  derived and/or modified sequence
ccccaaactgaccagaaatcccactctcaacgggccttaggcactcaaaccccagccctacaaggcccccaactgctgaacaccgatccatcctcagaggaaacgcatcctcatgtgaatcctgacagattgtgtcacatggagcctgcgaaccacttttggcatgctggagatctccaggcaatgatttctaaagagttccatctcgccgcaacacaggacgactgcagaaaaggacggacacaggaggacatactcgttccctcatcgcacccagagctgttcgcatcggtcctgcccatggcacctgaggaagccgcaaggctgcagcaacctcaaccactcccacccccgtctggtatccacctgtcagcctcccggaccctagccctgacgctcctgtatagtagcccgcccagtcacagccccttcggcctttcctctctgatctag

SEQ ID NO: 177855 - DNA, 459 bp, Artificial Sequence
  derived and/or modified sequence
atgacctgcacagaccagaagagccacagccagagggccctgggcacccagaccccagccctgcagggcccccagctgctgaacacagaccccagcagcgaggagacccggcccccccacgtgaacccagaccggctgtgccacatggagcccgccaaccacttctggcacgccggggacctgcaggccatgatcagcaaggagttccacctggccgccacccaggatgactgcaggaagggccgcacccaggaggacatcctggtgcccagcagccaccctgagctgtttgcctctgtgctgcccatggcccctgaggaggccgcccggctgcagcagccccagcccctgcccccaccttctggcatccacctgagcgccagcaggaccctggcccccaccctgctgtacagcagcccccccagccacagccccttcggcctgagcagcctcatctag

SEQ ID NO: 177856 - DNA, 315 bp, Artificial Sequence
  derived and/or modified sequence
atggagcccgccaaccacttctggcacgccggggacctgcaggccatgatcagcaaggagttccacctggccgccacccaggatgactgcaggaagggccgcacccaggaggacatcctggtgcccagcagccaccctgagctgtttgcctctgtgctgcccatggcccctgaggaggccgcccggctgcagcagccccagcccctgcccccaccttctggcatccacctgagcgccagcaggaccctggccctgaccctgctgtacagcagcccccccagccacagccccttcggcctgagcagcctcatctag

SEQ ID NO: 177857 - DNA, 459 bp, Artificial Sequence
  derived and/or modified sequence
atgacctgcacagaccagaagagccacagccagagggccctgggcacccagaccccagccctgcagggcccccagctgctgaacacagaccccagcagcaaggagacccggcccccccacgtgaacccagaccggctgtgccacatggagcccgccaaccacttctggcacgccggggacctgcaggccatgatcagcaaggagttccacctggccgccacccaggatgactgcaggaagggccgcacccaggaggacatcctggtgcccagcagccaccctgagctgtttgcctctgtgctgcccatggcccctgaggaggccgcccggctgcagcagccccagcccctgcccccaccttctggcatccacctgagcgccagcaggaccctggcccccaccctgctgtacagcagcccccccagccacagccccttcggcctgagcagcctcatctag

SEQ ID NO: 177858 - DNA, 453 bp, Artificial Sequence
  derived and/or modified sequence
ccccagacagaccagaagagccacagccagagggccctgggcacccagaccccagccctgcagggcccccagctgctgaacacagaccccagcagcgaggagacccacccccacgtgaacccagaccggctgtgccacatggagcccgccaaccacttctggcacgccggggacctgcaggccatgatcagcaaggagttccacctggccgccacccaggatgactgcaggaagggccgcacccaggaggacatcctggtgcccagcagccaccctgagctgtttgcctctgtgctgcccatggcccctgaggaggccgcccggctgcagcagccccagcccctgcccccaccttctggcatccacctgagcgccagcaggaccctggccctgaccctgctgtacagcagcccccccagccacagccccttcggcctgagcagcctcatctag

SEQ ID NO: 177859 - DNA, 459 bp, Artificial Sequence
  derived and/or modified sequence
atgacctgcaccgaccagaagagccacagccagcgggccctgggcactcaaacccccgccttgcagggcccacagttactgaatactgatcctagttcagaagagacgaggcccccgcacgtaaatcctgacagactttgtcacatggaacctgccaatcacttctggcatgcaggagacctccaggccatgattagtaaagagttccatcttgcggcaacccaggacgattgccgtaagggaaggacccaggaggatattcttgtgccgtcttctcatcctgagttatttgcaagtgtgctgccaatggcacccgaggaagccgcacgactccaacagccacaacccttgcccccaccgtcggggatccacctatcagccagcaggacgcttgcacccaccctgctctattctagccctccaagccactctccattcggactgagttcactcatttag

SEQ ID NO: 177860 - DNA, 315 bp, Artificial Sequence
  derived and/or modified sequence
atggagcccgccaaccacttctggcacgccggcgacctgcaggccatgatctccaaagaatttcatctggcagcaacacaggatgactgtaggaaaggccgcacgcaggaagacatcctggtgcccagctcccatccagagctctttgcttctgtgctgcctatggctcccgaggaagccgcccggctgcagcagccccagccacttcctcctcccagtgggattcacctgtctgctagtcggactttggccttgactctgttgtactcatcccccccttcccatagtccattcggacttagttcgttgatctag

SEQ ID NO: 177861 - DNA, 459 bp, Artificial Sequence
  derived and/or modified sequence
atgacctgcaccgaccagaagagccacagccagcgggccctgggcactcagaccccagcactccagggaccccagctgctgaacacggaccctagctctgaggaaacccggccccctcatgtgaatccagatcggctgtgccatatggagcctgcgaaccatttttggcatgccggagacctccaggctatgatctctaaggaattccatctggccgccacgcaggatgactgcagaaaaggcaggacccaggaagatattctggtgcccagcagccacccagagctgtttgcttcagtcttgccaatggccccggaagaagccgctcgccttcaacaaccgcaaccattgcctcctccaagtgggatccacctgagtgcctctagaactttagccccaacactactgtatagcagcccgcccagccactcccccttcggcctctctagcctgatctag

SEQ ID NO: 177862 - DNA, 459 bp, Artificial Sequence
  derived and/or modified sequence
atgacctgcaccgaccagaagagccacagccagcgggccctgggcacacagactcctgccctgcagggccctcaactgctcaacacggacccaagctccaaggagactcgccctccacatgtgaatcccgacagactatgccatatggagccagcaaaccatttctggcacgccggagacctgcaagccatgatctcaaaagaattccacctcgccgcaacccaggatgactgccgaaagggccgcacacaggaagacatcctggtgccctcaagccatcccgaactgttcgcgagcgtacttcctatggctccagaagaagctgccagacttcagcaaccacagcctctgccccctccttccggcattcacttgagtgcatccagaactcttgcccctaccctcttgtattcctccccaccttctcatagcccttttggcctcagttcacttatatag

SEQ ID NO: 177863 - DNA, 459 bp, Artificial Sequence
  derived and/or modified sequence
atgacctgcaccgaccagaagagccacagccagcgggccctgggcacccagacgccagcccttcagggaccccagctactcaacactgatccgagttcagaggaaacccgacctccccacgtcaatcctgacaggctgtgccatatggaacctgctaatcatttctggcacgcaggagacttgcaggcaatgatttctaaagaattccatctagccgcaacacaggacgattgtcgcaaaggcaggacacaggaggacatcctggtgccctcatcacaccccgagctcttcgcaagcgtcctgcctatggcccctgaggaggcggcgcgactccaacagccgcaacccctgcctcctcccagtggcatccacctaagtgctagcagaactttagctcctaccctgctgtacagctcccccccttctcacagtccttttggtttgtcctccctaatttag

SEQ ID NO: 177864 - DNA, 459 bp, Artificial Sequence
  derived and/or modified sequence
atgacctgcaccgaccagaagagccacagccagcgggccctgggcacacagactcccgcactccaaggaccgcagttactgaacacagatcccagctccgaggagaccaggcctccacatgtcaaccccgatagactttgccatatggagcccgcaaaccacttttggcatgctggcgatctccaagccatgatttcaaaagagtttcacctggctgcaacacaagacgattgccgaaagggaaggacacaggaggatattctggtgccatcctcgcaccctgagctgtttgcgtcagtcctgccaatggcgcccgaggaagctgcaagactccaacagccccagccactaccaccaccctccggcatccatttaagtgcgagcaggacattggccccaactttactgtattcttccccacccagccactcaccatttgggctgtctagcttaatttag

SEQ ID NO: 177865 - DNA, 453 bp, Artificial Sequence
  derived and/or modified sequence
ccccagaccgaccagaagagccacagccagcgggccctgggcacccaaacaccggcgctgcagggaccgcagctgctgaatactgatccaagctctgaagagacccatccacacgttaacccggatcggctgtgtcatatggagcccgctaatcacttctggcatgccggtgatctgcaggccatgatatccaaagagttccacctagcagcgacacaggatgactgtagaaagggaagaacccaggaggatatccttgtaccctctagccatcccgaactgttcgcctccgtgctcccaatggcccctgaagaggccgcacgcctccaacagccacagccacttcctcccccgtcaggaatacatctgagcgcctcacgtaccctggcactcactcttctgtactcaagcccaccttcccacagcccctttggcctctcttcactgatctag

SEQ ID NO: 177866 - DNA, 459 bp, Artificial Sequence
  derived and/or modified sequence
atgacctgtaccgatcagaagtcccacagtcagcgggcattaggcacacaaacacctgcccttcaaggccctcagttacttaatactgatccaagcagtgaggagacacgtccaccccacgttaatcccgaccgcctgtgtcacatggaaccagctaaccatttctggcatgcaggggacctccaagctatgatctccaaagagttccaccttgctgccactcaggacgattgtaggaaggggaggactcaggaggacattttggtcccttcttcgcatccagagctgtttgcatctgtgctgcccatggctccagaagaggccgctaggctgcagcagccgcagcccctgccccctccaagcgggatccatttgtccgcctctagaacactggcacccaccctgctctatagttctcctccatctcactctcctttcggcctgagctccctgatctag

SEQ ID NO: 177867 - DNA, 315 bp, Artificial Sequence
  derived and/or modified sequence
atggaaccagcgaaccacttctggcatgcaggagacctccaggctatgatctctaaggagttccacttggccgctacgcaggacgattgcagaaagggtcggactcaggaggatatactcgtgccctcctctcatccagagctgttcgcctcagtgcttcccatggcccctgaggaggctgctcggttgcagcagccacagccactgccaccccctagcggcatccatctaagtgcctccaggacactggcccttaccttattgtactctagccccccaagccactcaccgttcggactgtcatccctcatttag

SEQ ID NO: 177868 - DNA, 459 bp, Artificial Sequence
  derived and/or modified sequence
atgacatgcactgaccagaaaagccatagtcagcgagccctcggcacgcagacaccagccctccaaggccctcagttgttaaataccgatccgagctcagaggaaacacgcccaccccatgtgaatcctgacagactttgtcatatggaacccgcaaaccatttttggcatgccggtgacctacaggctatgatctcgaaagaatttcatcttgcagctactcaggatgattgccgtaagggccgtacacaagaggacatactggtcccctcatcacatcctgagctgttcgccagcgtgcttcctatggctcctgaggaggcagcacgtctgcaacaaccccagccccttcctccacccagtgggatccatctttctgctagtcgcacgttggcgcctactctgctttatagcagcccacccagccactctccctttgggctctcatctctaatctag

SEQ ID NO: 177869 - DNA, 459 bp, Artificial Sequence
  derived and/or modified sequence
atgacttgtaccgatcagaaatcacatagtcagcgggctctcggcactcaaacgcccgctctccagggtccacaactactcaacactgacccctcgagtaaagaaacccggccaccacacgtgaatccagatcggctatgtcacatggagcctgcgaaccacttctggcacgcaggcgacttgcaggcgatgatcagcaaggaattccacctggcagctacacaggacgactgcaggaaaggcagaacacaggaagatatcctcgtccccagctctcatcctgagctattcgcgtcagttcttcctatggctcccgaagaggctgcccgtctgcagcagcctcagccgctccccccaccaagcggcattcacctgagcgcgtcgagaactttggcccctaccctgctctactcctccccaccctctcattcgccatttgggctgagctctctcatttag

SEQ ID NO: 177870 - DNA, 459 bp, Artificial Sequence
  derived and/or modified sequence
atgacttgtactgaccagaagtcccatagtcagcgtgctcttgggacacagacaccagccttacaagggccacaacttctgaataccgacccaagctcggaggagaccaggccgcctcacgttaatcccgacagactgtgccacatggaaccagccaaccatttttggcatgcgggtgaccttcaggccatgatatcaaaagagttccacctcgccgctacccaggacgattgtcgcaaaggcagaacgcaggaggacatattggtaccctctagccaccccgagctcttcgctagtgtgctccccatggcaccggaggaagcagctcgactccagcagccgcaacctctgcctccaccgtctggaatccacctcagcgcctcacgaacactcgctcccaccctcctgtactctagtcccccttcccattcgccctttggtttatcctctctaatctag

SEQ ID NO: 177871 - DNA, 459 bp, Artificial Sequence
  derived and/or modified sequence
atgacatgtaccgaccagaagagccactcccagagggccttgggcactcagacccccgctcttcagggtccccaactgctgaacaccgatccctcaagcgaggaaactcgacccccacacgtcaaccctgatcgtctttgtcacatggaacccgcaaaccatttctggcatgctggcgacctccaggccatgattagcaaggaatttcatctggcagcaactcaagatgattgtaggaaaggaaggacacaggaggacatccttgtaccgagctctcatcccgaactgttcgcttcagtccttcctatggcacctgaagaagcagctcggctacaacagccccaaccactgcctcctccaagcgggatacacctgagcgcttctcgcaccctggctcccacacttctgtattcttcccctccttcacattcaccgttcgggctctcatcgctgatatag

SEQ ID NO: 177872 - DNA, 453 bp, Artificial Sequence
  derived and/or modified sequence
cctcagacagatcagaaatcccactcccaaagggcccttggaactcaaacacctgccttgcagggacctcagttactgaacaccgatccctcctcagaagagacacatccacatgtgaatcccgatcgcctgtgccacatggagcctgctaatcatttctggcatgccggagatctgcaggcgatgatctctaaggaatttcatctcgccgcaactcaggatgactgtcgaaagggccgaacacaggaggacattcttgtgcctagttctcaccctgagctgttcgcatccgtgctacctatggcacctgaggaggccgcaaggctgcagcagccacaaccactccccccaccatccggcatccacctgtctgcttcccggaccctggctcttaccctgctttactcaagccctcctagccattcaccattcgggctgtctagcctgatttag

SEQ ID NO: 177873 - DNA, 908 bp, Artificial Sequence
  derived and/or modified sequence
ggtgtcccagaaacccaggaaatcgagactcatgactcccagagaggatggcatctagaagtagacgatcaagggtggaatctacagtccgtgagccctgacttcttgccttcgtctcaaatagactctgcagccagccatctatgcagcgccccagtggctttgaaatgcaacagaaaccatcacccccggaccgtgggctccatgccagtgggcaaagcacagcctgggaagaattggtttgcagccaggcagtcctccatccagtcttgactttggcacttgtgatatgacttgcacagaccaaaaaagtcactctcaaagagctctcggcacacagaccccagctttacaaggaccccagctccttaacacagatcccagctccgaggaaactcgtcccccccacgttaatcctgaccgactttgccacatggagccagcaaaccatttctggcatgcaggggacctccaagcaatgatatccaaggaattccatctggcagccacccaggatgactgcagaaaaggaaggacacaggaggatatcctggttccctcttcccacccagagctgtttgcatcagtcctgccaatggctccggaagaagctgccaggctccagcaacctcagccccttcctcctccctcaggaatccacctatccgcctctaggaccttggctccaactctattgtactcgtctcctccctcccattctccttttggtctcagctccttgatctaagcctcccagagagacccctagaacgtttccctcaaggacctttctgcctggaagtctgttagcctttcagaagtaacatgtccaaaataaaatttgattcctcccaggttgttccctgcctggtccgctaccccacagtaaggaacaccttattatgcaa

SEQ ID NO: 177874 - DNA, 852 bp, Artificial Sequence
  derived and/or modified sequence
ggtgtcccagaaacccaggaaatcgagactcatgactcccagagaggatggcatctagaagtagacgatcaagggtggaatctacagtccatgggccctgacttcttgccttcgtctcaaatagactctgcagccagccatctatgcagcgccccagtggctttgaaatgcaacagaaaccatcacccctggaccatgggctccatgccagtgggcaaagcacagcctgggaagaattggtttgcagccaggcagtcctccatccagtcttgactttggcacttgtgatatgacttgcacagaccaaaaaagtcactctcaaagagctctcggcacacagaccccagctttacaaggaccccagctccttaacacagatcccagctccgaggaaactcatccccccacgttaatcctgaccgactttgccacatggagccagcaaaccatttctggcatgcaggggacctccaagcaatgatatccaaggaattccatctggcagccacccaggatgactgcagaaaaggaaggacacaggaggatatcctggttccctcttcccacccagagctgtttgcatcagtcctgccaatggctccggaagaagctgccaggctccagcaacctcagccccttcctcctccctcaggaatccacctatccgcctctaggaccttggctctaactctattgtactcgtctcctccctcccattctccttttggtctcagctccttgatctaagcctcccagagagaccctagaacgtttccctcaaggacctttctgcctggaagtctgttagcctttcagaagtaacatgtccaaaataaaatttgattcctccca

SEQ ID NO: 177875 - DNA, 854 bp, Artificial Sequence
  derived and/or modified sequence
ggtgtcccagaaacccaggaaatcgagactcatgactcccagagaggatggcatctagaagtagacgatcaagggtggaatctacagtccatgggccctgacttcttgccttcgtctcaaatagactctgcagccagccatctatgcagcgccccagtggctttgaaatgcaacagaaaccatcacccccggaccatgggctccatgccagtgggcaaagcacagcctgggaagaattggtttgcagccaggcagtcctccatccagtcttgactttggcacttgtgatatgacttgcacagaccaaaaaagtcactctcaaagagctctcggcacacagaccccagctttacaaggaccccagctccttaacacagatcccagctccgaggaaactcgtcccccccacgttaatcctgaccgactttgccacatggagccagcaaaccatttctggcatgcaggggacctccaagcaatgatatccaaggaattccatctggcagccacccaggatgactgcagaaaaggaaggacacaggaggatatcctggttccctcttcccacccagagctgtttgcatcagtcctgccaatggctccggaagaagctgccaggctccagcaacctcagccccttcctcctccctcaggaatccacctatccgcctctaggaccttggctccaactctattgtactcgtctcctccctcccattctccttttggtctcagctccttgatctaagcctcccagagagacccctagaacgtttccctcaaggacctttctgcctggaagtctgttagcctttcagaagtaacatgtccaaaataaaatttgattcctccca

SEQ ID NO: 177876 - DNA, 854 bp, Artificial Sequence
  derived and/or modified sequence
ggtgtcccagaaacccaggaaatcgagactcatgactcccagagaggatggcatctagaagtagacgatcaagggtggaatctacagtccatgggccctgacttcttgccttcgtctcaaatagactctgcagccagccatctatgcagcgccccagtggctttgaaatgcaacagaaaccatcacccccggaccgtgggctccatgccagtgggcaaagcacagcctgggaagaattggtttgcagccaggcagtcctccatccagtcttgactttggcacttgtgatatgacttgcacagaccaaaaaagtcactctcaaagagctctcggcacacagaccccagctttacaaggaccccagctccttaacacagatcccagctccaaggaaactcgtcccccccacgttaatcctgaccgactttgccacatggagccagcaaaccatttctggcatgcaggggacctccaagcaatgatatccaaggaattccatctggcagccacccaggatgactgcagaaaaggaaggacacaggaggatatcctggttccctcttcccacccagagctgtttgcatcagtcctgccaatggctccggaagaagctgccaggctccagcaacctcagccccttcctcctccctcaggaatccacctatccgcctctaggaccttggctccaactctattgtactcgtctcctccctcccattctccttttggtctcagctccttgatctaagcctcccagagagacccctagaatgtttccctcaaggacctttctgcctggaagtctgttagcctttcagaagtaacatgtccaaaataaaatttgattcctccca

SEQ ID NO: 177877 - DNA, 854 bp, Artificial Sequence
  derived and/or modified sequence
ggtgtcccagaaacccaggaaatcgagactcatgactcccagagaggatggcatctagaagtagacgatcaagggtggaatctacagtccatgggccctgacttcttgccttcgtctcaaatagactctgcagccagccatctatgcagcgccccagtggctttgaaatgcaacagaaaccatcacccccggaccgtgggctccatgccagtgggcaaagcacagcctgggaagaattggtttgcagccaggcagtcctccatccagtcttgactttggcacttgtgatatgacttgcacagaccaaaaaagtcactctcaaagagctctcggcacacagaccccagctttacaaggaccccagctccttaacacagatcccagctccgaggaaactcgtcccccccacgttaatcctgaccgactttgccacatggagccagcaaaccatttctggcatgcaggggacctccaagcaatgatatccaaggaattccatctggcagccacccaggatgactgcagaaaaggaaggacacaggaggatatcctggttccctcttcccacccagagctgtttgcatcagtcctgccaatggctccggaagaagctgccaggctccagcaacctcagccccttcctcctccctcaggaatccacctatccgcctctaggaccttggctccaactctattgtactcgtctcctccctcccattctccttttggtctcagctccttgatctaagcctcccagagagacccctagaatgtttccctcaaggacctttctgcctggaagtctgttagcctttcagaagtaacatgtccaaaataaaatttgattcctccca

SEQ ID NO: 177878 - DNA, 854 bp, Artificial Sequence
  derived and/or modified sequence
ggtgtcccagaaacccaggaaatcgagactcatgactcccagagaggatggcatctagaagtagacgatcaagggtggaatctacagtccgtgggccctgacttcttgccttcgtctcaaatagactctgcagccagccatctatgcagcgccccagtggctttgaaatgcaacagaaaccatcacccccggaccgtgggctccatgccagtgggcaaagcacagcctgggaagaattggtttgcagccaggcagtcctccatccagtcttgactttggcacttgtgatatgacttgcacagaccaaaaaagtcactctcaaagagctctcggcacacagaccccagctttacaaggaccccagctccttaacacagatcccagctccgaggaaactcgtcccccccacgttaatcctgaccgactttgccacatggagccagcaaaccatttctggcatgcaggggacctccaagcaatgatatccaaggaattccatctggcagccacccaggatgactgcagaaaaggaaggacacaggaggatatcctggttccctcttcccacccagagctgtttgcatcagtcctgccaatggctccggaagaagctgccaggctccagcaacctcagccccttcctcctccctcaggaatccacctatccgcctctaggaccttggctccaactctattgtactcgtctcctccctcccattctccttttggtctcagctccttgatctaagcctcccagagagacccctagaacgtttccctcaaggacctttctgcctggaagtctgttagcctttcagaagtaacatgtccaaaataaaatttgattcctccca

SEQ ID NO: 177879 - DNA, 557 bp, Artificial Sequence
  derived and/or modified sequence
ccacaaacagaccaaaaaagtcactctcaaagagctctcggcacacagaccccagctttacaaggaccccagctccttaacacagatcccagctccgaggaaactcatccccacgttaatcctgaccgactttgccacatggagccagcaaaccatttctggcatgcaggggacctccaagcaatgatatccaaggaattccatctggcagccacccaggatgactgcagaaaaggaaggacacaggaggatatcctggttccctcttcccacccagagctgtttgcatcagtcctgccaatggctccggaagaagctgccaggctccagcaacctcagccccttcctcctccctcaggaatccacctatccgcctctaggaccttggctctaactctattgtactcgtctcctccctcccattctccttttggtctcagctccttgatctaagcctcccagagagaccctagaacgtttccctcaaggacctttctgcctggaagtctgttagcctttcagaagtaacatgtccaaaataaaatttgattcctccc

SEQ ID NO: 177880 - protein, 136 aa, Artificial Sequence
  derived and/or modified sequence
MILNWKLLGILVLCLHTRGISGSEGHPSHPPAEDREEAGSPTLPQGPPVPGDPWPGAPPLFEDPPPTRPSRPWRDLPETGVWLPEPPRTDPPQPPRPDDPWPAGPQPPENPWPPAPEVDNRPQEEPDLDPPREEYR

SEQ ID NO: 177881 - protein, 136 aa, Artificial Sequence
  derived and/or modified sequence
MILNWKLLGILVLCLHTRGISGSEGHPSHPPAEDREEAGSPTLPQGPPVPGDPWPGAPPLFEDPPPTRPSRPWRDLPETGVWPPEPPRTDPPQPPRPDDPWPAGPQPPENPWPPAPEVDNRPQEEPDLDPPREEYR

SEQ ID NO: 177882 - DNA, 672 bp, Artificial Sequence
  derived and/or modified sequence
atgtggaagcccagccccagcagcagccccgccagctggagctgcaccgccctgagagccccccagagctgcctgagagccgccaccgtgagacccgtgaccctgcaggccagagccgacagccccaccgtgcccgagcccgtgcacagaccccaggacccctggcacatccccggcgtgcccgagcccgtgcacagaccccaggacccctggcacatccccggcgtgcccgagcccgtgcacagaccccaggacccctggcacatccccggcgtgcccgagcccgtgcacagaccccaggacccctggcacatccccggcgtgcccgagcccgtgcacagaccccaggacccctggccctggctgcagctggtgccccccgccgagctggcctactgcctgctgatgctgctgctggcccactgcatgaagcagcaggccagacccggccaccccgacttcctgcacagagaggcctgggcctgcctgagcgccgccggcggcctggccagccccggcctgctgctgtgggccaccgccagacccagagccagcggcgaggccggccccggcagagccctggtgggcgccgacgccgcctgctgccccagacacagcgtgctgagcctggtggacatccccagcggccaggtgctgccccagggccagtag

SEQ ID NO: 177883 - DNA, 786 bp, Artificial Sequence
  derived and/or modified sequence
gcctggagaagaagaagaagcggcaccagcggcaaggccacctggtggtgcagcggcctgagaagagccagccccacccccagcagaagagtgcagagctgggccaccgccgtgatgtggaagcccagccccagcagcagccccgccagctggagctgcaccgccctgagagccccccagagctgcctgagagccgccaccgtgagacccgtgaccctgcaggccagagccgacagccccaccgtgcccgagcccgtgcacagaccccaggacccctggcacatccccggcgtgcccgagcccgtgcacagaccccaggacccctggcacatccccggcgtgcccgagcccgtgcacagaccccaggacccctggcacatccccggcgtgcccgagcccgtgcacagaccccaggacccctggcacatccccggcgtgcccgagcccgtgcacagaccccaggacccctggccctggctgcagctggtgccccccgccgagctggcctactgcctgctgatgctgctgctggcccactgcatgaagcagcaggccagacccggccaccccgacttcctgcacagagaggcctgggcctgcctgagcgccgccggcggcctggccagccccggcctgctgctgtgggccaccgccagacccagagccagcggcgaggccggccccggcagagccctggtgggcgccgacgccgcctgctgccccagacacagcgtgctgagcctggtggacatccccagcggccaggtgctgccccagggccagtag

SEQ ID NO: 177884 - DNA, 684 bp, Artificial Sequence
  derived and/or modified sequence
atgggccacagaagcgacgtggaggccatcgccagcagcagccccgccagctggagctgcaccgccctgagagccccccagagctgcctgagagccgccaccgtgagacccgtgaccctgcaggccagagccgacagccccaccgtgcccgagcccgtgcacagaccccaggacccctggcacatccccggcgtgcccgagcccgtgcacagaccccaggacccctggcacatccccggcgtgcccgagcccgtgcacagaccccaggacccctggcacatccccggcgtgcccgagcccgtgcacagaccccaggacccctggcacatccccggcgtgcccgagcccgtgcacagaccccaggacccctggccctggctgcagctggtgccccccgccgagctggcctactgcctgctgatgctgctgctggcccactgcatgaagcagcaggccagacccggccaccccgacttcctgcacagagaggcctgggcctgcctgagcgccgccggcgtgagccccgccctggacagctgcttcggcccccagcaggacctgggcagagtggagagaagagccagacccgccctggtgggcgccgacgccgcctgctgccccagacacagcgtgctgagcctggtggacatccccagcggccaggtgctgccccagggccagtag

SEQ ID NO: 177885 - DNA, 672 bp, Artificial Sequence
  derived and/or modified sequence
atgtggaagccttcaccaagttcctcgcccgcttcctggagctgtactgcactacgcgctccacagtcctgcctccgcgcggccaccgttaggccagtaacccttcaggcccgggctgatagccctacagtaccagagcctgtacaccggccccaggatccatggcatataccaggcgtgcccgaacccgtgcacaggccccaggatccttggcatatccctggcgttccagaacccgttcatcgacctcaggacccctggcacatccccggcgtccctgagcctgtgcatcgccctcaagatccatggcatatcccaggagtgccagaacccgtccacagacctcaagacccatggccctggttacaactcgtgccccctgccgagctagcatactgcttgcttatgctgctgctggctcattgcatgaagcagcaggcacgacccgggcacccagacttcctccatagggaagcttgggcatgtttgagtgccgcaggtgggctggctagtcccgggctgctgctgtgggcgacagctaggccacgcgcatccggggaggccggaccgggccgagcacttgttggcgccgatgcagcttgctgtcctaggcactccgtactttctttggtggacattccctctggccaagtgcttccacaggggcagtag

SEQ ID NO: 177886 - DNA, 786 bp, Artificial Sequence
  derived and/or modified sequence
gcttggagaaggcgaagatccggaaccagcggaaaggccacatggtggtgctctgggcttaggagggcgagtccaacaccctcgcggagagtgcagagctgggcaacggccgtcatgtggaaaccctccccctcatcctccccggcctcttggagctgcacggcattgcgggctccacagtcttgcctcagggctgctacagtgagacccgtcacactgcaggcccgcgccgattccccgaccgtcccagagccagtgcatcggcctcaggatccatggcatattccaggcgtccccgaacccgtccaccgtcctcaggacccatggcacattcccggagtccccgagccagtgcaccgcccacaggacccctggcacatcccaggagtccccgagcccgtgcatagaccacaggacccatggcacattcctggagtccctgagccggttcatagacctcaggacccctggccatggctgcaactcgttccaccagccgaactcgcctattgtctcctcatgctgctcctagcccattgcatgaaacagcaggctcgacccgggcaccccgatttcttgcaccgcgaagcctgggcttgtctgtcagcagccgggggcctggcaagcccgggccttctgttgtgggctacagcaaggcctcgtgcctcaggggaagcagggccaggaagggctctggtgggagcagatgccgcatgttgtccacggcattctgtgttatctctggtcgacataccttctgggcaagtgctgccacaagggcaatag

SEQ ID NO: 177887 - DNA, 684 bp, Artificial Sequence
  derived and/or modified sequence
atgggccaccgatcagatgtggaagccatcgcatcatccagcccagccagttggtcttgcaccgccctgcgtgctccacagtcctgtctgagggctgctaccgttcgaccagtgaccctccaagcccgagccgactcacccaccgttccagaacccgttcaccgacctcaggatccctggcacatccccggggtccctgagcctgtgcacaggccccaggatccttggcacatcccaggtgtgcctgagcccgtgcacaggcctcaggatccctggcacatccccggcgtgcccgagcctgtacacagacctcaggacccctggcacatccctggggtcccggaacccgtacacaggcctcaggatccatggccgtggcttcagctcgttccacccgccgagctcgcctattgtctgctgatgctcctcttggcgcattgcatgaagcaacaagctagacccggccaccctgatttccttcatcgcgaggcttgggcctgcttgtcagccgcaggggtgagcccagccctagactcctgctttggcccgcagcaggacctcggtcgagttgaacgcagagcaaggcctgctctcgtgggcgcagacgcagcctgttgcccacggcactcagtcttgtctctggttgatatcccatctgggcaagtgctgcctcagggccaatag

SEQ ID NO: 177888 - DNA, 672 bp, Artificial Sequence
  derived and/or modified sequence
atgtggaagcccagccccagcagcagccctgcctcctggagctgcacagccctgcgggccccccagagctgcctgcgggccgccaccgtgcggcctgtgaccctgcaggcccgggctgacagccccaccgtgcctgagcctgtgcaccggccccaggacccctggcacatccctggggtgcctgagcctgtgcaccggccccaggacccctggcacatccctggggtgcctgagcctgtgcaccggccccaggacccctggcacatccctggggtgcctgagcctgtgcaccggccccaggacccctggcacatccctggggtgcctgagcctgtgcaccggccccaggacccctggccctggctgcagctggtgcccccagctgagctggcctactgcctgctgatgctgctgctggcccactgcatgaagcagcaggcccggcccggccacccagacttcctgcaccgggaggcctgggcctgcctgtctgctgctgggggcctggccagccctggcctgctgctgtgggccacagcccggccccgggccagcggggaggccggccctggccgggccctggtgggcgcagatgctgcctgctgccccaggcacagcgtgctgagcctggtggacatccccagcggccaggtgctgccccagggccagtag

SEQ ID NO: 177889 - DNA, 786 bp, Artificial Sequence
  derived and/or modified sequence
gcctggaggagaagaagaagtggcaccagcggcaaggccacctggtggtgcagcggcctgcggcgggccagccccacccccagcagaagagtgcagagctgggccacagctgtgatgtggaagcccagccccagcagcagccctgcctcctggagctgcacagccctgcgggccccccagagctgcctgcgggccgccaccgtgcggcctgtgaccctgcaggcccgggctgacagccccaccgtgcctgagcctgtgcaccggccccaggacccctggcacatccctggggtgcctgagcctgtgcaccggccccaggacccctggcacatccctggggtgcctgagcctgtgcaccggccccaggacccctggcacatccctggggtgcctgagcctgtgcaccggccccaggacccctggcacatccctggggtgcctgagcctgtgcaccggccccaggacccctggccctggctgcagctggtgcccccagctgagctggcctactgcctgctgatgctgctgctggcccactgcatgaagcagcaggcccggcccggccacccagacttcctgcaccgggaggcctgggcctgcctgtctgctgctgggggcctggccagccctggcctgctgctgtgggccacagcccggccccgggccagcggggaggccggccctggccgggccctggtgggcgcagatgctgcctgctgccccaggcacagcgtgctgagcctggtggacatccccagcggccaggtgctgccccagggccagtag

SEQ ID NO: 177890 - DNA, 684 bp, Artificial Sequence
  derived and/or modified sequence
atgggccacagaagtgatgtggaggccatcgccagcagcagccctgcctcctggagctgcacagccctgcgggccccccagagctgcctgcgggccgccaccgtgcggcctgtgaccctgcaggcccgggctgacagccccaccgtgcctgagcctgtgcaccggccccaggacccctggcacatccctggggtgcctgagcctgtgcaccggccccaggacccctggcacatccctggggtgcctgagcctgtgcaccggccccaggacccctggcacatccctggggtgcctgagcctgtgcaccggccccaggacccctggcacatccctggggtgcctgagcctgtgcaccggccccaggacccctggccctggctgcagctggtgcccccagctgagctggcctactgcctgctgatgctgctgctggcccactgcatgaagcagcaggcccggcccggccacccagacttcctgcaccgggaggcctgggcctgcctgtctgctgctggggtgtccccagccctggacagctgcttcggcccccagcaggacctgggccgggtggagcggcgggcccggcctgccctggtgggcgcagatgctgcctgctgccccaggcacagcgtgctgagcctggtggacatccccagcggccaggtgctgccccagggccagtag

SEQ ID NO: 177891 - DNA, 672 bp, Artificial Sequence
  derived and/or modified sequence
atgtggaagcccagccccagcagcagccccgccagctggagctgcacggcgcttagggcaccccagagctgcttgagggcagccactgttagacccgtcacgcttcaggcacgggcagacagtccgacagtaccagagcccgttcataggccgcaggacccctggcacatccctggagttccagaaccggtacaccgtccccaagacccctggcacattcctggggtacctgaacctgtgcatcgccctcaggatccatggcacatccctggtgtgccagagccggttcatcgcccccaggacccctggcacatccccggcgtacctgaacctgtccacaggccacaagacccatggccatggttgcagttagtgccgccggctgagttagcctattgtttgctgatgcttttgcttgctcattgcatgaagcagcaggctaggccaggccatcctgattttttacaccgcgaagcctgggcctgcctttctgccgcgggcggcctggcatctcctgggctcttactgtgggcaaccgcacgtcctcgcgcgagcggcgaggccggtcctggccgcgcactggtcggggctgacgcggcgtgctgcccacggcacagcgtgctcagcctggtggatatcccttctgggcaggtacttccacagggtcagtag

SEQ ID NO: 177892 - DNA, 786 bp, Artificial Sequence
  derived and/or modified sequence
gcctggcggcggcggcggagcggcaccagcggcaaggccacctggtggtgctccggtctgaggcgggcgtccccaaccccctcgcgaagagtgcagagctgggcaacagccgtaatgtggaaaccctctccctcctcttcccccgcgtcgtggagctgcacagccctgcgcgccccacagtcgtgtctccgcgcagctaccgtgcggcccgtgactttacaggctagagccgactctcccacagtgcccgagccagttcaccgccctcaagatccctggcacatcccaggtgtgcccgagcccgtgcatagaccgcaggatccttggcacatccccggggtcccagaaccggtgcaccgaccccaagatccatggcacattcctggggtccccgagcccgtgcaccgcccacaggacccgtggcatatccctggagtccccgagcccgtgcacagaccccaggacccctggccttggctgcaactggtgcctcctgcggagcttgcatactgcctactaatgttattgctggcacactgcatgaagcagcaggctcggccgggccacccagactttttgcaccgagaagcatgggcctgcttatctgccgcgggaggcctggcttcgcctggtttattgttgtgggccacagctagaccaagggcctccggcgaagccggacctgggagagcccttgtcggtgcagatgccgcatgttgtccccggcacagcgtgctgagtctcgtggatatccctagtgggcaggttctgccccaggggcaatag

SEQ ID NO: 177893 - DNA, 684 bp, Artificial Sequence
  derived and/or modified sequence
atgggccaccggagcgacgtggaggccatcgccagcagcagccccgcttcatggagctgtactgccctaagagcccctcagtcatgcctgcgagccgctacagtaagaccagtgaccttgcaggctagagccgacagccctaccgttccagagccagtgcacaggcctcaagacccttggcacattcctggagtacccgagcctgttcataggccccaagacccctggcatatacccggcgtccccgagcctgtacaccgaccgcaggatccttggcatatcccaggcgttcctgaaccggtgcaccgtcctcaggatccatggcatatacctggagttccagagcctgtccatcgcccacaagacccgtggccatggctgcagctggtgccccctgcagaactcgcatattgtctgctgatgctgctgctggctcactgcatgaaacaacaggctcgaccgggccaccccgatttcctgcatagagaggcctgggcatgtctgtcggctgccggcgtgtcccccgcactcgattcctgcttcggcccgcagcaggatctcgggcgggtggaaagacgagccagaccggcactggttggcgcagatgccgcctgctgcccacgccattcagttctgtcactggtggatataccttccggccaggttttgccccaaggacagtag

SEQ ID NO: 177894 - DNA, 786 bp, Artificial Sequence
  derived and/or modified sequence
gcctggaggcgccgacgctccggtacctctggcaaggccacctggtggtgtagtggactgaggagggcctccccaacaccatctcggcgagtccaaagctgggccacagcagttatgtggaagccaagcccaagtagcagccctgcctcatggagctgcaccgccttgcgggctccccagtcctgcctcagagccgcaaccgtccgccctgtgactttgcaggcaagagcggatagtcccaccgtgccggagcctgtgcataggccgcaagacccatggcatatcccaggggtaccagagcccgttcaccgaccgcaggacccctggcatatccccggagtgccggaacctgtgcatagaccacaggacccttggcacatacctggggtgccagagcccgtgcaccgaccccaggatccttggcatatcccaggggtcccagaaccggtgcaccgcccacaggatccctggccctggctgcagctcgtcccccctgcagagctggcatactgcctgcttatgcttctcctggcgcactgtatgaagcagcaggctcgccctgggcatccagatttcctacaccgcgaagcgtgggcctgcctgtctgccgcaggcggtcttgcttcccccggactgcttctttgggccaccgctcgccctcgggctagtggtgaggcgggtcctggcagagcactcgtaggcgctgatgcagcatgctgtcctagacatagcgttctgtctctggtcgatatacccagtggtcaagtgctgccccagggtcagtag

SEQ ID NO: 177895 - DNA, 684 bp, Artificial Sequence
  derived and/or modified sequence
atgggtcataggtcagatgttgaggccatcgcttcttcttctcccgcttcttggagttgtacagccctccgggctcctcagtcatgcctgcgcgcagctaccgtgcgtcctgtcacacttcaggccagagcggacagtcctactgtgcccgagcctgtccaccgaccccaggatccctggcacatccccggagtcccggaacccgttcataggccacaagatccatggcatattcctggcgtgcccgagcctgtgcatcggcctcaggacccatggcacatcccaggcgtccccgaacctgtacaccggcctcaggatccctggcacatacccggagttcctgagccagtccaccggcctcaggatccatggccttggctgcaattagtgccacccgctgagctggcttattgtctcctgatgctgctgctcgcacactgtatgaagcagcaggccagacctgggcaccctgatttcctgcatcgcgaagcatgggcctgcctcagcgcagccggtgtgagcccagccctggacagttgtttcggtcctcagcaggacctaggcagagtggagaggcgagcaaggcccgctctggtaggagccgacgccgcatgttgccccaggcacagcgtcctgagtctggtcgatataccctccggacaggtattgccccaggggcagtag

SEQ ID NO: 177896 - DNA, 411 bp, Artificial Sequence
  derived and/or modified sequence
atgatcctgaactggaagctgctgggcatcctggtgctgtgcctgcacaccagaggcatcagcggcagcgagggccaccccagccacccccccgccgaggacagagaggaggccggcagccccaccctgccccagggcccccccgtgcccggcgacccctggcccggcgccccccccctgttcgaggaccccccccccaccagacccagcagaccctggagagacctgcccgagaccggcgtgtggctgcccgagccccccagaaccgaccccccccagccccccagacccgacgacccctggcccgccggcccccagccccccgagaacccctggccccccgcccccgaggtggacaacagaccccaggaggagcccgacctggacccccccagagaggagtacagatag

SEQ ID NO: 177897 - DNA, 411 bp, Artificial Sequence
  derived and/or modified sequence
atgatcctgaactggaagctgctgggcatcctggtgctgtgcctgcacaccagaggcatcagcggcagcgagggccaccccagccacccccccgccgaggacagagaggaggccggcagccccaccctgccccagggcccccccgtgcccggcgacccctggcccggcgccccccccctgttcgaggaccccccccccaccagacccagcagaccctggagagacctgcccgagaccggcgtgtggccccccgagccccccagaaccgaccccccccagccccccagacccgacgacccctggcccgccggcccccagccccccgagaacccctggccccccgcccccgaggtggacaacagaccccaggaggagcccgacctggacccccccagagaggagtacagatag

SEQ ID NO: 177898 - DNA, 411 bp, Artificial Sequence
  derived and/or modified sequence
atgattctcaactggaaactacttggtattttggtcctctgtctacatacccgagggattagcggcagtgagggccatcccagccacccccctgcagaggatagggaagaggctggctcaccgaccctccctcagggccctccagtacctggggatccctggccgggtgccccaccactttttgaagatccccccccaacgaggcccagccggccgtggagagacctgcccgagaccggcgtgtggctcccagagcctccgagaaccgaccctccacagccacctcggccggacgatccctggcccgccgggccacagccacctgagaacccatggcctcccgcccccgaggtggacaacaggcctcaagaggagccggacctggatccccctcgagaagagtaccggtag

SEQ ID NO: 177899 - DNA, 411 bp, Artificial Sequence
  derived and/or modified sequence
atgattttgaattggaagcttctgggcatcctcgtcctgtgtctccacaccagagggattagcggctctgaaggtcatccgtcacacccccctgcggaagaccgcgaggaggctggatcccctaccctgccacaaggtccccctgtgcccggggatccttggcctggagctcctcctcttttcgaggacccacccccaaccaggccgtcccggccatggcgtgatctgccagaaacaggcgtgtggcccccagaaccacctagaactgatccgccccagccgccccgccctgacgatccgtggccagccggcccacagccccctgagaacccctggccccctgcacctgaagttgacaaccgaccgcaggaggagccagatctggacccccctcgggaagaatataggtag

SEQ ID NO: 177900 - DNA, 411 bp, Artificial Sequence
  derived and/or modified sequence
atgatcctgaactggaaactgttgggtatcctggtcttatgcttgcacaccaggggaattagcggttcagaagggcatccctcgcacccgcccgccgaagatcgggaggaagcgggaagtcctaccctaccacagggtccccctgtgcccggagacccctggcccggcgccccccctctgttcgaagatccgccaccaacacgcccaagtaggccctggcgtgacctgccagagactggcgtgtggccccctgaacccccaagaaccgaccccccccaaccacctagaccagacgatccttggcctgcgggaccacagccacccgagaacccctggccgcccgcccccgaagtggataatagaccccaagaggaacctgatctagatccacctagggaggagtaccgctag

SEQ ID NO: 177901 - DNA, 411 bp, Artificial Sequence
  derived and/or modified sequence
atgatccttaattggaagctgctcgggatattggttctgtgcctccatacccggggtatttctggatccgagggccatccatcccaccctcccgccgaggatcgagaggaagccgggagcccaactctgcctcaaggccccccagtccccggggatccctggcccggggccccgcccctttttgaagatcccccccccacgcggccatctagaccatggcgcgacctacctgaaacaggggtatggccacccgaaccgcctcggacagatcctcctcaacctccacggcccgatgacccttggccagctggaccccagccccccgaaaatccatggcctcccgcgcctgaagtggacaaccgtccccaggaagaacctgacctggatccacctagggaagagtacagatag

SEQ ID NO: 177902 - DNA, 411 bp, Artificial Sequence
  derived and/or modified sequence
atgatcctcaattggaagctgctcgggatccttgtcctctgtctgcacacgagagggatttcgggttctgagggacaccctagccaccctccggcagaagatagagaggaagctggttcccctacgctgcctcagggcccccctgtgccaggggacccatggccgggagctcccccactttttgaggaccctcctcctactaggccaagcaggccctggagggacctgcctgagactggtgtctggccgccagagcctccacgtaccgaccccccacagccacctagaccagatgatccttggcccgctggaccacagcctcctgagaatccctggccacctgcccccgaggtggacaaccgcccccaggaggagccagacctggacccaccacgggaggagtatcgttag

SEQ ID NO: 177903 - DNA, 411 bp, Artificial Sequence
  derived and/or modified sequence
atgattctgaattggaaactactagggatcctagttctctgtctccatacacggggcatctctggaagcgaggggcatccgtctcaccctcccgccgaggatagagaagaggcaggcagcccaactctgccccaagggccccccgtaccgggagatccttggcctggggcccctcctctatttgaagatcctcccccaaccagaccatctcgaccctggagggacctccccgagacgggagtttggccacccgagccccctcggaccgatccaccccagccccccaggccagatgatccctggccagccggacctcagcccccagagaatccctggcctccagctcctgaggtagacaataggccccaggaggaaccagatctggaccctccccgtgaggagtacaggtag

SEQ ID NO: 177904 - DNA, 411 bp, Artificial Sequence
  derived and/or modified sequence
atgatcctgaactggaagctgctgggcatcctggtgctgtgcctgcacacccggggcatcagcggcagcgagggccaccccagccaccccccagcagaagatcgggaggaggccggcagccccaccctgccccagggcccccctgtgcctggggacccctggccaggggccccacccctgtttgaggaccccccacccacccggcccagccggccctggagggacctgcctgagactggagtgtggctgcctgagccccccaggacagatcctccccagccccccaggccagatgacccctggccagctggcccccagcccccagagaacccctggcccccagcccctgaggtggacaaccggccccaggaggagccagacctggaccccccccgggaggagtacagatag

SEQ ID NO: 177905 - DNA, 411 bp, Artificial Sequence
  derived and/or modified sequence
atgatcctgaactggaagctgctgggcatcctggtgctgtgcctgcacacccggggcatcagcggcagcgagggccaccccagccaccccccagcagaagatcgggaggaggccggcagccccaccctgccccagggcccccctgtgcctggggacccctggccaggggccccacccctgtttgaggaccccccacccacccggcccagccggccctggagggacctgcctgagactggagtgtggcccccagagccccccaggacagatcctccccagccccccaggccagatgacccctggccagctggcccccagcccccagagaacccctggcccccagcccctgaggtggacaaccggccccaggaggagccagacctggaccccccccgggaggagtacagatag

SEQ ID NO: 177906 - DNA, 411 bp, Artificial Sequence
  derived and/or modified sequence
atgatcctgaactggaagctgctgggcatcctggtgctgtgcctgcatacacggggcattagcgggagcgagggccatcccagtcacccgccagcagaagacagggaggaggccggctcgcccaccctgccccagggccccccagtcccaggagatccatggccgggtgcccccccactgttcgaggaccctccccccactcgcccctcacggccttggcgagatctgcccgagacgggtgtgtggctccctgagccaccccgcacagacccgccacagccgcccagaccggatgatccttggcccgccggacctcagcccccagaaaacccctggcctcctgccccggaagtcgacaaccgaccccaggaggagcccgatctggatccgcctcgcgaagaatatcgatag

SEQ ID NO: 177907 - DNA, 411 bp, Artificial Sequence
  derived and/or modified sequence
atgatcctgaactggaagctgctgggcatcctggtgctgtgcctgcataccagaggcatcagcggctctgaaggacacccttcccacccgccggccgaagatcgcgaggaggccggcagcccaacactgccgcaaggtccccccgtgccaggcgatccatggcctggcgccccacccctgtttgaagaccctcccccaacaagaccaagcaggccatggagggacctgccggagaccggagtttggccacccgaacctcctcggaccgatcctccccaaccaccccgcccagacgatccatggcctgccggaccacagccgccagaaaatccttggcccccagcccccgaggtagataacagaccacaggaggagcccgacctggacccccctagagaggaataccgctag

SEQ ID NO: 177908 - DNA, 411 bp, Artificial Sequence
  derived and/or modified sequence
atgatcctgaactggaagctgctgggcatcctggtgctgtgcctgcacacgcgcggtatttcaggcagcgaaggccaccccagccatcctccagctgaagaccgggaggaagccggcagccccactttacctcagggtcccccagttcctggcgacccttggcctggagcccccccgttgttcgaagatccaccccctacccggcctagcagaccatggcgggatctaccagagacaggagtctggcctcctgagccacctaggacagatccccctcagcctcctcgtcctgatgacccctggcctgccggaccccagcctcctgagaacccttggccgcctgccccagaagtggacaatcgaccacaggaggaacccgatctggaccctcctcgcgaggagtacaggtag

SEQ ID NO: 177909 - DNA, 411 bp, Artificial Sequence
  derived and/or modified sequence
atgatcctgaactggaagctgctgggcatcctggtgctgtgcctgcataccagaggaatctctggctctgaggggcatccttctcatccacctgccgaggaccgagaggaagctggttcgcctacactgccgcagggcccaccggtgcctggcgatccctggccaggggcgcctcccctgttcgaagatcccccgcccaccaggcccagccggccctggcgcgatttaccagaaacaggcgtctggcctccagagcccccccgcaccgatccaccacagccaccccgtcccgacgatccatggcctgccggcccacaacctcccgaaaacccatggccgccggccccggaagttgataacaggccacaggaggagcctgatttagatcctccgagagaagagtaccgttag

SEQ ID NO: 177910 - DNA, 411 bp, Artificial Sequence
  derived and/or modified sequence
atgatcctgaactggaagctgctgggcatcctggtgctgtgcctgcacactcgcggaatatctgggagcgagggccacccctcacatcctccagccgaggaccgagaagaggctggctcccctaccctgccgcaaggacctcccgtgccaggcgatccctggcctggcgcccctcctttgtttgaagatcccccccccacgaggccttcccgcccatggagagacctgcctgaaactggggtgtggccccccgaacctccccggaccgatcccccgcagccccctcgtcctgatgacccttggccggcaggtcctcagccgcctgagaacccctggccgccagcccccgaggtagacaatcgacctcaggaggagccagaccttgacccaccacgggaagagtaccgctag

SEQ ID NO: 177911 - DNA, 411 bp, Artificial Sequence
  derived and/or modified sequence
atgatcctgaactggaagctgctgggcatcctggtgctgtgcctgcatactcgaggaattagcggtagcgaggggcatcccagtcacccaccggcagaggaccgcgaagaggccggaagccctacactgcctcaaggcccgccggtaccaggagacccttggcccggcgctccgcctctctttgaagacccccctcctacacggccgtccaggccatggcgtgaccttcccgaaactggcgtgtggcccccagaacctcctaggacggaccccccacagccaccacgaccggatgatccatggccagccggtccccagcctcctgagaatccatggcctcccgcacctgaggtggataaccgaccccaagaagagccagatctggacccaccccgtgaggagtatcgatag

SEQ ID NO: 177912 - DNA, 411 bp, Artificial Sequence
  derived and/or modified sequence
atgatactcaattggaaactgttaggtatcctagttttgtgcctccacaccagagggatctccggcagcgaaggtcaccccagccacccacccgcagaagacagagaggaggcaggctcccccacccttcctcaggggccacctgtaccaggggacccttggcccggtgccccacctctgttcgaagacccacctccaacacggcctagtaggccttggcgcgacctgccggagactggtgtatggctccccgagcctcccaggaccgacccgccacagcccccacgtcctgacgacccatggcctgccggacctcagcctcccgaaaacccctggccgccagcacccgaggtggacaatcggccacaagaagagcccgatctggatcccccacgggaagaatacaggtag

SEQ ID NO: 177913 - DNA, 411 bp, Artificial Sequence
  derived and/or modified sequence
atgatactgaattggaaactgctagggatcctggtgttgtgtctgcacactcgtggaatctctggatcagagggccatcccagccaccctccagccgaggaccgggaggaagccggatcacccacccttcctcagggtccccctgtgccaggtgacccctggcctggggctccccctctgtttgaagaccccccaccgaccaggccaagcagaccttggagggacctcccagagactggagtttggccccctgagccccctcgaacggatcctccacagccaccacgacctgatgacccatggcctgccggtcctcagcccccagagaatccctggccaccagcccctgaggtggacaacaggccccaggaggaacccgacttagatccgcctcgggaagagtaccgttag

SEQ ID NO: 177914 - DNA, 411 bp, Artificial Sequence
  derived and/or modified sequence
atgatattgaactggaagctcttgggcatcctggtcctctgtctccatacgaggggaatcagcggcagtgaaggccaccctagtcacccccctgcagaagacagagaagaggctgggtctccgaccctgccacagggacccccagtgccgggagacccctggccaggggctccccctttgtttgaggatccaccccctaccagaccctctcgcccatggagagacctgccggaaactggcgtctggccccctgaacctccaagaactgatccccctcagcctcctcgaccagacgacccctggcctgcaggaccccagccccctgagaatccttggcctcccgctcctgaagtggacaatcggcctcaggaggagcccgacctggacccacccagagaggaataccgctag

SEQ ID NO: 177915 - DNA, 411 bp, Artificial Sequence
  derived and/or modified sequence
atgattcttaattggaagctcttagggattttggtgctgtgcctccacacacgcggtatttccggtagcgagggccacccttcgcacccccctgccgaggaccgcgaggaggctgggtcacccaccttaccccagggcccacctgtacctggagacccctggccaggcgctcccccactcttcgaagatcctccacccacacgccctagcagaccttggcgcgatctcccagagaccggggtttggccaccagagcctccacgaactgatcctcctcagcccccacgcccagatgacccatggccagctggccctcagccacctgagaacccgtggccccctgccccagaggttgacaacaggcctcaggaggaacccgacctggaccctccaagagaggaataccgttag

SEQ ID NO: 177916 - DNA, 411 bp, Artificial Sequence
  derived and/or modified sequence
atgattctcaactggaaactcctggggatcttggttctgtgtctgcacactcggggtatcagtggctcagagggtcatccatcccatccacctgcagaggaccgagaggaagctggctctccgactctgcctcagggccctccagtgccaggcgatccctggcccggagcaccccctctttttgaggaccctcctccaacacgcccttcacggccttggagagatctcccagagacgggagtgtggcctcctgaaccccctcggactgaccctcctcagccaccacgtccagacgatccctggcctgccggtccacaaccacccgaaaatccctggcctccagctccggaggtcgacaatagaccccaggaagagcctgacctggatcctcccagagaagagtacagatag

SEQ ID NO: 177917 - DNA, 411 bp, Artificial Sequence
  derived and/or modified sequence
atgattcttaactggaaattgctgggtattctggtcctgtgtttacatacaagggggatctctggatccgaaggccatccatcacatccacccgcagaggatcgggaggaagcaggctcaccaacactcccccagggccctccagtgccaggcgacccttggcccggagcacctccactcttcgaggatcctcctcctacacgtccatccaggccctggagggacctgcctgaaaccggggtctggcccccagaaccacctcggaccgatcccccacagcctccaaggccagacgatccatggccagccggaccccagcctccggaaaatccgtggccccctgctcccgaagtggataataggccgcaagaagaacccgatctcgatccaccacgggaggaataccgctag

SEQ ID NO: 177918 - DNA, 411 bp, Artificial Sequence
  derived and/or modified sequence
atgatactcaattggaaactcctaggcattttggtgctgtgtcttcacaccagagggatttctggatctgaaggacaccccagtcaccccccagcggaagatagagaggaagcgggatctccgactttgcctcaaggcccaccggttccaggagacccctggcctggcgcccctcccttatttgaagaccctcctcccactcgccccagtagaccttggagagaccttcctgagaccggcgtgtggctgcctgaacctccacgaactgatccaccacaacctccccgaccagatgacccctggcccgccgggcctcagcccccagagaatccatggccacctgcaccagaagtggataataggccccaggaggagccggatttggacccccctagagaggagtacagatag

SEQ ID NO: 177919 - DNA, 411 bp, Artificial Sequence
  derived and/or modified sequence
atgatactcaattggaaactcctaggcattttggtgctgtgtcttcacaccagagggatttctggatctgaaggacaccccagtcaccccccagcggaagatagagaggaagcgggatctccgactttgcctcaaggcccaccggttccaggagacccctggcctggcgcccctcccttatttgaagaccctcctcccactcgccccagtagaccttggagagaccttcctgagaccggcgtgtggctgcctgaacctccacgaactgatccaccacaacctccccgaccagatgacccctggcccgcaggaccccaacccccagaaaacccatggcctccagcccccgaagttgacaatcggccccaggaagagcccgacctcgaccccccgcgcgaagagtataggtag

SEQ ID NO: 177920 - DNA, 1150 bp, Artificial Sequence
  derived and/or modified sequence
gtgattacggagatgccaagtgggtattgactgctccaggatgtggatggagggtgtgaaaaccagggtggggtgacgcaggctctgggtcatgatagggagagcaggcagctgggtcctgggctggaggactaaaataagggacgccaccttcaggggtgacacatcagcccaggccttcccaacgggtttgaccagttctgttctgatggtattcctgtgccactgggctggtccctcctccactcctcccctataaagcctcttggggttcccaggcacccagactcagcccaccccagctttgggggccagtacatagccatgatcctcaactggaagctcctggggatcctggtcctttgcctgcacaccagaggcatctcaggcagcgagggccacccctctcacccacccgcagaggaccgagaggaggcaggctccccaacattgcctcagggccccccagtccccggtgacccttggccaggggcaccccctctctttgaagatcctccgcctacccgccccagtcgtccctggagagacctgcctgaaactggagtctggctccctgaaccgcctagaacggatcctcctcaacctccccggcctgacgacccttggccggcaggaccccagcccccagaaaacccctggcctcctgcccctgaggtggacaaccgacctcaggaggagccagacctagacccaccccgggaagagtacagataatggagtcccctcagccgttctgttcccaggcatctccaggcacccacgccctctccaccctctgattccccgtgaattcttcccaatttagcctgtctccttaaacctcttcctcattccctcggttttattctgaacccgtaaggtggtgttctcaatatttcctgtcccctcctgagatccatacttagtcctcacatcgcccgttttttcctctgacagcctaagcctactctcctacctcgcctccaggcctcggccgcacctacctcccacccggtcttcctgcccgcgcgatcgctggggcagggctatggtactgtgttcccttctgccacctggtggccggcggcaggaactatcagtagacagctgctgcttccatgaaacggaaaaataaaaatcatgttttctt

SEQ ID NO: 177921 - DNA, 1151 bp, Artificial Sequence
  derived and/or modified sequence
gtgattacggagatgccaagtgggtattgactgctccagggtgtggatggagggtgtgaaaaccagggtggggtgacgcaggctctgggtcatgatagggagagcaggcagctgggtcctgggctggaggactaaaataagggacgccaccttcaggggtgacacatcagcccaggccttcccaacgggtttgaccagttctgttctgatggtattcctgtgccactgggctggcccctcctccactcctcccctataaagcctcttggggttcccaggcacccagactcagcccaccccagctttgggggccagtacatagccatgatcctcaactggaagctcctggggatcctggtcctttgcctgcacaccagaggcatctcaggcagcgagggccacccctctcacccacccgcagaggaccgagaggaggcaggctccccaacattgcctcagggccccccagtccccggtgacccttggccaggggcaccccctctctttgaagatcctccgcctacccgccccagtcgtccctggagagacctgcctgaaactggagtctggccccctgaaccgcctagaacggatcctcctcaacctccccggcctgacgacccttggccggcaggaccccagcccccagaaaacccctggcctcctgcccctgaggtggacaaccgacctcaggaggagccagacctagacccaccccgggaagagtacagataatggagtcccctcagccgttctgttcccaggcatctccaggcacccacgccctctccaccctctgattccccgtgaattcttcccaatttagcctatctccttaaacctcttcctcattccctcggttttattctgaacccgtaaggtggtgttctcaatatttcctgtcccctcctgagatccatacttagtcctcacatcgcccgttttttcctctgacagcctaagcctactctcctacctcgcctccaggcctcggccccacctacctcccacccggtcttcctgcccgcgcgatcgctggggcagggctatggtactgtgttcccttctgccacctggtggccggcggcaggaactatcagtagacgctgctgcttccatgaaacggaaaaataaaaatcatgttttcttaa

SEQ ID NO: 177922 - DNA, 1152 bp, Artificial Sequence
  derived and/or modified sequence
gtgattacggagatgccaagtgggtattgactgctccagggtgtggatggagggtgtgaaaaccagggtggggtgacgcaggctctgggtcatgatagggagagcaggcagctgggtcctgggctggaggactaaaataagggacgccaccttcaggggtgacacatcagcccaggccttcccaacgggtttgaccagttctgttctgatggtattcctgtgccactgggctggtccctcctccactcctcccctataaagcctcttggggttcccaggcacccagactcagcccaccccagctttgggggccagtacatagccatgatcctcaactggaagctcctggggatcctggtcctttgcctgcacaccagaggcatctcaggcagcgagggccacccctctcacccacccgcagaggaccgagaggaggcaggctccccaacattgcctcagggccccccagtccccggtgacccttggccaggggcaccccctctctttgaagatcctccgcctacccgccccagtcgtccctggagagacctgcctgaaactggagtctggccccctgaaccgcctagaacggatcctcctcaacctccccggcctgacgacccttggccggcaggaccccagcccccagaaaacccctggcctcctgcccctgaggtggacaaccgacctcaggaggagccagacctagacccaccccgggaagagtacagataatggagtcccctcagccgttctgttcccaggcatctccaggcacccacgccctctccaccctctgattccccgtgaattcttcccaatttagcctatctccttaaacctcttcctcattccctcggttttattctgaacccgtaaggtggtgttctcaatatttcctgtcccctcctgagatccatacttagtcctcacatcgcccgttttttcctctgacagcctaagcctactctcctacctcgcctccaggcctcggccccacctacctcccacccggtcttcctgcccgcgcgatcgctggggcagggctacggtactgtgttcccttctgccacctggtggccggcggcaggaactatcagtagacagctgctgcttccatgaaacggaaaaataaaaatcatgttttcttaa

SEQ ID NO: 177923 - DNA, 1152 bp, Artificial Sequence
  derived and/or modified sequence
gtgattacggagatgccaagtgggtattgactgctccagggtgtggatggagggtgtgaaaaccagggtggggtgacgcaggctctgggtcatgatagggagagcaggcagctgggtcctgggctggaggactaaaataagggacgccaccttcaggggtgacacatcagcccaggccttcccaacgggtttgaccagttctgttctgatggtattcctgtgccactgggctggcccctcctccactcctcccctataaagcctcttggggttcccaggcacccagactcagcccaccccagctttgggggccagtacatagccatgatcctcaactggaagctcctggggatcctggtcctttgcctgcacaccagaggcatctcaggcagcgagggccacccctctcacccacccgcagaggaccgagaggaggcaggctccccaacattgcctcagggccccccagtccccggtgacccttggccaggggcaccccctctctttgaagatcctccgcctacccgccccagtcgtccctggagagacctgcctgaaactggagtctggccccctgaaccgcctagaacggatcctcctcaacctccccggcctgacgacccttggccggcaggaccccagcccccagaaaacccctggcctcctgcccctgaggtggacaaccgacctcaggaggagccagacctagacccaccccgggaagagtacagataatggagtcccctcagccgttctgttcccaggcatctccaggcacccacgccctctccaccctctgattccccgtgaattcttcccaatttagcctatctccttaaacctcttcctcattccctcggttttattctgaacccgtaaggtggtgttctcaatatttcctgtcccctcctgagatccatacttagtcctcacatcgcccgttttttcctctgacagcctaagcctactctcctacctcgcctccaggcctcggccgcacctacctcccacccggtcttcctgcccgcgcgatcgctggggcagggctatggtactgtgttcccttctgccacctggtggccggcggcaggaactatcagtagacagctgctgcttccatgaaacggaaaaataaaaatcatgttttcttaa

SEQ ID NO: 177924 - DNA, 1152 bp, Artificial Sequence
  derived and/or modified sequence
gtgattacggagatgccaagtgggtattgactgctccagggtgtggatggagggtgtgaaaaccagggtggggtgacgcaggctctgggtcatgatagggagagcaggcagctgggtcctgggctggaggactaaaataagggacgccaccttcaggggtgacacatcagcccaggccttcccaacgggtttgaccagttctgttctgatggtattcctgtgccactgggctggcccctcctccactcctcccctataaagcctcttggggttcccaggcacccagactcagcccaccccagctttgggggccagtacatagccatgatcctcaactggaagctcctggggatcctggtcctttgcctgcacaccagaggcatctcaggcagcgagggccacccctctcacccacccgcagaggaccgagaggaggcaggctccccaacattgcctcagggccccccagtccccggtgacccttggccaggggcaccccctctctttgaagatcctccgcctacccgccccagtcgtccctggagagacctgcctgaaactggagtctggccccctgaaccgcctagaacggatcctcctcaacctccccggcctgacgacccttggccggcaggaccccagcccccagaaaacccctggcctcctgcccctgaggtggacaaccgacctcaggaggagccagacctagacccaccccgggaagagtacagataatggagtcccctcagccgttctgttcccaggcatctccaggcacccacgccctctccaccctctgattccccgtgaattcttcccaatttagcctatctccttaaacctcttcctcattccctcggttttattctgaacccgtaaggtggtgttctcaatatttcctgtcccctcctgagatccatacttagtcctcacatcgcccgttttttcctctgacagcctaagcctactctcctacctcgcctccaggcctcggccccacctacctcccacccggtcttcctgcccgcgcgatcgctggggcagggctacggtactgtgttcccttctgccacctggtggccggcggcaggaactatcagtagacagctgctgcttccatgaaacggaaaaataaaaatcatgttttcttaa

SEQ ID NO: 177925 - DNA, 696 bp, Artificial Sequence
  derived and/or modified sequence
atggccaagtgggtgcccgccctgctgctgagaagagtgcccctgttcagcctgagattcagacccgccagcagcaccttcctgcccgtgctggccgccaccgagcccgccgtgagcgtgcccagcggcgacctgagcatgcccgtgaagaccagagccgagggcgaggacgacggcttcggcgaggccggcgaccccagaagactgctggagagaccctggagattcagaggctgcctgcccggcaagggcaacagagacgtgggcttcgagggcaccgagggccccaccagcaccagacccgagtgggtgtggagctgcagatgctgcctgggctgcagagccagcaccagagagagagtgaccagccccgtgagagccgccggcccccagcccagattcaccgacagagagaccgaggccgccgccggcaccctggcccacatgggcttcgccccccccaccagcttcagccacttcaccgaccaggagctgagagactgcagcagcctggagtgcctgggcgtggtggagggcgacccccacgtgctgtgcagcaccctgagcctgagcagacccagccccagcgccaccctgaccctgctgctggccagcagctgcctgctggcccccgccccccccagcttcatcctgctgctgttcaccctgatcgcccccgacctgccccacagctag

SEQ ID NO: 177926 - DNA, 636 bp, Artificial Sequence
  derived and/or modified sequence
atgctaaggcagtcatgctcatttccagtgacatcactgccggctcttggcggtgtctgcggcagggagggcgctggtgccgaggttcctccagccgcatgtggatgcgaggggcgagacccagacaccgagcggagctgcggcagatcttctaccgggggttgtagcccctgctccggacccggacccagttctcctaggacctccagaggagcccttagcccctccctggggagactgtttcctcatctgcaagttgtgatcaagcttcggatccagctcgctccagctgtgcacctcgcactccctacttgttctctgttgaccagcagccccccattggagggctgttgccataggctgaatgaagaggcagaggtacagaggggttttcgccctatcgctgtggaattggagtttgagaaccaaccccttggcgcagagacgcggctgcggaatggtaggcgggctggtgtcaagaggagtgagggcaggggccaagtacgccctgggcaggtcagatctacgggacccgagggaggtctcacaagaatggagcgaaaagccgcaaggttgcagtgggattctggcagcatcaagatgtctgagaacgagcagctttgggaagagccttag

SEQ ID NO: 177927 - RNA, 411 nt, Artificial Sequence
  derived and/or modified sequence
augauacucaauuggaaacuccuaggcauuuuggugcugugucuucacaccagagggauuucuggaucugaaggacaccccagucaccccccagcggaagauagagaggaagcgggaucuccgacuuugccucaaggcccaccgguuccaggagaccccuggccuggcgccccucccuuauuugaagacccuccucccacucgccccaguagaccuuggagagaccuuccugagaccggcguguggcugccugaaccuccacgaacugauccaccacaaccuccccgaccagaugaccccuggcccgccgggccucagcccccagagaauccauggccaccugcaccagaaguggauaauaggccccaggaggagccggauuuggaccccccuagagaggaguacagauag

SEQ ID NO: 177928 - RNA, 411 nt, Artificial Sequence
  derived and/or modified sequence
augauacucaauuggaaacuccuaggcauuuuggugcugugucuucacaccagagggauuucuggaucugaaggacaccccagucaccccccagcggaagauagagaggaagcgggaucuccgacuuugccucaaggcccaccgguuccaggagaccccuggccuggcgccccucccuuauuugaagacccuccucccacucgccccaguagaccuuggagagaccuuccugagaccggcguguggcugccugaaccuccacgaacugauccaccacaaccuccccgaccagaugaccccuggcccgcaggaccccaacccccagaaaacccauggccuccagcccccgaaguugacaaucggccccaggaagagcccgaccucgaccccccgcgcgaagaguauagguag

SEQ ID NO: 177929 - protein, 325 aa, Artificial Sequence
  derived and/or modified sequence
MQGRVAGSCAPLGLLLVCLHLPGLFARSIGVVEEKVSQNLGTNLPQLGQPSSTGPSNSEHPQPALDPRSNDLARVPLKLSVPASDGFPPAGGSAVQRWPPSWGLPAMDSWPPEDPWQMMAAAAEDRLGEALPEELSYLSSAAALAPGSGPLPGESSPDATGLSPKASLLHQDSESRRLPRSNSLGAGGKILSQRPPWSLIHRVLPDHPWGTLNPSVSWGGGGPGTGWGTRPMPHPEGIWGINNQPPGTSWGNINRYPGGSWGNINRYPGGSWGNINRYPGGSWGNIHLYPGINNPFPPGVLRPPGSSWNIPAGFPNPPSPRLQWG

SEQ ID NO: 177930 - protein, 325 aa, Artificial Sequence
  derived and/or modified sequence
MQGRVAGSCAPLGLLLVCLHLPGLFARSIGVVEEKVSQNFGTDLPQLGQPSSTGPSNSEHPQPALDPRSNDLARVPLKLSVPPSDGFPPAGGSAVQRWPPSWGLPAMDSWPPEDPWQMMAAAAEDRLGEALPEELSYLSSAAALAPGSGPLPGESSPDATGLSPEASLLHQDSESRRLPRSNSLGAGGKILSQRPPWSLIHRVLPDHPWGTLNPSVSWGGGGPGTGWGTRPMPHPEGIWGINNQPPGTSWGNINRYPGGSWGNINRYPGGSWGNINRYPGGSWGNIHLYPGINNPFPPGVLRPPGSSWNIPAGFPNPPSPRLQWG

SEQ ID NO: 177931 - protein, 325 aa, Artificial Sequence [sequence omitted]

SEQ ID NO: 177932 - DNA, 978 bp, Artificial Sequence
  derived and/or modified sequence
atgcagggtagagtggcgggtagctgcgcccctctcggcctgctgttggtgtgtcttcatctgcctggattattcgctcgctccattggggtcgttgaagaaaaggttagccagaatctggggacaaacctgccacaactggggcagcctagctcgaccggtcccagtaattctgaacatccacagcctgccctggatcccagaagcaatgatctggctagagtgcctctgaaactgtcggtcccagcatctgacggctttccccctgcaggaggatccgcagttcagaggtggcccccatcctggggcttgcctgccatggactcctggccacccgaggacccctggcaaatgatggctgcagcggcagaggacagactcggcgaggccttacctgaggaactttcatatctttcaagcgccgctgccctggctcctggatccgggccactgcctggggagtcttcgccagacgcaactggtttatcaccgaaggcttctctgcttcaccaggattctgaaagccggagattgccacgctcaaactccctgggggcagggggaaagattctctcccagcgtcctccctggagccttattcacagggtgcttccggaccacccttgggggaccctaaatcccagcgtgagttggggcggtggaggccctgggaccgggtggggcacaagacccatgccacatccggaaggcatctggggcatcaacaaccagcctccaggcacctcgtggggcaacatcaacaggtatcccggaggaagttggggcaacatcaacaggtatccagggggaagctggggaaatattaatcgctatccaggtggatcatggggaaatatccacttgtaccccggaattaacaaccccttccctccgggagtactgcggccacccggatcttcgtggaatattccggctggcttcccaaaccccccatctcccagactgcaatggggctag

SEQ ID NO: 177933 - DNA, 978 bp, Artificial Sequence
  derived and/or modified sequence
atgcaggggcgtgtcgccggtagctgcgccccactggggttgttgcttgtctgcctgcaccttcccggactgtttgcccgatccatcggcgtggtggaggaaaaagttagccagaatctcgggaccaatctgccgcagctgggccagccaagcagcaccggccctagcaatagcgaacacccacagccggcactggacccaagaagcaacgatctggctcgcgtgcccttgaagctgtctgttcccgcttccgatggattcccccctgccggagggagtgccgtgcagcggtggcccccttcctgggggctccctgcgatggattcttggccgcctgaggatccctggcagatgatggccgctgctgccgaagatagactcggcgaggccctgcctgaggaacttagttatttgtcttcagccgcagcattggcacctggctccggccctcttccgggagaaagctctcccgacgcaaccggtctcagcccgaaagccagcttgctccaccaggactctgagagcagacggctgcctcggtcaaactccctaggcgcaggtggtaagatcctgtcccagaggcccccttggtcacttattcacagagtgctgccggatcacccctggggaacccttaacccatccgtttcttgggggggaggcggtccaggaacgggatgggggacccggcctatgccccaccccgaaggaatctgggggattaataaccagccccctggcaccagctggggaaacattaaccgatatccaggcggatcgtggggcaacataaatcgatacccaggtggatcttggggcaatattaatcgctacccaggtggcagctggggaaatatccacttgtatcccggaatcaacaatccttttccgccaggggtgctccggcctccagggagctcctggaacataccagccggattcccaaacccccctagtcccaggctgcagtgggggtag

SEQ ID NO: 177934 - DNA, 978 bp, Artificial Sequence
  derived and/or modified sequence
atgcagggcagagtggctggatcttgcgctcctctgggtctccttctggtctgtcttcatttgcccggactcttcgcccgaagcataggcgtggtcgaggaaaaagtgagccaaaacttaggcaccaacctcccacagcttggccagccatcaagcaccggtcccagcaactctgaacacccccaacctgcactggatccaaggtccaacgatctggccagagtgccattgaaactgtctgtcccagcctcagatgggttcccccctgccggaggatctgcagtgcagcgctggcccccttcctggggcctgcccgctatggactcctggcctccagaggacccatggcagatgatggcagccgctgcagaggataggctgggtgaggcactccccgaagaactctcttacctgtcatccgctgccgctctggccccagggtccggccctctgcccggtgaatcaagtccagatgcgactgggttgagccccaaagccagcctcctgcatcaggactcagaaagccggaggctgcctcgaagcaattctcttggtgcaggaggaaagatactcagccagaggcctccgtggtcactgatccaccgggtgctgcccgatcacccctgggggaccctgaaccctagcgtgagctggggtggcggaggacctggtaccggctggggcactaggccaatgccccaccctgaaggtatttggggtattaataaccagccacctgggacgagctggggaaatatcaaccgttaccccggaggcagctggggaaatatcaacagataccctggtgggtcttggggaaatattaacagataccccggaggctcttggggcaacatacacttgtaccccggtattaacaatccatttccgccaggggtactgaggccacctggatccagctggaatatccctgcaggcttcccaaacccgccatctcccagacttcagtggggatag

SEQ ID NO: 177935 - DNA, 978 bp, Artificial Sequence
  derived and/or modified sequence
atgcaaggaagggttgccggaagctgtgccccacttgggctgctgctcgtgtgtttacatttgcccggactgtttgctcggtcaatcggtgtcgtcgaggaaaaggtttcacagaacctcggcacgaatctaccccagcttggccagccctcatcgactggaccctccaattctgaacatcctcagcctgccctggatcccagatctaatgacctcgcccgagttcccttaaaactctccgtgcccgctagtgacggttttccgccagccggtggatcggctgtgcagcggtggccaccctcttggggtttgcccgctatggacagctggcccccagaagacccgtggcagatgatggccgctgcagccgaagacagattgggcgaggcgctaccagaggaactgtcatatctctcttcagcagcagcactcgcgccaggaagcggaccacttcccggagaaagcagcccggatgcaacgggcctctcgcctaaagctagcctgttgcaccaggacagtgaaagtagacgcctgccaagaagcaatagccttggcgctgggggtaaaatcctgtctcagcgcccaccatggtctctgattcaccgcgtgctcccagaccatccctggggcaccttaaacccaagtgtcagctggggcggaggtggcccaggcaccggatggggaacacggccaatgcctcatcccgagggcatctgggggattaacaaccagcccccaggcacctcatggggcaatataaataggtaccctgggggtagttggggaaacatcaaccggtacccgggaggatcgtggggaaacattaacaggtatccaggaggttcctggggtaacatacacttataccccggaattaacaatccttttccgcctggcgtgctgcggccacccggatcctcttggaatatcccagcgggttttcccaatcccccaagccctagactgcaatggggatag

SEQ ID NO: 177936 - DNA, 978 bp, Artificial Sequence
  derived and/or modified sequence
atgcaagggcgagttgccgggtcttgtgctccgctgggtcttctgttggtgtgtttgcacttgcccggactcttcgctaggtctatcggggtggtggaagagaaggtgtctcagaatctaggcaccaatctgcctcagttaggtcagccttcctcaacaggcccatcaaattcagaacacccacaacccgccctggacccacgctccaacgatctggcccgggtgccactcaaactcagtgtgcctgcgtctgacgggtttcccccagcaggaggctccgccgtacagcgctggccacccagttggggcctgccagcgatggactcttggccgcccgaagatccctggcaaatgatggccgccgcggctgaggatagactcggggaagctctgccggaggagttatcgtatctgagctcagccgccgctcttgccccaggatctggccccctccccggagaatcctcacctgacgccaccggactgtctccaaaggctagtcttcttcaccaggattctgaaagcagacggcttcctcgttcaaacagcttaggtgccggcggtaaaattctgtctcagcgcccaccctggtccctgattcatagagtgctccccgatcacccctggggcacattaaatccaagtgtgagttggggaggcggcgggccagggacaggttggggcacaaggccgatgcctcaccctgaagggatttggggaatcaacaaccagccacctggtacctcatgggggaacatcaacagatatcctggcgggtcctggggaaacatcaacaggtacccagggggttcctggggcaatattaatcgatatccaggcggaagctggggtaacatacacctctatcctggcatcaacaacccgttccctcctggcgtcctgcgtccaccagggtcttcttggaatattcctgccggcttcccaaacccaccctcacctagattgcagtggggctag

SEQ ID NO: 177937 - DNA, 978 bp, Artificial Sequence
  derived and/or modified sequence
atgcaaggacgcgttgctggctcatgcgccccgctgggcttgttactggtgtgcctacatctccccggactgtttgctagatccattggagtggtcgaagaaaaggtgtctcagaaccttggcaccaacctgcctcagctgggccagcctagcagcaccgggccctcaaacagtgaacacccccagcctgcccttgacccccgctccaatgacctggcccgggtacccctcaaactgagcgtgccagcttctgatggatttccacctgccggcggatccgcagtgcaacgctggccacctagttgggggttgcccgctatggattcgtggcctccagaggacccatggcaaatgatggcagccgctgccgaggaccgtcttggcgaggcgcttcctgaggagctgtcctacttaagttctgccgctgccctagcccccggatctggccccctgccgggcgagtcaagccctgatgccactgggctctctcctaaagcttccttactgcaccaggatagcgagtcccgacgcttgcctcggtcaaattcattgggggctggcggaaaaatactgtcccagcgtcccccctggagcctgattcaccgagtcttaccagatcacccttggggcaccctcaatcctagtgtgagctggggcggcggcgggcctggcaccggttggggaacccgcccgatgccacatccagagggcatatgggggatcaacaaccagccacccggtacatcatggggaaacataaaccggtatcccggtggatcttggggaaacataaaccgatatcctggcggcagttggggcaatattaatcggtatcctggaggaagctggggaaacatccatttataccctggcatcaacaaccctttcccccccggagttcttcgaccccctggttcctcttggaacatcccagctggattccctaacccgccaagtccccggctgcaatggggctag

SEQ ID NO: 177938 - DNA, 978 bp, Artificial Sequence
  derived and/or modified sequence
atgcaggggcgcgtcgctggctcgtgtgcacccctgggcctcctcctagtgtgtctgcaccttcccggcctgtttgcccgctcaattggggtagtcgaggagaaggtgagccagaacttgggaaccaatctgccccagctgggccagccatccagtacgggcccttcaaattccgagcaccctcagcctgcgctagatcctagaagcaacgatctcgctagagtgccattgaaactgtccgtgcctgcctctgatggcttcccacctgctggaggaagtgctgttcagagatggccaccctcctggggcctgcctgcaatggacagttggcctcccgaagacccctggcagatgatggctgccgcggccgaagaccgcttaggcgaagcccttcccgaagagctctcatatttatcctcagccgccgcactggcacctgggagcggcccccttccaggagaaagctcccctgatgctactggactgtcccctaaggctagtctcctccatcaagattccgagtcgcggagactgccacgatctaattccctcggtgcaggggggaaaatactctcccagaggccaccgtggagcttaattcatcgtgttcttcccgaccatccttggggaaccctgaacccttcggtgtcatggggcggcggagggcccggaacaggctgggggacccgtccgatgccccaccctgaaggaatttgggggatcaacaatcagcctcccggcacctcctggggcaacataaatagataccctggaggatcttggggtaacattaacagatatccaggtggctcatggggcaatatcaatagatacccaggtggctcctgggggaatatccacctctaccctggaataaataatccgttcccacccggggtccttcggccaccaggatcaagctggaatatccctgctggatttcctaacccaccttcccctagattacagtgggggtag

SEQ ID NO: 177939 - DNA, 978 bp, Artificial Sequence
  derived and/or modified sequence
atgcagggacgggtggctggtagttgcgctcctcttggcttattgctagtgtgcttacacctgcccggtttgtttgcccggtcgataggagtggtggaggaaaaagtatcccagaatttaggaacaaacctcccacagcttgggcagccttctagcacaggaccttctaacagcgagcacccgcagccagcactggatccacgatcaaacgaccttgcaagagtgccactcaagctgagcgtccccgcttcggacggtttcccacctgcaggaggcagcgcggttcaacggtggccaccgtcatggggattgccagcgatggattcctggccccctgaggatccatggcagatgatggccgccgctgccgaagaccggctcggagaggccctcccagaggaactgtcatacctatcgtcagccgccgccctggctccaggaagtggacctttacccggcgagagcagccctgacgcgacgggcctgtccccaaaagcctctctgttgcatcaagattcagaatcccggagactccccaggtcaaattctttaggggctggaggtaaaatcttgtcgcagaggccaccctggagtcttatccaccgagtgctcccagaccatccttgggggacgctgaacccttccgtttcttggggagggggagggcccggtactgggtgggggacgagacccatgccacacccagaaggcatatggggaattaacaatcagcccccaggcacttcttggggtaacatcaacaggtaccccgggggtagttgggggaacataaatcggtatccggggggatcctggggaaacattaatagatacccgggcggtagctgggggaatatccatctgtatcctggaatcaacaatcctttccccccaggggtgcttcgtcctcctggctcatcttggaatattccagcggggtttcctaaccctccaagtcctagactccaatggggatag

SEQ ID NO: 177940 - DNA, 978 bp, Artificial Sequence
  derived and/or modified sequence
atgcagggacgagtcgcaggcagctgtgcgcctttgggcctgcttctggtatgtcttcacctgcccggtctgttcgcgaggtctataggagtagtagaggagaaggtctcgcagaaccttggcacgaatctcccccagctgggacagccctctagtaccggcccctctaactcagagcacccacagcccgcccttgacccacgcagtaacgatcttgccagagtacccctgaaactttccgttccagccagtgacgggttccctcccgcaggaggctctgcggttcagcgttggccccctagttggggcctgccagcgatggactcttggccgcccgaagatccctggcaaatgatggccgccgcggctgaggatagactcggggaagctctgccggaggagttatcgtatctgagctcagccgccgctcttgccccaggatctggccccctccccggagaatcctcacctgacgccaccggactgtctccaaaggctagtcttcttcaccaggattctgaaagcagacggcttcctcgttcaaacagcttaggtgccggcggtaaaattctgtctcagcgcccaccctggtccctgattcaccgagtccttcctgatcacccctggggcactctaaatccatcagtttcttggggcggcggcggacctggaacagggtggggaacccgaccaatgccccatcctgaaggaatttggggcataaacaaccagcctcccggaacgagctgggggaacattaaccggtaccctggaggcagctgggggaacattaatagatatcctggtggctcctggggcaacattaatcggtatcctggcgggtcatggggcaacattcatctttatcccggcatcaacaaccctttccctcctggggtgctgcgtccaccagggtcttcttggaatattcctgccggcttcccaaacccaccctcacctagattgcagtggggctag

SEQ ID NO: 177941 - DNA, 978 bp, Artificial Sequence
  derived and/or modified sequence
atgcaaggtcgcgtggccgggagctgtgcgcccttagggctgttactcgtgtgcctgcacctgcccggcttatttgcacgcagcataggcgtggtcgaggagaaagtaagccagaacctcgggaccaacctcccccagctgggacagccttcttccaccgggccctctaactctgagcatccgcagccagcactggacccaagaagtaatgacctcgcccgtgtacccttgaagctgtccgttcctgcatcagatggttttccacctgccggcggttccgctgtgcaacgctggcccccaagctggggtctgcctgcaatggatagttggcctcctgaggacccgtggcagatgatggctgccgcggctgaggatagattgggtgaggccttaccagaagagttgtcatacctctcatcagcagctgctttagcccccggatccggaccactgccaggggaatcttccccagacgccactgggttgtcgccaaaagcttcgcttctgcaccaggactccgaatccagaagattaccacgatcaaactcactgggtgctggcggcaagatcctctcgcaacgccccccttggtctcttattcaccgagtcttaccagatcacccttggggcaccctcaatcctagtgtgagctggggcggcggcgggcctggcaccggttggggaacccgcccgatgccacatccagagggcatatgggggatcaacaaccagccacccggtacatcatggggaaacataaaccggtatcccggtggatcttggggaaacataaaccgatatcctggcggcagttggggcaatattaatcggtatcctggaggaagctggggaaacatccatttataccctggcatcaacaaccctttcccccccggagttcttcgtcctcccggctcatcctggaacatccccgccggctttccaaaccccccttctcctcggctgcagtggggctag

SEQ ID NO: 177942 - DNA, 978 bp, Artificial Sequence
  derived and/or modified sequence
atgcagggtagggtagccggatcatgtgcccctctcggcttgctcctggtgtgtttacatttgccaggactattcgctagaagcattggagtagttgaagaaaaagttagccaaaatctgggcacaaatctgccacaactgggccagccgtcatcaaccggaccgagtaacagtgagcatccccagcccgccttagatccccgctcaaacgacctggcaagagttcctctcaaactctctgtccccgctagtgacggctttccccctgccggaggcagcgcggtacaacgctggccgcccagctgggggctccctgcgatggactcttggcctccggaggacccttggcagatgatggcagcagccgccgaggatcggctgggagaggctcttcccgaagaactctcctatctgtctagtgccgcagcgcttgcccccggtagcggacccctccccggcgaaagttcccctgatgcaaccggactctccccaaaagcttctctgctgcaccaggactcagaatcacgtaggcttcctcgaagtaactcattgggcgctggaggaaaaatcttgtcacagaggccaccatggtcattaattcacagggtgctgccggatcatccatggggaacgctaaatccttcagtcagctggggaggagggggaccgggcaccggctggggaacgagacccatgcctcatcccgaggggatatgggggattaacaaccaacctccaggaacctcgtggggaaacattaacagatacccaggcggttcgtggggcaacatcaaccggtacccaggcggcagctggggcaatattaacagatatcctggcgggtcctggggaaacatacatttatatcccggcattaataatccctttccacctggcgtacttcgacctccaggtagcagttggaatatacccgcaggatttcccaacccacccagccccagactccagtggggatag

SEQ ID NO: 177943 - DNA, 978 bp, Artificial Sequence
  derived and/or modified sequence
atgcagggccgggttgccggcagctgcgctccattaggactgcttctggtgtgcctccacttaccgggattgttcgctcgttccatcggcgtcgtagaagaaaaggtcagccaaaatctcgggactaacctgccccaactcggtcagccgagctcgactgggccctccaattccgaacacccccaaccagctcttgatccccgtagtaacgatctggccagagtccctttgaaattaagcgttccagccagcgatgggtttcctcctgccggcggttctgccgtccaaaggtggcctccgagctggggtttgccggctatggactcttggccgcctgaggacccctggcaaatgatggctgccgcagcagaagatcggcttggggaggctctccctgaagaactgtcatatctgtcatcagccgccgccttggcacctggctccggtccattgcctggagaatcatcgcctgatgctacaggactgtccccaaaggcctcactcttacaccaggacagcgagtcaaggaggctaccgcgctccaactctttgggtgcaggcggcaagattttgagtcaaaggccaccatggtcactcatccatagagtcctgccagatcatccatggggaaccttaaacccttctgtgtcatggggaggtggtggccctggtacgggatggggcacccgacctatgccccatccagaaggcatctgggggatcaataaccagcctcccggcacttcatggggaaacattaatcgctatcccggcggctcatgggggaacatcaatagatatccaggtggttcctggggcaacattaaccggtaccctggaggctcttggggaaatatccatctgtaccctggcatcaacaacccctttccgcccggcgttctgagacctcctggcagcagttggaacattcctgcaggctttcctaatcccccctcaccccgacttcagtggggatag

SEQ ID NO: 177944 - DNA, 1140 bp, Artificial Sequence
  derived and/or modified sequence
caggatgcagggccgcgtggcagggagctgcgctcctctgggcctgctcctggtctgtcttcatctcccaggcctctttgcccggagcatcggtgttgtggaggagaaagtttcccaaaacttggggaccaacttgcctcagctcggacaaccttcctccactggcccctctaactctgaacatccgcagcccgctctggaccctaggtctaatgacttggcaagggttcctctgaagctcagcgtgcctgcatcagatggcttcccacctgcaggaggttctgcagtgcagaggtggcctccatcgtgggggctgcctgccatggattcctggccccctgaggatccttggcagatgatggctgctgcggctgaggaccgcctgggggaagcgctgcctgaagaactctcttacctctccagtgctgcggccctcgctccgggcagtggccctttgcctggggagtcttctcccgatgccacaggcctctcacccaaggcttcactcctccaccaggactcggagtccagacgactgccccgttctaattcactgggagccgggggaaaaatcctttcccaacgccctccctggtctctcatccacagggttctgcctgatcacccctggggtaccctgaatcccagtgtgtcctggggaggtggaggccctgggactggttggggaacgaggcccatgccacaccctgagggaatctggggtatcaataatcaacccccaggtaccagctggggaaatattaatcggtatccaggaggcagctggggaaatattaatcggtatccaggaggcagctgggggaatattaatcggtatccaggaggcagctgggggaatattcatctatacccaggtatcaataacccatttcctcctggagtcctccgccctcctggctcttcttggaacatcccagctggcttccctaatcctccaagccctaggttgcagtggggctagagcacgatagagggaaacccaacattgggagttagagtcctgctcccgccccttgctgtgtgggctcaatccaggccctgtcagcatgtttccagcactatccccacttttcagtgcctcccctgctcatctccaataaaataaaagcacttatggaa

SEQ ID NO: 177945 - DNA, 978 bp, Artificial Sequence
  derived and/or modified sequence
atgcagggcagagtggccggcagctgcgcccccctgggcctgctgctggtgtgcctgcacctgcccggcctgttcgccagaagcatcggcgtggtggaggagaaggtgagccagaacctgggcaccaacctgccccagctgggccagcccagcagcaccggccccagcaacagcgagcacccccagcccgccctggaccccagaagcaacgacctggccagagtgcccctgaagctgagcgtgcccgccagcgacggcttcccccccgccggcggcagcgccgtgcagagatggccccccagctggggcctgcccgccatggacagctggccccccgaggacccctggcagatgatggccgccgccgccgaggacagactgggcgaggccctgcccgaggagctgagctacctgagcagcgccgccgccctggcccccggcagcggccccctgcccggcgagagcagccccgacgccaccggcctgagccccaaggccagcctgctgcaccaggacagcgagagcagaagactgcccagaagcaacagcctgggcgccggcggcaagatcctgagccagagacccccctggagcctgatccacagagtgctgcccgaccacccctggggcaccctgaaccccagcgtgagctggggcggcggcggccccggcaccggctggggcaccagacccatgccccaccccgagggcatctggggcatcaacaaccagccccccggcaccagctggggcaacatcaacagataccccggcggcagctggggcaacatcaacagataccccggcggcagctggggcaacatcaacagataccccggcggcagctggggcaacatccacctgtaccccggcatcaacaaccccttcccccccggcgtgctgagaccccccggcagcagctggaacatccccgccggcttccccaacccccccagccccagactgcagtggggctag

SEQ ID NO: 177946 - DNA, 978 bp, Artificial Sequence
  derived and/or modified sequence
atgcagggtcgcgtcgccggcagctgtgctcctctagggctgcttttagtgtgtctacacctaccaggtctgtttgcccgcagtatcggagtcgtcgaagagaaggtgtcgcagaatcttggcacaaaccttccacagttaggtcagcccagcagcaccggcccaagcaatagcgaacacccgcaacctgcactggacccacgaagtaacgatttggcgagagtgcccctgaaactttccgtgcctgcttccgacggctttccccctgcaggtggttctgccgtgcagcggtggcctccatcttggggcctgccagctatggattcatggcctccagaggatccctggcagatgatggccgctgctgctgaagaccgcttgggcgaggctctaccagaagagttgtcctatctgtcctcagccgccgcactcgcccctggctctgggcccctgcctggcgagagcagccctgatgcaacaggcctttcaccaaaagcaagtcttctgcatcaggacagcgaatcacggcgcttgccaaggtccaatagcttaggtgcgggtggcaagattttgagtcaacgccctccttggtcattaattcaccgagtcttgcccgaccatccctggggcaccttgaatcccagtgtttcatggggagggggaggccctggcacgggatggggaacacgtcctatgcctcacccggaagggatctggggaatcaacaaccaaccacccggcacatcttggggaaatatcaatcggtatcccggcggctcttggggaaacattaaccgttaccctggaggctcttggggcaatataaatcggtatcctggtggttcctggggtaacatccacctataccctggaattaataacccgtttccacccggcgttcttcgacctcccggatcctcgtggaatatacccgctgggttccccaaccctccaagtccccggctgcagtggggatag

SEQ ID NO: 177947 - DNA, 978 bp, Artificial Sequence
  derived and/or modified sequence
atgcagggcagagttgcagggagctgtgcacccttggggctactcctcgtatgtctccatctcccaggactttttgcccgcagtattggcgtggtggaagaaaaggtgagccaaaacttaggcacaaaccttccccagttaggacagccctctagtacgggaccatcaaactccgaacatccgcagcctgctttggacccacggagcaacgacctagcacgggtgcctctcaagttatccgtccccgcaagtgatggttttccaccagctggcgggtctgccgttcagcgctggcctccctcctggggtctccccgccatggacagctggcccccggaggatccgtggcaaatgatggccgccgcagccgaggataggctcggggaggccctgccagaggaactgtcatatctaagttctgccgctgccttggctccagggagtggtccgctgcctggggagagtagccccgacgctacagggctctcgccaaaagcctccctgctgcaccaggattccgaatcccggcgccttcccaggagtaactcactcggcgcgggcggtaagattttaagtcagaggcccccttggtcactgatacacagggtccttcccgaccacccatggggtactctgaacccctcagtgtcatggggaggaggcggacctggaaccggctggggaactcgacctatgcctcaccccgaggggatctggggcattaacaatcaaccgcccggcactagctggggaaacatcaatcggtatccgggtggaagctggggtaacatcaatcgctaccccgggggcagctggggaaatatcaatagatacccaggaggatcctggggcaatatccatctgtatccaggaatcaacaacccctttcctcctggcgtgctcaggccaccaggaagcagttggaatatcccagccggcttcccgaaccctcccagcccccgtctgcagtggggctag

SEQ ID NO: 177948 - DNA, 978 bp, Artificial Sequence
  derived and/or modified sequence
atgcaggggagggtggcagggagctgtgcccctttagggctgctgttggtttgcctgcacttaccaggtttattcgcacgttctattggagtggtggaggagaaggtgagtcaaaacctggggactaatcttcctcagctaggccaaccatcatccactggtcctagtaattcagagcatccacagcccgccctagatcccagaagcaacgacttagcgcgcgtgccactgaagttgtcagttcccgcgtcggacggcttccccccagccggcgggagtgctgtacagcggtggcccccctcctggggtctgcccgccatggatagttggcctccggaagacccttggcagatgatggccgctgcagctgaggacaggcttggcgaggccctgcctgaggagctatcttacctttcttctgcggcagccctggcaccagggtcgggccccttacctggcgaaagcagccctgacgccacagggttgtctcctaaggccagccttctgcatcaagatagtgagagtagacggcttccacggagcaatagtctgggtgccgggggaaagattctgagccagagacctccatggtcgctgatccaccgggtgctcccggatcatccatggggtaccctgaacccatcggtgagctggggcggcggaggccccggcactgggtggggaacaagaccgatgccacacccggagggaatttgggggattaacaaccaaccgcccggcaccagctggggaaatattaaccgctatcctggggggagttggggaaatatcaatagataccctggcggcagctggggcaacatcaaccgctatcccggggggtcctgggggaatatacacctctatcctggaattaataaccctttcccccccggagtgctgcggcctccaggcagctcttggaatatacctgctgggttcccaaatccccccagcccacgccttcagtggggttag

SEQ ID NO: 177949 - DNA, 978 bp, Artificial Sequence
  derived and/or modified sequence
atgcagggaagagtcgcaggtagctgcgcccctttaggactacttcttgtgtgcttgcacctccccgggcttttcgctagaagcatcggtgttgttgaggaaaaggtttcccagaatctcggcactaatcttcctcaattggggcagccatcatcaacaggtccttcaaacagcgaacatccccagcccgccctggaccctcggtccaatgacttagcccgcgtgcctctcaaactttccgtgccagcctccgacgggtttccccccgctggaggatcagccgttcagcgctggccgccttcgtggggcttacctgctatggactcttggccacccgaagacccctggcagatgatggcagctgctgccgaggaccgactcggtgaagctctcccggaggaactgagttatctctccagcgcagcagccctcgctcctggcagcggcccgttgcctggtgagtccagcccagatgctaccggcctgagccctaaagcttcactactgcatcaggactcagagtcccgcaggctgcctcggtctaattctctgggcgctggtggaaagatcctgtcacaaaggcccccatggtctctgattcatcgtgtcctgcccgatcacccttggggtaccctgaacccttctgtgtcatggggaggggggggcccgggcaccgggtggggcactaggccaatgccccaccctgagggaatttggggcatcaacaatcagccccctggcacatcctgggggaacattaatagatatcctgggggttcatggggtaacattaataggtaccccggcggttcttggggcaacatcaaccgatacccaggtggcagctggggtaatatccacctgtatccagggatcaataatcctttcccacctggagtgctcaggcctcccggcagctcatggaatatcccagcaggtttccctaatcccccctcaccgaggcttcaatggggctag

SEQ ID NO: 177950 - DNA, 978 bp, Artificial Sequence
  derived and/or modified sequence
atgcagggccgggtggccggcagctgtgcccccctgggcctgctgctggtgtgcctgcacctgcccggcctgtttgcccggagcattggagtggtggaggagaaggtgtcccagaacctgggcaccaacctgccccagctgggccagcccagcagcacaggccccagcaacagcgagcacccccagcctgccctggaccccaggagcaatgacctggcccgggtgcccctgaagctgtctgtgcctgccagtgatggcttccccccagctgggggcagcgctgtgcagcgctggcccccatcctggggcctgcctgccatggacagctggcccccagaggacccctggcagatgatggctgctgctgctgaggaccggctgggggaggccctgcctgaggagctgagctacctgagcagcgctgctgccctggcccctggcagcggccccctgcccggggagagcagcccagatgccaccggcctgagccccaaggccagcctgctgcaccaggacagcgagagccggcggctgcccaggagcaacagcctgggcgctgggggcaagatcctgagccagaggcctccctggagcctcatccaccgggtgctgcctgaccacccctggggcaccctgaaccccagcgtgtcctggggcggcggcggccctggcaccggctggggcacccggcccatgccccaccctgagggcatctggggcatcaacaaccagcccccaggcacctcctggggcaacatcaaccgctacccaggcggctcctggggcaacatcaaccgctacccaggcggctcctggggcaacatcaaccgctacccaggcggctcctggggcaacatccacctgtacccaggcatcaacaaccccttccccccaggagtgctgcggcccccaggcagctcctggaacatcccagctggcttccccaacccccccagcccccggctgcagtggggctag

SEQ ID NO: 177951 - DNA, 978 bp, Artificial Sequence
  derived and/or modified sequence
atgcagggccgggtggccggcagctgcgcccccctgggcctgctgctggtttgcctgcacctcccaggactgtttgcaaggtccattggcgtcgtagaggagaaggtcagtcagaacctcggaactaacctgccccagcttggtcaaccatcatcaaccggaccgagtaattctgaacaccctcagcccgccctggatccacgctctaacgatcttgcccgcgtgccattgaaacttagcgtgcccgcctctgacggatttcctccagcgggaggctccgccgtacagaggtggcctccctcttggggtctgcccgccatggactcgtggccccctgaggacccctggcagatgatggccgccgccgcagaagaccgacttggagaggctttgcccgaagaactgagctacctcagctccgcagctgcactagcccctggctcaggtccgctccccggtgaatcgagcccagatgctaccggcctatccccaaaagcctcacttctgcaccaagacagcgagtctagacgcttacctaggtccaacagcctgggggcaggcggtaagatcctgtcccagagacccccctggtctctgatacacagggtgttacccgatcatccttggggcactctgaacccaagcgtatcttggggtggagggggccctggaactggatggggcactagaccaatgccccaccctgaaggcatttgggggattaataaccagccgcccggaacctcctggggaaacataaaccgatacccaggagggtcgtggggcaacataaatcgttatcctggagggtcctggggcaatatcaaccggtatccgggcgggtcttggggcaatattcatctttaccccggaatcaacaaccctttcccgcccggtgtcctgcggcctccaggttctagctggaatattcctgctgggttccccaatcccccatctccacgcctccaatggggctag

SEQ ID NO: 177952 - DNA, 978 bp, Artificial Sequence
  derived and/or modified sequence
atgcagggccgggtggccggcagctgcgcccccctgggcctgctgctcgtgtgcctgcacctgccaggcttgttcgcaaggtcaattggggtggtggaggagaaggtgtctcagaatcttggtactaatttgcctcagctggggcagccttcctcaacgggaccatccaattccgagcatccccagccagccctagaccccaggtctaatgatctggcgagggtgccactcaagcttagcgtgccagctagtgatgggtttcctcctgcgggcggatctgcagtgcagaggtggccaccctcctggggactgcctgccatggacagttggcctcctgaagatccctggcaaatgatggctgccgcagctgaagatcgcctaggcgaggcattgccagaagagctgagttacctctccagcgcggcggccttggctcctggcagtggaccactgccaggggagtcttctcccgatgcgacaggcctcagtcccaaggcctcattactgcatcaagactcagagtcccggagactgccacgtagtaattccctgggcgccggagggaagatcttgagccagagacccccttggagcctgatacacagggtccttccagatcatccatggggaactctaaacccgtctgtttcttggggaggagggggacctgggacgggctggggcacacggcccatgcctcaccctgaggggatctgggggataaataaccagccaccaggtacttcctggggaaacattaaccggtatcccggtggctcatggggaaacatcaataggtatcctgggggttcctggggcaacattaataggtaccccgggggttcttggggtaacattcatctctacccagggataaacaatcccttccccccaggagtgctacggccacccggcagtagctggaatattccggccgggttccccaatcctccttctccaagactacaatggggttag

SEQ ID NO: 177953 - DNA, 978 bp, Artificial Sequence
  derived and/or modified sequence
atgcagggccgggtggccggcagctgcgcccccctgggcctgctgctcgtctgcctacatttgcctggactatttgcgagatccataggggtcgtggaagagaaagtgagccagaacctcgggacaaacctcccccaactggggcagccgagtagtactggaccatccaacagtgagcatcctcagccagccctggatccacgttcgaatgatctggcaagagtgccgctgaagttaagtgtccctgccagtgatgggtttcctcccgccgggggtagtgcagtgcaacggtggcctccatcttggggcctacctgccatggactcatggcctccagaggacccctggcagatgatggccgctgcagcagaggacaggctgggagaggcgctgcctgaagaactgagctatctcagttcggcagccgctcttgccccagggtctggtccactgcctggcgagagctcaccggacgcaacaggcctgtcccccaaggcgtcgcttctccaccaggattcagaatctcgtcgcctccccagaagcaattctctgggcgcggggggcaagatactgagccagcggcccccctggagtcttatacatcgggtcctgcctgaccacccctggggaaccctaaacccttcggtgtcatggggaggtgggggcccaggcacgggttggggaaccaggcctatgcctcatccagagggcatttggggcatcaataatcagcccccgggcacaagctgggggaacattaacagataccccggaggaagttggggaaacattaatcgatacccgggaggttcctggggaaatataaatcggtatccaggtgggtcatggggaaacatccatttataccccggcattaacaatcccttccctcccggcgttctgcggcctccagggtcctcatggaatatccccgccgggttcccgaatcccccttcaccgagactgcagtgggggtag

SEQ ID NO: 177954 - DNA, 978 bp, Artificial Sequence
  derived and/or modified sequence
atgcagggccgggtggccggcagctgcgcccccctgggcctgctgttagtctgtctgcatctccccggcctgttcgctcgctccattggggtcgtggaagagaaggtatcacagaacctgggcaccaacctcccacagctggggcagcccagttctacaggtccctctaactccgagcaccctcagccagccctagaccctcgctccaacgatttagcgcgagttccactgaagctttcagtgccggcctcagacggctttccgcccgctggaggaagcgccgttcagcggtggccaccttcctggggcctcccggccatggatagctggcctccagaagacccgtggcagatgatggctgcggccgcagaagatcggctaggagaagctctacctgaggagttatcttatctgtcttccgctgcagccctggctccaggttcaggccccctcccgggcgagtcttcgcccgatgctacaggcctgtctcccaaggcctccctgctgcatcaagattccgagtcaagacggttacctcgatccaatagtctgggagccgggggaaaaatcctgagtcagcgccccccttggtccctgatccatcgcgtcctcccggaccatccctggggtacactcaatccgtcagtgtcctggggagggggagggcccggaaccggatggggcaccagacccatgccacaccccgaagggatatgggggataaacaaccagcctcctggaacatcctggggaaacatcaatcggtaccccggtggaagctggggcaatattaacagataccccggcggcagctggggcaacatcaataggtatccaggcgggtcatggggtaacatccacttgtatccaggtataaacaatccatttccgcctggggtattgcgccctccagggtcgagctggaacattcctgctgggtttccaaaccccccatcgccaaggctgcagtggggctag

SEQ ID NO: 177955 - DNA, 1140 bp, Artificial Sequence
  derived and/or modified sequence
caggatgcagggccgcgtggcagggagctgcgctcctctgggcctgctcctggtctgtcttcatctcccaggcctctttgcccggagcatcggtgttgtggaggagaaagtttcccaaaacttcgggaccgacttgcctcagctcggacaaccttcctccactggcccctctaactctgaacatccgcagcccgctctggaccctaggtctaatgacttggcaagggttcctctgaagctcagcgtgcctccatcagatggcttcccacctgcaggaggttctgcagtgcagaggtggcctccatcgtgggggctgcctgccatggattcctggccccctgaggatccttggcagatgatggctgctgcggctgaggaccgcctgggggaagcgctgcctgaagaactctcttacctctccagtgctgcggccctcgctccgggcagtggccctttgcctggggagtcttctcccgatgccacaggcctctcacccgaggcttcactcctccaccaggactcggagtccagacgactgccccgttctaattcactgggagccgggggaaaaatcctttcccaacgccctccctggtctctcatccacagggttctgcctgatcacccctggggtaccctgaatcccagtgtgtcctggggaggtggaggccctgggactggttggggaacgaggcccatgccacaccctgagggaatctggggtatcaataatcaacccccaggtaccagctggggaaatattaatcggtatccaggaggcagctggggaaatattaatcggtatccaggaggcagctgggggaatattaatcggtatccaggaggcagctgggggaatattcatctatacccaggtatcaataacccatttcctcctggagttctccgccctcctggctcttcttggaacatcccagctggcttccctaatcctccaagccctaggttgcagtggggctagagcacgatagagggaaacccaacattgggagttagagtcctgctcccgccccttgctgtgtgggctcaatccaggccctgttaacatgtttccagcactatccccacttttcagtgcctcccctgctcatctccaataaaataaaagcacttatggaa

SEQ ID NO: 177956 - DNA, 1140 bp, Artificial Sequence
  derived and/or modified sequence
caggatgcagggccgcgtggcagggagctgcgctcctctgggcctgctcctggtctgtcttcatctcccaggcctctttgcccggagcatcggtgttgtggaggagaaagtttcccaaaacttcgggaccaacttgcctcagctcggacaaccttcctccactggcccctctaactctgaacatccgcagcccgctctggaccctaggtctaatgacttggcaagggttcctctgaagctcagcgtgcctccatcagatggcttcccacctgcaggaggttctgcagtgcagaggtggcctccatcgtgggggctgcctgccatggattcctggccccctgaggatccttggcagatgatggctgctgcggctgaggaccgcctgggggaagcgctgcctgaagaactctcttacctctccagtgctgcggccctcgctccgggcagtggccctttgcctggggagtcttctcccgatgccacaggcctctcacctgaggcttcactcctccaccaggactcggagtccagacgactgccccgttctaattcactgggagccgggggaaaaatcctttcccaacgccctccctggtctctcatccacagggttctgcctgatcacccctggggtaccctgaatcccagtgtgtcctggggaggtggaggccctgggactggttggggaacgaggcccatgccacaccctgagggaatctggggtatcaataatcaacccccaggtaccagctggggaaatattaatcggtatccaggaggcagctggggaaatattaatcggtatccaggaggcagctgggggaatattaatcggtatccaggaggcagctgggggaatattcatctatacccaggtatcaataacccatttcctcctggagttctccgccctcctggctcttcttggaacatcccagctggcttccctaatcctccaagccctaggttgcagtggggctagagcacgatagagggaaacccaacattgggagttagagtcctgctcccgccccttgctgtgtgggctcaatccaggccctgttaacatgtttccagcactatccccacttttcagtgcctcccctgctcatctccaataaaataaaagcacttatggaa

SEQ ID NO: 177957 - DNA, 978 bp, Artificial Sequence
  derived and/or modified sequence
atgcagggcagagtggccggcagctgcgcccccctgggcctgctgctggtgtgcctgcacctgcccggcctgttcgccagaagcatcggcgtggtggaggagaaggtgagccagaacttcggcaccgacctgccccagctgggccagcccagcagcaccggccccagcaacagcgagcacccccagcccgccctggaccccagaagcaacgacctggccagagtgcccctgaagctgagcgtgccccccagcgacggcttcccccccgccggcggcagcgccgtgcagagatggccccccagctggggcctgcccgccatggacagctggccccccgaggacccctggcagatgatggccgccgccgccgaggacagactgggcgaggccctgcccgaggagctgagctacctgagcagcgccgccgccctggcccccggcagcggccccctgcccggcgagagcagccccgacgccaccggcctgagccccgaggccagcctgctgcaccaggacagcgagagcagaagactgcccagaagcaacagcctgggcgccggcggcaagatcctgagccagagacccccctggagcctgatccacagagtgctgcccgaccacccctggggcaccctgaaccccagcgtgagctggggcggcggcggccccggcaccggctggggcaccagacccatgccccaccccgagggcatctggggcatcaacaaccagccccccggcaccagctggggcaacatcaacagataccccggcggcagctggggcaacatcaacagataccccggcggcagctggggcaacatcaacagataccccggcggcagctggggcaacatccacctgtaccccggcatcaacaaccccttcccccccggcgtgctgagaccccccggcagcagctggaacatccccgccggcttccccaacccccccagccccagactgcagtggggctag

SEQ ID NO: 177958 - DNA, 978 bp, Artificial Sequence
  derived and/or modified sequence
atgcagggcagagtggccggcagctgcgcccccctgggcctgctgctggtgtgcctgcacctgcccggcctgttcgccagaagcatcggcgtggtggaggagaaggtgagccagaacttcggcaccaacctgccccagctgggccagcccagcagcaccggccccagcaacagcgagcacccccagcccgccctggaccccagaagcaacgacctggccagagtgcccctgaagctgagcgtgccccccagcgacggcttcccccccgccggcggcagcgccgtgcagagatggccccccagctggggcctgcccgccatggacagctggccccccgaggacccctggcagatgatggccgccgccgccgaggacagactgggcgaggccctgcccgaggagctgagctacctgagcagcgccgccgccctggcccccggcagcggccccctgcccggcgagagcagccccgacgccaccggcctgagccccgaggccagcctgctgcaccaggacagcgagagcagaagactgcccagaagcaacagcctgggcgccggcggcaagatcctgagccagagacccccctggagcctgatccacagagtgctgcccgaccacccctggggcaccctgaaccccagcgtgagctggggcggcggcggccccggcaccggctggggcaccagacccatgccccaccccgagggcatctggggcatcaacaaccagccccccggcaccagctggggcaacatcaacagataccccggcggcagctggggcaacatcaacagataccccggcggcagctggggcaacatcaacagataccccggcggcagctggggcaacatccacctgtaccccggcatcaacaaccccttcccccccggcgtgctgagaccccccggcagcagctggaacatccccgccggcttccccaacccccccagccccagactgcagtggggctag

SEQ ID NO: 177959 - DNA, 978 bp, Artificial Sequence
  derived and/or modified sequence
atgcagggcagggtcgctggcagctgtgcccccctggggctgctgcttgtctgtctacatttaccgggattgtttgcgaggtctattggtgtggtcgaggagaaggtgtcccagaactttgggacagatcttccgcagctcggccagccctccagtaccggcccatcaaatagtgagcaccctcagcctgcccttgatcccagatccaatgatctcgcaagagtgccgctcaagctgtctgtacctcccagcgatgggttccccccagccgggggtagtgctgttcagcggtggcccccctcctgggggttgccagccatggactcatggcccccagaggacccttggcaaatgatggccgccgctgcagaggaccgtttgggcgaggccctgccagaggaattgtcctaccttagttcagctgctgcattagcaccgggatctggccctctgccgggtgagagttcgccagacgctaccgggctgagtccggaggccagcctgctgcaccaggactcagaatcccgcaggctgccacgatctaactccctcggagctgggggaaaaatcttgtcccagcgcccgccatggagcctgattcatcgagtccttccggaccatccatggggtaccctaaatccaagcgtctcttggggcggcggaggccctgggacaggttgggggacgcggccgatgccacaccctgaggggatctggggaattaataatcaaccacctggcactagctgggggaatatcaatcggtatccggggggctcttgggggaacatcaaccgatatcccggcgggtcctggggcaacatcaaccgatatccaggaggatcatggggtaatatccatttgtatcctggcataaataacccttttccccctggtgttcttcggccccccgggagttcgtggaacatccccgctggttttccgaatcccccctcacctaggctgcagtggggttag

SEQ ID NO: 177960 - DNA, 978 bp, Artificial Sequence
  derived and/or modified sequence
atgcagggtagagtggcgggctcttgtgccccattgggcctgctgctcgtgtgcctgcatttgccaggcctgtttgcccgtagtatcggagtagtcgaagagaaggtttcgcagaattttgggactaatctcccacagttaggtcaaccatctagcacaggaccctctaactccgagcacccccagcctgcactggacccgcgaagtaatgacttggcgagagtgccgttaaaactgtcagtccctcccagcgatgggttcccccctgctggaggatcagccgttcagcggtggccaccttcatggggactgcctgcaatggattcttggccccccgaggacccgtggcagatgatggccgccgcggcagaggatagactgggcgaggcactccccgaagaactgagctaccttagttccgccgccgccctggcacctggatcaggcccgctgcccggggagagctctccagacgctacaggcctatccccggaggcctcgctcctacaccaggacagtgagtcccgaaggttacctagatctaattcactgggggccggggggaaaattctttcccagagacctccctggtcactcattcacagagtgcttcctgatcatccttggggcacattaaacccatctgtttcatggggtggcggcggacccgggaccggatggggcacacggcctatgccacatccagagggaatctggggcatcaacaatcagccccccgggacttcatggggcaacatcaatcggtatcctggaggatcctggggaaacattaacaggtatcctggaggtagttggggtaacataaaccgctatccaggtggtagttggggcaatatccacctttaccccggcatcaataacccgttcccaccgggtgtgctgcgtcccccaggaagttcttggaacatccccgccggcttccctaacccccctagccctagactacaatgggggtag

SEQ ID NO: 177961 - DNA, 978 bp, Artificial Sequence
  derived and/or modified sequence
atgcagggccgggtggccggcagctgtgcccccctgggcctgctgctggtgtgcctgcacctgcccggcctgtttgcccggagcattggagtggtggaggagaaggtgtcccagaactttggaacagacctgccccagctgggccagcccagcagcacaggccccagcaacagcgagcacccccagcctgccctggaccccaggagcaatgacctggcccgggtgcccctgaagctgtctgtgcccccatctgatggcttccccccagctgggggcagcgctgtgcagcgctggcccccatcctggggcctgcctgccatggacagctggcccccagaggacccctggcagatgatggctgctgctgctgaggaccggctgggggaggccctgcctgaggagctgagctacctgagcagcgctgctgccctggcccctggcagcggccccctgcccggggagagcagcccagatgccaccggcctgagccctgaggccagcctgctgcaccaggacagcgagagccggcggctgcccaggagcaacagcctgggcgctgggggcaagatcctgagccagaggcctccctggagcctcatccaccgggtgctgcctgaccacccctggggcaccctgaaccccagcgtgtcctggggcggcggcggccctggcaccggctggggcacccggcccatgccccaccctgagggcatctggggcatcaacaaccagcccccaggcacctcctggggcaacatcaaccgctacccaggcggctcctggggcaacatcaaccgctacccaggcggctcctggggcaacatcaaccgctacccaggcggctcctggggcaacatccacctgtacccaggcatcaacaaccccttccccccaggagtgctgcggcccccaggcagctcctggaacatcccagctggcttccccaacccccccagcccccggctgcagtggggctag

SEQ ID NO: 177962 - DNA, 978 bp, Artificial Sequence
  derived and/or modified sequence
atgcagggccgggtggccggcagctgtgcccccctgggcctgctgctggtgtgcctgcacctgcccggcctgtttgcccggagcattggagtggtggaggagaaggtgtcccagaactttggcaccaacctgccccagctgggccagcccagcagcacaggccccagcaacagcgagcacccccagcctgccctggaccccaggagcaatgacctggcccgggtgcccctgaagctgtctgtgcccccatctgatggcttccccccagctgggggcagcgctgtgcagcgctggcccccatcctggggcctgcctgccatggacagctggcccccagaggacccctggcagatgatggctgctgctgctgaggaccggctgggggaggccctgcctgaggagctgagctacctgagcagcgctgctgccctggcccctggcagcggccccctgcccggggagagcagcccagatgccaccggcctgagccctgaggccagcctgctgcaccaggacagcgagagccggcggctgcccaggagcaacagcctgggcgctgggggcaagatcctgagccagaggcctccctggagcctcatccaccgggtgctgcctgaccacccctggggcaccctgaaccccagcgtgtcctggggcggcggcggccctggcaccggctggggcacccggcccatgccccaccctgagggcatctggggcatcaacaaccagcccccaggcacctcctggggcaacatcaaccgctacccaggcggctcctggggcaacatcaaccgctacccaggcggctcctggggcaacatcaaccgctacccaggcggctcctggggcaacatccacctgtacccaggcatcaacaaccccttccccccaggagtgctgcggcccccaggcagctcctggaacatcccagctggcttccccaacccccccagcccccggctgcagtggggctag

SEQ ID NO: 177963 - DNA, 978 bp, Artificial Sequence
  derived and/or modified sequence
atgcagggccgggtggccggcagctgcgcccccctgggcctgctgctcgtatgccttcatctgccgggtctgttcgctcgttctattggggttgtggaagaaaaggtaagtcagaacttcggcaccgaccttccccaactaggtcaaccctcctcaactggtccaagcaacagcgagcacccccagcccgcattagatcctcggtcaaacgatctcgcccgtgtgcctttgaaactgagcgttccgccgtcagatggattccctcctgccggagggagcgctgttcagcgctggccaccctcctgggggctgccggccatggactcttggccgccagaggatccatggcagatgatggccgccgccgccgaagatcgactgggcgaagccctgccagaggaattgtcgtatctgtcttcagccgccgcactcgcgcccggtagcggtccactgccaggggagtcatcaccagatgctacggggttgtccccggaagccagtttgctgcaccaagattctgagtcacgcagactgccacgttcaaatagtctgggtgccggaggcaagatcctctcccagagaccaccctggagtctgattcacagagttctcccagaccacccctggggtaccctgaaccccagtgtcagctggggggggggtgggcccgggactgggtggggaactcgccccatgccccatcctgagggcatatgggggatcaacaatcagcctcccggcacaagctgggggaacatcaaccgttacccaggaggctcttggggtaacatcaacaggtaccccggtggatcgtggggcaatattaataggtaccctgggggctcatgggggaatattcacctttatcctggcataaacaatccgttcccacctggcgtgctgagaccccctggctcttcttggaatatcccggccggcttccctaaccctccatctccacgactgcagtggggctag

SEQ ID NO: 177964 - DNA, 978 bp, Artificial Sequence
  derived and/or modified sequence
atgcagggccgggtggccggcagctgcgcccccctgggcctgctgttggtttgcctgcatttacctgggctttttgctagatcaatcggggtagtggaggagaaggtctcccagaattttgggacgaacctgccacaattaggtcagccttccagcaccggcccctctaactcagagcatcctcaacccgccctggaccctagatcgaacgacctcgcacgggtgcccctcaagctttctgtgccgcccagcgatggctttccgcccgcgggcggttccgcagtgcagaggtggccaccttcttggggactgcccgccatggactcgtggcctcctgaggatccttggcagatgatggccgctgctgctgaagatcgtttaggcgaggccctgcccgaggagctgtcatatctgtcgtctgcggcggcattagctcccggatccggaccattacccggggaaagttcacctgacgctactggcttgagccctgaagcctctctgctgcaccaggattctgagtctaggcggctcccaaggtcaaactctttgggagccggcggtaaaattcttagtcagcggcctccttggtctctaatccatagagtgttgcctgaccatccttgggggaccttgaacccctctgtctcatggggcggcggggggcctggcaccggatggggcaccaggccaatgccccatcctgagggcatctggggaatcaataaccaacctccgggaacaagttggggcaatatcaataggtatcctggaggcagctgggggaacataaataggtatccgggtggttcttggggaaatatcaacaggtaccccggcggtagctggggaaacattcacttgtatcccgggataaacaacccttttcccccaggagtgctccgaccaccaggaagctcgtggaacataccggcaggattccccaacccacctagtccccgcctgcaatggggctag

SEQ ID NO: 177965 - DNA, 978 bp, Artificial Sequence
  derived and/or modified sequence
atgcagggtagggttgcgggtagttgcgcaccactcggactgctccttgtgtgtctccacctgccgggattattcgctcgctctatcggagtcgtagaagagaaggtgagccaaaattttgggaccgacctgcctcagctcggccaaccttcatctacaggaccttctaattccgaacatcctcagccagccctcgaccccagatccaatgacctagctcgtgtgcctctcaaacttagcgtccctccaagcgacggctttccccctgccggaggaagtgccgtgcagaggtggccgcctagttggggactgcctgctatggacagctggccacctgaggatccctggcaaatgatggccgctgccgctgaagataggttaggagaggcattacccgaagaattgtcatacttgtccagtgccgctgccctggctcccggaagcgggcctctgccaggggaatcatctccagacgccacgggtttaagtcctgaagcatctttgctccatcaggatagcgaatcccgccgtctacccagatccaactctctgggcgctggaggcaaaatcctatcccagcggccaccttggtccttaatccaccgcgtgctacctgatcacccatgggggactctcaaccctagtgtgtcttggggcggaggcggtcccggaactgggtgggggacaagacctatgcctcaccccgaaggaatttggggcataaacaatcagcctcccggaacatcttggggtaacataaaccgctaccccggtggttcctggggtaacattaatcggtaccccggtgggagctggggaaatataaaccgttatccaggtgggtcctggggtaatatccacttgtatcctggcattaataatccattccctcccggtgtgctgcgcccaccgggttcaagttggaacatcccagccggatttccaaacccgccatctcccagattgcagtggggatag

SEQ ID NO: 177966 - DNA, 978 bp, Artificial Sequence
  derived and/or modified sequence
atgcagggacgtgtagcgggatcatgcgctcccctggggttgttgctggtctgcctgcatttaccaggcctcttcgctcgaagcatcggtgtcgttgaggaaaaagtcagccagaacttcggaactaacctcccccagttgggtcagcctagcagtaccggcccaagcaactccgaacatccccagcctgcgttggacccccgatcaaatgatttggcacgtgtgccgttaaagctgagtgtgccaccttctgacggttttccgccagccggaggctcagcagtccagcgttggcctcctagctggggcctccccgctatggactcctggcctccagaagatccttggcagatgatggctgcggctgctgaggacagactgggtgaggcattgcctgaggagctgtcctatctgtcgtccgccgctgcactggccccaggttctggacccctgccaggtgaatcctctcccgatgccactggactgagtcccgaggccagtttactgcaccaggattccgaatcccggagactgcctcgttccaacagtctaggcgcaggcggtaagatcctgtcccagcggcctccttggagtttgattcatagggtcttaccggaccatccttggggtacgctcaacccaagcgtatcctggggcggtggcggtccagggaccggctggggcactcggccaatgcctcatcctgaaggcatttggggcatcaataaccagccaccaggcactagctgggggaatatcaaccggtatccgggaggttcctgggggaacatcaacaggtatcccggagggtcatgggggaacatcaatcggtatccaggcggtagctggggaaacatccacctgtaccccggaattaataatccattccctcccggagtgcttaggcctcccggatcatcttggaacattccggcaggcttcccaaaccctcccagtccacgactgcagtgggggtag

SEQ ID NO: 177967 - RNA, 978 nt, Artificial Sequence
  derived and/or modified sequence
augcaagggcgaguugccgggucuugugcuccgcugggucuucuguugguguguuugcacuugcccggacucuucgcuaggucuaucggggugguggaagagaaggugucucagaaucuaggcaccaaucugccucaguuaggucagccuuccucaacaggcccaucaaauucagaacacccacaacccgcccuggacccacgcuccaacgaucuggcccgggugccacucaaacucagugugccugcgucugacggguuucccccagcaggaggcuccgccguacagcgcuggccacccaguuggggccugccagcgauggacucuuggccgcccgaagaucccuggcaaaugauggccgccgcggcugaggauagacucggggaagcucugccggaggaguuaucguaucugagcucagccgccgcucuugccccaggaucuggcccccuccccggagaauccucaccugacgccaccggacugucuccaaaggcuagucuucuucaccaggauucugaaagcagacggcuuccucguucaaacagcuuaggugccggcgguaaaauucugucucagcgcccacccuggucccugauucauagagugcuccccgaucaccccuggggcacauuaaauccaagugugaguuggggaggcggcgggccagggacagguuggggcacaaggccgaugccucacccugaagggauuuggggaaucaacaaccagccaccugguaccucaugggggaacaucaacagauauccuggcggguccuggggaaacaucaacagguacccaggggguuccuggggcaauauuaaucgauauccaggcggaagcugggguaacauacaccucuauccuggcaucaacaacccguucccuccuggcguccugcguccaccagggucuucuuggaauauuccugccggcuucccaaacccacccucaccuagauugcaguggggcuag

SEQ ID NO: 177968 - RNA, 978 nt, Artificial Sequence
  derived and/or modified sequence
augcaaggacgcguugcuggcucaugcgccccgcugggcuuguuacuggugugccuacaucuccccggacuguuugcuagauccauuggaguggucgaagaaaaggugucucagaaccuuggcaccaaccugccucagcugggccagccuagcagcaccgggcccucaaacagugaacacccccagccugcccuugacccccgcuccaaugaccuggcccggguaccccucaaacugagcgugccagcuucugauggauuuccaccugccggcggauccgcagugcaacgcuggccaccuaguuggggguugcccgcuauggauucguggccuccagaggacccauggcaaaugauggcagccgcugccgaggaccgucuuggcgaggcgcuuccugaggagcuguccuacuuaaguucugccgcugcccuagcccccggaucuggcccccugccgggcgagucaagcccugaugccacugggcucucuccuaaagcuuccuuacugcaccaggauagcgagucccgacgcuugccucggucaaauucauugggggcuggcggaaaaauacugucccagcguccccccuggagccugauucaccgagucuuaccagaucacccuuggggcacccucaauccuagugugagcuggggcggcggcgggccuggcaccgguuggggaacccgcccgaugccacauccagagggcauaugggggaucaacaaccagccacccgguacaucauggggaaacauaaaccgguaucccgguggaucuuggggaaacauaaaccgauauccuggcggcaguuggggcaauauuaaucgguauccuggaggaagcuggggaaacauccauuuauacccuggcaucaacaacccuuucccccccggaguucuucgacccccugguuccucuuggaacaucccagcuggauucccuaacccgccaaguccccggcugcaauggggcuag

SEQ ID NO: 177969 - RNA, 978 nt, Artificial Sequence
  derived and/or modified sequence
augcaggggcgcgucgcuggcucgugugcaccccugggccuccuccuagugugucugcaccuucccggccuguuugcccgcucaauugggguagucgaggagaaggugagccagaacuugggaaccaaucugccccagcugggccagccauccaguacgggcccuucaaauuccgagcacccucagccugcgcuagauccuagaagcaacgaucucgcuagagugccauugaaacuguccgugccugccucugauggcuucccaccugcuggaggaagugcuguucagagauggccacccuccuggggccugccugcaauggacaguuggccucccgaagaccccuggcagaugauggcugccgcggccgaagaccgcuuaggcgaagcccuucccgaagagcucucauauuuauccucagccgccgcacuggcaccugggagcggcccccuuccaggagaaagcuccccugaugcuacuggacuguccccuaaggcuagucuccuccaucaagauuccgagucgcggagacugccacgaucuaauucccucggugcaggggggaaaauacucucccagaggccaccguggagcuuaauucaucguguucuucccgaccauccuuggggaacccugaacccuucggugucauggggcggcggagggcccggaacaggcugggggacccguccgaugccccacccugaaggaauuugggggaucaacaaucagccucccggcaccuccuggggcaacauaaauagauacccuggaggaucuugggguaacauuaacagauauccagguggcucauggggcaauaucaauagauacccagguggcuccugggggaauauccaccucuacccuggaauaaauaauccguucccacccgggguccuucggccaccaggaucaagcuggaauaucccugcuggauuuccuaacccaccuuccccuagauuacaguggggguag

SEQ ID NO: 177970 - RNA, 978 nt, Artificial Sequence
  derived and/or modified sequence
augcagggacggguggcugguaguugcgcuccucuuggcuuauugcuagugugcuuacaccugcccgguuuguuugcccggucgauaggagugguggaggaaaaaguaucccagaauuuaggaacaaaccucccacagcuugggcagccuucuagcacaggaccuucuaacagcgagcacccgcagccagcacuggauccacgaucaaacgaccuugcaagagugccacucaagcugagcguccccgcuucggacgguuucccaccugcaggaggcagcgcgguucaacgguggccaccgucauggggauugccagcgauggauuccuggcccccugaggauccauggcagaugauggccgccgcugccgaagaccggcucggagaggcccucccagaggaacugucauaccuaucgucagccgccgcccuggcuccaggaaguggaccuuuacccggcgagagcagcccugacgcgacgggccuguccccaaaagccucucuguugcaucaagauucagaaucccggagacuccccaggucaaauucuuuaggggcuggagguaaaaucuugucgcagaggccacccuggagucuuauccaccgagugcucccagaccauccuugggggacgcugaacccuuccguuucuuggggagggggagggcccgguacugggugggggacgagacccaugccacacccagaaggcauauggggaauuaacaaucagcccccaggcacuucuugggguaacaucaacagguaccccggggguaguugggggaacauaaaucgguauccggggggauccuggggaaacauuaauagauacccgggcgguagcugggggaauauccaucuguauccuggaaucaacaauccuuuccccccaggggugcuucguccuccuggcucaucuuggaauauuccagcgggguuuccuaacccuccaaguccuagacuccaauggggauag

SEQ ID NO: 177971 - RNA, 978 nt, Artificial Sequence
  derived and/or modified sequence
augcagggacgagucgcaggcagcugugcgccuuugggccugcuucugguaugucuucaccugcccggucuguucgcgaggucuauaggaguaguagaggagaaggucucgcagaaccuuggcacgaaucucccccagcugggacagcccucuaguaccggccccucuaacucagagcacccacagcccgcccuugacccacgcaguaacgaucuugccagaguaccccugaaacuuuccguuccagccagugacggguucccucccgcaggaggcucugcgguucagcguuggcccccuaguuggggccugccagcgauggacucuuggccgcccgaagaucccuggcaaaugauggccgccgcggcugaggauagacucggggaagcucugccggaggaguuaucguaucugagcucagccgccgcucuugccccaggaucuggcccccuccccggagaauccucaccugacgccaccggacugucuccaaaggcuagucuucuucaccaggauucugaaagcagacggcuuccucguucaaacagcuuaggugccggcgguaaaauucugucucagcgcccacccuggucccugauucaccgaguccuuccugaucaccccuggggcacucuaaauccaucaguuucuuggggcggcggcggaccuggaacaggguggggaacccgaccaaugccccauccugaaggaauuuggggcauaaacaaccagccucccggaacgagcugggggaacauuaaccgguacccuggaggcagcugggggaacauuaauagauauccugguggcuccuggggcaacauuaaucgguauccuggcgggucauggggcaacauucaucuuuaucccggcaucaacaacccuuucccuccuggggugcugcguccaccagggucuucuuggaauauuccugccggcuucccaaacccacccucaccuagauugcaguggggcuag

SEQ ID NO: 177972 - RNA, 978 nt, Artificial Sequence
  derived and/or modified sequence
augcaaggucgcguggccgggagcugugcgcccuuagggcuguuacucgugugccugcaccugcccggcuuauuugcacgcagcauaggcguggucgaggagaaaguaagccagaaccucgggaccaaccucccccagcugggacagccuucuuccaccgggcccucuaacucugagcauccgcagccagcacuggacccaagaaguaaugaccucgcccguguacccuugaagcuguccguuccugcaucagaugguuuuccaccugccggcgguuccgcugugcaacgcuggcccccaagcuggggucugccugcaauggauaguuggccuccugaggacccguggcagaugauggcugccgcggcugaggauagauugggugaggccuuaccagaagaguugucauaccucucaucagcagcugcuuuagcccccggauccggaccacugccaggggaaucuuccccagacgccacuggguugucgccaaaagcuucgcuucugcaccaggacuccgaauccagaagauuaccacgaucaaacucacugggugcuggcggcaagauccucucgcaacgccccccuuggucucuuauucaccgagucuuaccagaucacccuuggggcacccucaauccuagugugagcuggggcggcggcgggccuggcaccgguuggggaacccgcccgaugccacauccagagggcauaugggggaucaacaaccagccacccgguacaucauggggaaacauaaaccgguaucccgguggaucuuggggaaacauaaaccgauauccuggcggcaguuggggcaauauuaaucgguauccuggaggaagcuggggaaacauccauuuauacccuggcaucaacaacccuuucccccccggaguucuucguccucccggcucauccuggaacauccccgccggcuuuccaaaccccccuucuccucggcugcaguggggcuag

SEQ ID NO: 177973 - RNA, 978 nt, Artificial Sequence
  derived and/or modified sequence
augcaggguaggguagccggaucaugugccccucucggcuugcuccugguguguuuacauuugccaggacuauucgcuagaagcauuggaguaguugaagaaaaaguuagccaaaaucugggcacaaaucugccacaacugggccagccgucaucaaccggaccgaguaacagugagcauccccagcccgccuuagauccccgcucaaacgaccuggcaagaguuccucucaaacucucuguccccgcuagugacggcuuucccccugccggaggcagcgcgguacaacgcuggccgcccagcugggggcucccugcgauggacucuuggccuccggaggacccuuggcagaugauggcagcagccgccgaggaucggcugggagaggcucuucccgaagaacucuccuaucugucuagugccgcagcgcuugcccccgguagcggaccccuccccggcgaaaguuccccugaugcaaccggacucuccccaaaagcuucucugcugcaccaggacucagaaucacguaggcuuccucgaaguaacucauugggcgcuggaggaaaaaucuugucacagaggccaccauggucauuaauucacagggugcugccggaucauccauggggaacgcuaaauccuucagucagcuggggaggagggggaccgggcaccggcuggggaacgagacccaugccucaucccgaggggauaugggggauuaacaaccaaccuccaggaaccucguggggaaacauuaacagauacccaggcgguucguggggcaacaucaaccgguacccaggcggcagcuggggcaauauuaacagauauccuggcggguccuggggaaacauacauuuauaucccggcauuaauaaucccuuuccaccuggcguacuucgaccuccagguagcaguuggaauauacccgcaggauuucccaacccacccagccccagacuccaguggggauag

SEQ ID NO: 177974 - RNA, 978 nt, Artificial Sequence
  derived and/or modified sequence
augcagggccggguugccggcagcugcgcuccauuaggacugcuucuggugugccuccacuuaccgggauuguucgcucguuccaucggcgucguagaagaaaaggucagccaaaaucucgggacuaaccugccccaacucggucagccgagcucgacugggcccuccaauuccgaacacccccaaccagcucuugauccccguaguaacgaucuggccagagucccuuugaaauuaagcguuccagccagcgauggguuuccuccugccggcgguucugccguccaaagguggccuccgagcugggguuugccggcuauggacucuuggccgccugaggaccccuggcaaaugauggcugccgcagcagaagaucggcuuggggaggcucucccugaagaacugucauaucugucaucagccgccgccuuggcaccuggcuccgguccauugccuggagaaucaucgccugaugcuacaggacuguccccaaaggccucacucuuacaccaggacagcgagucaaggaggcuaccgcgcuccaacucuuugggugcaggcggcaagauuuugagucaaaggccaccauggucacucauccauagaguccugccagaucauccauggggaaccuuaaacccuucugugucauggggaggugguggcccugguacgggauggggcacccgaccuaugccccauccagaaggcaucugggggaucaauaaccagccucccggcacuucauggggaaacauuaaucgcuaucccggcggcucaugggggaacaucaauagauauccaggugguuccuggggcaacauuaaccgguacccuggaggcucuuggggaaauauccaucuguacccuggcaucaacaaccccuuuccgcccggcguucugagaccuccuggcagcaguuggaacauuccugcaggcuuuccuaauccccccucaccccgacuucaguggggauag

SEQ ID NO: 177975 - protein, 2063 aa, Artificial Sequence
  derived and/or modified sequence
MVLDDLPNLEDIYTSLCSSTMEDSEMDFDSGLEDDDTKSDSILEDSTIFVAFKGNIDDKDFKWKLDAILKNVPNLLHMESSKLKVQKVEPWNSVRVTFNIPREAAERLRILAQSNNQQLRDLGILSVQIEGEGAINLALAQNRSQDVRMNGPMGAGNSVRMEAGFPMASGPGIIRMNNPATVMIPPGGNVSSSMMAPGPNPELQPRTPRPASQSDAMDPLLSGLHIQQQSHPSGSLAPPHHPMQPVSVNRQMNPANFPQLQQQQQQQQQQQQQQQQQQQQQQQQQLQARPPQQHQQQQPQGIRPQFTAPTQVPVPPGWNQLPSGALQPPPAQGSLGTMTANQGWKKAPLPGPMQQQLQARPSLATVQTPSHPPPPYPFGSQQASQAHTNFPQMSNPGQFTAPQMKSLQGGPSRVPTPLQQPHLTNKSPASSPSSFQQGSPASSPTVNQTQQQMGPRPPQNNPLPQGFQQPVSSPGRNPMVQQGNVPPNFMVMQQQPPNQGPQSLHPGLGGMPKRLPPGFSAGQANPNFMQGQVPSTTATTPGNSGAPQLQANQNVQHAGGQGAGPPQNQMQVSHGPPNMMQPSLMGIHGNMNNQQAGTSGVPQVNLSNMQGQPQQGPPSQLMGMHQQIVPSQGQMVQQQGTLNPQNPMILSRAQLMPQGQMMVNPPSQNLGPSPQRMTPPKQMLSQQGPQMMAPHNQMMGPQGQVLLQQNPMIEQIMTNQMQGNKQQFNTQNQSNVMPGPAQIMRGPTPNMQGNMVQFTGQMSGQMLPQQGPVNNSPSQVMGIQGQVLRPPGPSPHMAQQHGDPATTANNDVSLSQMMPDVSIQQTNMVPPHVQAMQGNSASGNHFSGHGMSFNAPFSGAPNGNQMSCGQNPGFPVNKDVTLTSPLLVNLLQSDISAGHFGVNNKQNNTNANKPKKKKPPRKKKNSQQDLNTPDTRPAGLEEADQPPLPGEQGINLDNSGPKLPEFSNRPPGYPSQPVEQRPLQQMPPQLMQHVAPPPQPPQQQPQPQLPQQQQPPPPSQPQSQQQQQQQQQMMMMLMMQQDPKSVRLPVSQNVHPPRGPLNPDSQRMPMQQSGSVPVMVSLQGPASVPPSPDKQRMPMPVNTPLGSNSRKMVYQESPQNPSSSPLAEMASLPEASGSEAPSVPGGPNNMPSHVVLPQNQLMMTGPKPGPSPLSATQGATPQQPPVNSLPSSHGHHFPNVAAPTQTSRPKTPNRASPRPYYPQTPNNRPPSTEPSEISLSPERLNASIAGLFPPQINIPLPPRPNLNRGFDQQGLNPTTLKAIGQAPSNLTMNPSNFATPQTHKLDSVVVNSGKQSNSGATKRASPSNSRRSSPGSSRKTTPSPGRQNSKAPKLTLASQTNAALLQNVELPRNVLVSPTPLANPPVPGSFPNNSGLNPQNSTVSVAAVGGVVEDNKESLNVPQDSDCQNSQSRKEQVNIELKAVPAQEVKMVVPEDQSKKDGQPSDPNKLPSVEENKNLVSPAMREAPTSLSQLLDNSGAPNVTIKPPGLTDLEVTPPVVSGEDLKKASVIPTLQDLSSSKEPSNSLNLPHSNELCSSLVHPELSEVSSNVAPSIPPVMSRPVSSSSISTPLPPNQITVFVTSNPITTSANTSAALPTHLQSALMSTVVTMPNAGSKVMVSEGQSAAQSNARPQFITPVFINSSSIIQVMKGSQPSTIPAAPLTTNSGLMPPSVAVVGPLHIPQNIKFSSAPVPPNALSSSPAPNIQTGRPLVLSSRATPVQLPSPPCTSSPVVPSHPPVQQVKELNPDEASPQVNTSADQNTLPSSQSTTMVSPLLTNSPGSSGNRRSPVSSSKGKGKVDKIGQILLTKACKKVTGSLEKGEEQYGADGETEGQGLDTTAPGLMGTEQLSTELDSKTPTPPAPTLLKMTSSPVGPGTASAGPSLPGGALPTSVRSIVTTLVPSELISAVPTTKSNHGGIASESLAGGLVEEKVGSHPELLPSIAPSQNLVSKETSTTALQASVARPELEVNAAIVSGQSSEPKEIVEKSKIPGRRNSRTEEPTVASESVENGHRKRSSRPASASSSTKDITSAVQSKRRKSK

SEQ ID NO: 177976 - DNA, 6192 bp, Artificial Sequence
  derived and/or modified sequence
atggtgctggatgacctcccgaacttagaggacatctatacatctttgtgttcaagtactatggaagactcagagatggattttgactctggtctcgaagatgatgacacaaagtccgactccatattggaggactccactatcttcgtggccttcaaaggcaacattgacgataaggatttcaaatggaaattagacgccatcctgaagaacgttccgaacctacttcacatggagtccagtaagctaaaggtccagaaggtggagccatggaactctgtacgggtaacctttaatattccccgcgaggccgccgagcggctacgcattctagctcagagcaataaccagcagctgcgtgaccttgggatactttccgtccagattgagggagagggcgccattaacctggcattggcacagaacagaagtcaggacgtgcgtatgaacgggcccatgggggcaggtaactctgtgagaatggaagctggctttccaatggccagcgggccaggcatcatacggatgaacaaccccgcaaccgtaatgattccccctggcggcaacgtaagttcaagtatgatggcacccggtccgaacccagaactccagcctagaacaccgcggcccgcgtcccaatccgatgcgatggacccactgctgtcgggactgcatatacagcaacagtcacacccatcaggaagtttagctcctccccaccatcccatgcaacctgtctcggttaatcgccagatgaaccccgctaattttccccagctccaacagcagcaacagcagcagcaacaacagcagcagcagcagcagcaacagcaacagcagcagcagcagcagcaactgcaggctcggcctccccagcagcatcagcagcagcagcctcaaggcattcgaccacagtttacagctcctacgcaggtgcccgtgccccctggctggaatcagctgccgtccggggctcttcaaccgccgcccgcacaggggtctttggggacgatgactgccaaccaggggtggaagaaagccccgctgccggggcctatgcagcagcagctccaggctcggccttcactggctacagtacagacaccgagccacccaccacccccctatccttttggctcccagcaggcctcccaggcgcatactaacttccctcagatgagtaaccccggtcaatttaccgccccccagatgaagtctttacagggtggcccatccagagtgcccactcccctgcagcaaccacacctcaccaataagtcccccgcgagttccccatcaagcttccaacaaggctcacccgcctccagtccgactgtgaaccagacacagcagcaaatgggcccgcggccacctcagaataacccccttccccagggcttccagcaaccagtgagcagcccgggcagaaacccaatggtgcagcaaggaaatgtgccacctaatttcatggtgatgcagcagcagccccccaatcagggcccccaatctctccacccaggtttaggcggcatgccaaaacgactgccgccgggcttttctgccggtcaggccaatcctaacttcatgcagggccaggtgccaagcactaccgctaccactcccggcaactccggggcaccacagcttcaggcaaaccagaatgttcaacatgcagggggacagggggcggggccgcctcagaatcagatgcaggttagccacggaccccccaacatgatgcaaccttcgctgatggggatccacggaaatatgaataaccaacaggccgggacctccggagtgcctcaggtaaatctttccaacatgcagggtcagccgcagcaagggcctccatcacagctcatgggcatgcaccagcagatcgtgccaagccaggggcaaatggtgcaacagcaggggaccctcaacccccagaatcccatgattctgagtagggcacaactcatgccacagggacagatgatggtgaaccctccctcacagaatctgggccctagcccccagcggatgacacctccaaaacagatgttgtctcagcagggaccccagatgatggcgccgcacaatcagatgatggggccccaaggccaggtgctgctccagcagaatccaatgattgaacagattatgacgaaccagatgcagggcaataagcagcagtttaatacacagaatcagagcaatgttatgcccgggccagcacagatcatgcgtggacctacacccaatatgcagggcaatatggttcagttcactggccagatgagcggacagatgctgcctcagcaggggcccgtaaacaattcaccgagtcaggtcatgggcatccaagggcaggtgctccgtcccccaggcccttctcctcacatggcccaacagcacggcgatcccgcaacgacagccaacaacgacgtgagcctgtcccaaatgatgccagacgtatctatacagcaaacaaacatggtcccaccgcacgtgcaggccatgcaaggtaattccgcctcaggaaatcatttcagcggtcacggcatgagtttcaacgcaccattcagcggagcacctaatgggaaccagatgtcctgcgggcaaaaccccgggttccccgtgaacaaggatgtgacattaacatctcctttactcgtcaatcttctgcagagcgacatttccgccggccatttcggagtcaacaacaagcagaataatacaaatgccaacaaaccaaaaaaaaaaaagcctcccaggaaaaaaaaaaatagccagcaggaccttaacacacctgatacaagaccagcaggccttgaggaagctgaccagcctcctctccccggtgagcagggcatcaacctcgataattctggcccaaaactgcccgaattctctaatcgtcctcctggataccctagtcaacccgtggaacagagacccctgcaacaaatgcctccccagctgatgcagcatgttgcaccaccacctcagcctcctcagcagcagccacaacctcaactgccacagcagcagcagccaccccctccctctcaaccccagagtcagcagcagcaacagcaacagcaacagatgatgatgatgctgatgatgcagcaagaccctaaatcagtgcgtctgcctgttagtcagaacgtccaccctccccgaggcccactgaacccggattcccagaggatgcctatgcagcagtctgggtccgtcccggttatggttagtttgcagggccctgcctccgtgcctccatcccccgataaacagcgaatgcccatgcccgtcaacactcccctgggtagcaacagcagaaaaatggtctaccaagaatcaccgcagaatccctcctcctcacccttagccgaaatggcgtcccttcccgaagccagtggatctgaggctccctccgtgccaggcggccctaataatatgccctcgcacgtagtcctgccccaaaatcagttgatgatgaccgggcccaaacccggtccgtcaccgctgtctgctacccagggagccacaccccagcagcctcctgtgaatagcctgccgagctcacatggccatcactttcctaatgtggcagctccaactcaaacaagtagacctaagactccaaatcgggcttcccctcgcccgtattatccacaaacgcctaacaacagacccccctcaactgaaccaagcgagatctccctgagtcccgagcgtctgaacgcatccatagcagggctatttccaccccagataaacataccattgccaccacggcctaaccttaatcgagggttcgaccagcagggtttgaacccaacgaccctgaaggcgattgggcaagcgccgagcaacttaaccatgaatccatccaattttgcaaccccacagacacacaaactggacagtgttgttgtcaatagtggaaagcagtccaatagtggtgcaactaagagagcctctcctagtaatagccggagaagcagcccaggcagctcaagaaagacaacacccagtccgggaaggcagaattcaaaggcgccaaaattgacacttgccagccaaaccaatgccgcccttctgcaaaatgtcgaactgccacgaaatgttctggttagtccaacacccctggccaatccacccgtgccaggatcctttccaaacaatagtggcctcaatccacagaactcgaccgtgagtgttgctgcagtaggcggggtcgtggaggacaataaggagtcactcaatgtaccacaagatagcgactgtcaaaacagccagagccggaaggaacaggtcaacatcgaactgaaggctgtcccagcacaggaagtgaaaatggtcgttcccgaggatcagagcaagaaagatggtcagccgtctgaccccaacaagctccccagcgtcgaagaaaacaagaatcttgtatcgccagccatgcgcgaggcccctacctcactgagccagctgctggacaatagtggtgcccctaacgtgacaattaagccccctggtctcactgatcttgaggtgactcctccagtggtgtccggagaagatctcaagaaagcaagcgtgatccccaccttgcaggatttaagtagcagtaaggagcctagcaattcactgaatctgccacattctaatgagctatgcagctctctggtacacccagagctatcggaggtatcttccaacgtcgccccctcaatacctcctgttatgtcccgtccagtgtccagctcaagcatctcaacacctctgccaccgaatcagatcaccgtgttcgtgacgtctaaccctataactacgtctgcgaacacctctgcagccctgcccactcacctgcagtcagcgctgatgagcacggtagtcaccatgccgaacgcgggatccaaggtgatggttagtgaggggcaaagtgcagcccaatccaacgccaggcctcagtttataacccccgtgtttataaactcctctagcatcatccaggtgatgaaggggtcccagccatcgactatccccgctgcgcccttgactactaatagcgggctaatgcccccttcggtggctgtggtcggaccacttcacatcccccagaacattaagttctcctctgcccctgtccccccaaacgcactgagttcatctccagcccctaatatccagactggcagaccactggtgctttccagcagggcgaccccagttcaacttccgtctccgccgtgtacatcctcaccagtagtgccatcccatccccctgtgcagcaggtgaaggaactgaatccagatgaagcctcacctcaagtgaacaccagtgccgatcaaaacactctgccttcttcgcagagcacaacgatggtgagtcctctgttaaccaatagccctggaagctccggcaaccgccgcagtccagtgagtagttcgaaggggaagggcaaagtcgacaaaatcggccagattctcctgaccaaggcctgcaagaaggtgacagggtcactggaaaaaggagaagagcaatacggagcggacggtgagacagaaggtcagggattggacacaactgcccccggtctgatgggaacagagcagctgtcaacagagctggacagcaagactcctacccctcccgctcctaccttattaaagatgaccagcagtcctgttggcccggggactgctagcgcgggcccatccctgcccggcggcgctctgcctacatccgtgcgctcaatcgtgacaacccttgtgcctagtgaactcatcagtgccgtgcctaccactaaaagcaaccatgggggtattgcctccgagtctctggctggaggcttggttgaagagaaggtgggaagtcacccagagctccttccttccattgcaccaagccaaaatctggtaagcaaggaaactagcaccacagctctgcaggccagtgtcgctcgacctgagctggaagtgaatgccgccatcgtgtcgggacagagcagcgagcccaaggagatcgtggagaagtccaagattccggggcggaggaactcccggaccgaggaacccacagtagcgagcgaatctgtcgagaacgggcaccgcaaacggtccagccgtccagccagcgcaagctcaagcacaaaagatattacatctgccgtgcagagcaaacggcgaaagtccaaatag

SEQ ID NO: 177977 - DNA, 6192 bp, Artificial Sequence
  derived and/or modified sequence
atggttttagacgatctgcctaacttggaggacatatacacctccctgtgctccagtaccatggaagatagcgaaatggatttcgacagcggccttgaagatgacgatactaagagtgacagcattcttgaggacagtactatcttcgtggctttcaaagggaatatcgatgacaaggactttaagtggaaactggacgccatcctgaagaatgtgccgaacctccttcatatggagtctagcaagctcaaggtgcagaaggttgagccatggaattcagttcgcgtgacttttaatatccctagagaagcagctgaacgccttcggatactcgctcaatccaacaatcagcaactcagggatctgggcatcttgtccgtccagattgagggggaaggggccatcaaccttgccttagcacaaaatcgcagccaggacgttagaatgaacgggcctatgggcgcaggtaattccgtgcgaatggaagccggctttccaatggcttctgggccagggataatccgaatgaacaaccccgctaccgtcatgattccacctggggggaatgtaagctcttcgatgatggcccccgggcccaatcctgagctccaacctcgaacccctcgacctgcatctcagtccgacgcaatggatccactgctttctgggctgcatatccagcagcagtcgcacccctcagggtcactggctcctccccatcaccctatgcaacctgtgtcagtaaaccggcagatgaaccccgcaaatttcccccagctgcagcaacagcagcagcagcaacagcagcagcagcagcaacaacagcagcagcaacagcagcaacaacagcagcagcttcaggcccgccctccacagcagcatcagcagcagcagccacagggtatccgcccccaattcaccgcaccgacccaggtgcccgttcctcccggatggaatcagctccctagcggtgcccttcaaccacctcccgcacagggcagcctgggaactatgactgcaaatcagggatggaaaaaggccccactccccggccctatgcagcaacaactgcaagcccggccttctttagccacggtgcagacaccaagtcatccccctccaccctacccttttggttcccaacaagcctcacaggcacacactaactttccacagatgtcgaaccccgggcagtttacagccccgcagatgaagtctctgcaggggggcccctctagagtcccaactcccttgcagcagcctcatctcacaaacaagtctcccgcctctagcccctcgtctttccaacaggggtctccggcaagcagcccaaccgtgaatcagacccagcagcagatgggaccccgtccaccacagaacaatccacttccacagggatttcagcagcctgtgtcttctcccgggcgcaatcccatggtacagcaggggaatgtacctcctaatttcatggtcatgcagcagcagccacccaatcaggggcctcagtcgcttcacccaggccttggcgggatgccaaagaggttgccccctggattctctgccgggcaggccaacccaaacttcatgcagggccaggtgccctctacaacagccactactccaggaaactcaggtgcacctcagctccaggcgaaccagaacgtgcagcacgctgggggacagggggccggtccgccacagaaccagatgcaggtgtcgcatgggccacctaacatgatgcagcccagcctgatggggatccatggaaatatgaataaccagcaggcaggaacaagcggagttcctcaagtgaatctgtctaacatgcagggccagccccaacaaggtcccccgtcccagctcatgggcatgcaccaacagattgtgccttcccagggccaaatggtacaacagcaaggtactttgaacccacaaaaccccatgatcctgtctagagcccagctgatgccacaaggccaaatgatggtgaatccaccgtcgcaaaatctaggcccatctcctcagcgcatgacacctcccaagcagatgctgtctcagcagggcccacagatgatggcaccgcacaatcaaatgatgggaccccagggacaagtgctgcttcagcagaatcccatgatcgagcagataatgaccaatcagatgcagggcaataaacagcaatttaacactcagaaccagagcaacgttatgcccgggccagcccaaatcatgcggggccctacaccaaacatgcagggcaacatggtccagttcacggggcagatgagcggccagatgttgccacagcagggaccagtgaacaacagtccaagtcaagtcatgggaattcaaggccaggtgctgagaccgccaggaccatcaccgcacatggcccagcagcacggtgatcctgccacgaccgcaaacaatgacgttagtttatcacagatgatgccagatgtgagcatacagcagacaaatatggtaccacctcacgttcaggccatgcaggggaactctgctagcggcaatcacttttctgggcatggtatgagctttaatgctccgttttcaggggcaccaaacgggaaccagatgagttgcggtcagaatcccggcttcccagtgaataaagacgtgaccctgacttctcccctcctggtgaacttactgcaaagcgatatctcagcgggacacttcggcgtcaataataaacagaataatacaaacgccaacaagcccaagaagaaaaagccgcctcgtaaaaaaaaaaactctcagcaggacctgaacaccccggataccagacctgcgggactggaggaggcagatcagcctcccttgccaggggaacaggggattaacctagacaactctgggcccaagctgccagagttcagcaatcggcctcccggatatccctcccagcctgtggagcaaagaccattacaacaaatgcctccgcaactgatgcagcacgtggctcctcctccacagcctccacagcagcaaccgcagcctcaactccctcagcagcagcagccccccccgccttcccagccgcagtcccagcagcagcaacaacagcagcaacagatgatgatgatgctcatgatgcagcaagaccccaaatccgtgaggttgcctgtcagtcagaatgttcatcccccccggggacctcttaaccccgatagtcaaagaatgcctatgcagcaaagtggctcggttcccgtaatggtgagcctccaaggaccagcttcagttccaccgtccccagataagcagcggatgcctatgccagtcaatacccccctgggatccaattcaaggaaaatggtttatcaggaatcgccacagaacccatcatcctctcctcttgctgagatggcatcattgcccgaagccagcggcagcgaggcaccgtctgtcccgggaggaccaaacaatatgccgagccacgtggtgcttccccagaatcagctcatgatgaccggccccaagccagggccttctcccctgtccgctacacagggagcaaccccacagcagcctccggtgaactctctcccctcttcccatgggcaccactttcccaatgtagccgccccgacacagaccagtcgtccaaagacgccaaatagagcgagccctcggccttattatccacagacccctaacaaccgcccaccaagtaccgaaccctcagaaatctcgttgtctcctgaacgattaaatgcttcaatcgccggcctgtttcccccccagattaatattccccttccaccaagacctaatcttaatcgagggttcgaccagcaggggctgaatccaactaccctcaaagccattggacaggcccccagcaatctcaccatgaatccttcaaacttcgcaacaccacagacacataaactcgattctgtggtggtcaacagtgggaagcaatcaaattcaggggccacaaaaagggctagcccgagcaacagcaggagatctagtccagggtcctctaggaaaactacaccctctcccggccgccagaatagcaaagcaccaaagctgacactcgctagtcagacaaatgctgccctgcttcagaatgtagagttaccacggaacgtgctggtgtctccaaccccccttgcaaatccacccgtgccaggatcattcccaaataattctggcctgaatccacagaatagcactgtatcagtggccgctgtggggggtgttgttgaggacaataaggaatccttaaacgtgccgcaggatagtgactgtcagaactcacagagcaggaaagagcaggtgaatatagagctcaaggcggtcccagcacaagaagttaagatggtcgtgcctgaggatcagtctaagaaagacggacagccctccgatccaaacaaattgccaagcgtcgaggagaacaaaaacctcgtgtcccccgccatgcgcgaggctccgaccagcctgagccagctgttggataattcaggggccccaaacgtcaccattaagccaccaggtctgaccgacctggaagtcactccacccgtggtttcgggggaggaccttaaaaaagcttcagtaatcccgacccttcaagatcttagttcttctaaggaaccctccaactcactgaacttgccccacagcaacgaactgtgcagcagccttgttcatcccgaactgtctgaagtctctagtaatgtcgccccctcaatcccaccagtgatgagcaggcctgtgtccagtagttctatctctacacctctgccacctaatcaaatcactgtttttgttacctctaaccctatcacgactagcgccaacacttctgctgcactccctactcatctgcaatcggctctgatgtccacagtggtgacaatgcccaacgccggtagtaaagtcatggtgtctgagggacagagtgcagctcaaagtaacgcgcgcccccagttcatcacccctgtattcattaactccagttctatcatccaggtcatgaaggggagtcagccttcaaccatcccagccgccccactgaccacaaactctgggttaatgcctcccagtgtggccgtagtgggaccactccatattccccagaatattaaattcagctccgcgcccgttccacctaatgcgctgagctctagccctgccccaaatatacagacaggtaggccccttgtgctctcttctcgagcgacccctgtgcagttaccttcaccaccttgtacttcttctccggtggtcccatcgcatcccccagtacagcaggtaaaagaattgaacccagacgaagccagccctcaggttaacacaagtgctgaccaaaacaccttaccaagcagccagagcacaacgatggtgagccccctgctgacgaatagtcctggctcctccggcaatcgaagatcccctgtgtcctcctctaaggggaagggcaaggtcgacaaaattgggcagattctgcttacaaaagcgtgcaaaaaggtcacagggtccctcgagaagggcgaagaacaatacggcgctgatggcgagaccgagggccagggccttgatactacggctcccggactcatgggtactgaacagctgagtacagagctggactctaagacacccactccccccgcgcctactctgttgaaaatgacaagctccccagtgggccctggtaccgcctctgctggtccctcactgcctggcggcgccttgcctacgtcagtgcgaagcatcgtaaccacactagtgccttctgagctcatttccgccgtgccaactaccaaaagtaaccatggtgggattgcatctgaatctctcgctggagggctagtggaggaaaaggtgggcagccatcccgagttgttgccctccatagcccctagtcagaacctcgtcagcaaggaaacttccactacggccttgcaggctagcgtagcccgaccggagctggaggtgaacgcagcaattgtaagcgggcagtcctccgagcccaaagagattgtggagaagagtaagattcctgggcgccgcaattcgcgaacagaagagcccactgtcgcctccgaaagcgtagagaatggccaccgcaagaggagttctcggcccgcctcagcctcctccagcacaaaggatattaccagcgctgtccagagcaagcgaagaaaaagtaagtag

SEQ ID NO: 177978 - DNA, 6192 bp, Artificial Sequence
  derived and/or modified sequence
atggtgctggatgacctgcccaacctggaggacatctacaccagcctgtgcagcagcaccatggaggacagcgagatggactttgacagcggcctggaggatgatgacaccaagagtgacagcatcctggaggacagcaccatctttgtggccttcaagggcaacattgatgacaaggacttcaagtggaagctggatgccatcctgaagaatgtgcccaacctgctgcacatggagagcagcaagctgaaggtgcagaaggtggagccctggaacagcgtgcgggtgaccttcaacatcccccgggaggccgctgagcggctgcgcatcctggcccagagcaacaaccagcagctgcgggacctgggcatcctgtctgtgcagattgaaggagagggcgccatcaacctggccctggcccagaacagaagccaggatgtgaggatgaatggccccatgggcgccggcaacagcgtgaggatggaggccggcttccccatggccagcggccctggcatcatccgcatgaacaacccagccaccgtgatgatccccccaggcggcaatgtgagcagctccatgatggcccctggccccaaccctgagctgcagcccaggacccccaggcctgccagccagagtgatgccatggaccccctgctgagcggcctgcacatccagcagcagagccaccccagcggcagcctggccccaccccaccaccccatgcagcctgtgtctgtgaaccggcagatgaacccagccaacttcccccagctgcagcagcagcagcagcagcagcagcagcagcagcagcagcagcagcagcagcagcagcagcagcagcagcagcagctgcaggcccggcccccccagcagcaccagcagcagcagccccagggcatccggccccagttcaccgcccccacccaggtgcctgtgcccccaggctggaaccagctgcccagcggggccctgcagcccccaccagcccagggcagcctgggcaccatgacagccaaccagggctggaagaaggcccccctgcccggccccatgcagcagcagctgcaggcccggcccagcctggccaccgtgcagacccccagccaccccccaccaccctaccccttcggcagccagcaggccagccaggcccacaccaacttcccccagatgagcaaccctggccagttcaccgccccccagatgaagagcctgcagggcggccccagccgggtgcccacccccctgcagcagccccacctgaccaacaagagccctgccagcagccccagcagcttccagcagggcagccctgccagcagccccaccgtgaaccagacccagcagcagatgggccccaggcctccccagaacaaccccctgccccagggcttccagcagcctgtgagcagccctggcaggaaccccatggtgcagcagggcaatgtgccccccaacttcatggtgatgcagcagcagccccccaaccagggcccccagagcctgcaccctggcctgggcggcatgcccaagaggctgcccccaggcttctctgctggccaggccaaccccaacttcatgcagggccaggtgcccagcaccacagccaccaccccaggcaacagcggggccccccagctgcaggccaaccagaatgtgcagcacgccggcggccagggcgccggccccccccagaaccagatgcaggtgagccacggcccccccaacatgatgcagcccagcctgatgggcatccacggcaacatgaacaaccagcaggccggcaccagcggcgtgccccaggtgaacctgagcaacatgcagggccagccccagcagggcccccccagccagctgatgggcatgcaccagcagatcgtgcccagccagggccagatggtgcagcagcagggcaccctgaacccccagaaccccatgatcctgagccgggcccagctgatgccccagggccagatgatggtgaacccccccagccagaacctgggccccagcccccagaggatgaccccacccaagcagatgctgagccagcagggcccccagatgatggccccccacaaccagatgatgggcccccagggccaggtgctgctgcagcagaaccccatgattgagcagatcatgaccaaccagatgcagggcaacaagcagcagttcaacacccagaaccagagcaatgtgatgcctggccctgcccagatcatgaggggccccacccccaacatgcagggcaacatggtgcagttcaccggccagatgagcggccagatgctgccccagcagggccctgtgaacaacagccccagccaggtgatgggcatccagggccaggtgctgcggcccccaggccccagcccccacatggcccagcagcacggggaccctgccaccacagccaacaatgatgtgtccctgagccagatgatgccagatgtgtccatccagcagaccaacatggtgcccccccacgtgcaggccatgcagggcaacagcgccagcggcaaccacttcagcggccacggcatgtccttcaatgcccccttcagcggggcccccaacggcaaccagatgagctgtggccagaaccctggcttccctgtgaacaaggatgtgaccctgaccagccccctgctggtgaacctgctgcagagcgacatctctgctggccactttggagtgaacaacaagcagaacaacaccaatgccaacaagcccaagaagaagaagccacccaggaagaagaagaacagccagcaggacctgaacaccccagacaccaggcctgctggcctggaggaggccgaccagccccccctgcctggagagcagggcatcaacctggacaacagcggccccaagctgcctgagttcagcaaccggcccccaggctaccccagccagcctgtggagcagaggcccctgcagcagatgccaccccagctgatgcagcacgtggcccccccaccccagcccccccagcagcagccccagccccagctgccccagcagcagcagcccccaccacccagccagccccagagccagcagcagcagcagcagcagcagcagatgatgatgatgctgatgatgcagcaggaccccaagtctgtgcggctgcctgtgtcccagaatgtgcaccccccccggggccccctgaacccagacagccagaggatgcccatgcagcagagcggctctgtgcctgtgatggtgtccctgcagggccctgcctctgtgccccccagcccagacaagcagaggatgcccatgcctgtgaacacccccctgggcagcaacagcaggaagatggtgtaccaggagagcccccagaaccccagcagcagccccctggccgagatggccagcctgcctgaggccagcggcagcgaggcccccagcgtgcctgggggccccaacaacatgcccagccacgtggtgctgccccagaaccagctgatgatgacaggccccaagccaggccccagccccctgagcgccacccagggcgccaccccccagcagccccctgtgaacagcctgcccagcagccacggccaccacttccccaacgtggccgcccccacccagaccagccggcccaagacccccaacagagccagcccccggccctactacccccagacccccaacaacagaccacccagcacagagcccagcgagatcagcctgagccctgagcggctgaatgccagcattgctggcctcttccccccccagatcaacatccccctgcccccccggcccaacctgaacagaggatttgaccagcagggcctgaaccccaccaccctgaaggccatcggccaggcccccagcaacctgaccatgaaccccagcaactttgccaccccccagacccacaagctggacagcgtggtggtgaacagcggcaagcagagcaacagcggggccaccaagagggccagccccagcaacagccgccgcagcagccctggcagcagcaggaagaccacccccagccctggccggcagaacagcaaggcccccaagctgaccctggccagccagaccaatgctgccctgctgcagaatgtggagctgcccagaaatgtgctggtgagccccacccccctggccaacccccctgtgcccggcagcttccccaacaacagcggcctgaacccccagaacagcacagtgtctgtggccgctgtgggcggcgtggtggaggacaacaaggagagcctgaatgtgccccaggacagcgactgccagaacagccagagcaggaaggagcaggtgaacatcgagctgaaggctgtgcctgcccaggaggtgaagatggtggtgcctgaggaccagagcaagaaggatggccagcccagcgaccccaacaagctgcccagcgtggaggagaacaagaacctggtgtccccagccatgagggaggcccccaccagcctgagccagctgctggacaacagcggggcccccaacgtgaccatcaagcccccaggcctgacagacctggaggtgaccccacctgtggtgtctggagaggacctgaagaaggccagcgtcatccccaccctgcaggacctgagcagcagcaaggagcccagcaacagcctgaacctgccccacagcaatgagctgtgcagcagcctggtgcaccctgagctgtctgaggtgagcagcaatgtggcccccagcatcccccctgtgatgagcaggcctgtgagcagcagcagcatcagcacccccctgccccccaaccagatcaccgtgtttgtgaccagcaaccccatcaccaccagcgccaacaccagcgctgccctgcccacccacctgcagagcgccctgatgagcacagtggtgaccatgcccaatgccggcagcaaggtgatggtgtctgagggccagagcgctgcccagagcaatgcccggccccagttcatcacccctgtgttcatcaacagcagcagcatcatccaggtgatgaagggcagccagcccagcaccatcccagctgcccccctgaccaccaacagcggcctgatgcctccttctgtggccgtggtgggccccctgcacatcccccagaacatcaagttcagcagcgcccctgtgcccccaaatgccctgagcagcagccctgcccccaacatccagacaggccggcccctggtgctgagcagccgggccacccctgtgcagctgcccagccccccctgcaccagcagccctgtggtgcccagccacccccctgtgcagcaggtgaaggagctgaacccagatgaggccagcccccaggtgaacaccagcgctgaccagaacaccctgcccagcagccagagcaccaccatggtgagccccctgctgaccaacagccctggcagcagcggcaacagaagaagccctgtgagcagcagcaagggcaagggcaaggtggacaagattggccagatcctgctgaccaaggcctgcaagaaggtgacaggcagcctggagaagggggaggagcagtacggggctgatggagaaacagagggccagggcctggacaccacagcccctggcctgatgggcacagagcagctgagcacagagctggacagcaagacccccaccccaccagcccccaccctgctgaagatgaccagcagccctgtgggccctggaacagccagcgctggccccagcctgcccggcggggccctgcccacctctgtgcgcagcatcgtgaccaccctggtgcccagcgagctgatctctgctgtgcccaccaccaagagcaaccacggcggcatcgccagcgagagcctggccggcggcctggtggaggagaaggtgggcagccaccctgagctgctgcccagcatcgcccccagccagaacctggtgtccaaggagaccagcaccacagccctgcaggcctctgtggcccggcctgagctggaggtgaatgctgccatcgtgtctggccagagcagcgagcccaaggagatcgtggagaagagcaagatccctggaagaagaaacagcaggacagaggagcccaccgtggccagcgagagcgtggagaatggccacaggaagaggagcagcaggcctgccagcgccagcagcagcaccaaggacatcaccagcgctgtgcagagcaagaggaggaagagcaagtag

SEQ ID NO: 177979 - DNA, 6192 bp, Artificial Sequence
  derived and/or modified sequence
atggtgctggacgacctgcccaacctggaggacatctacaccagcctctgtagctccacaatggaagacagcgagatggatttcgactccggcttggaggacgacgatacaaagagtgattctattctggaggatagcacgattttcgttgcgttcaagggcaatatcgacgacaaagattttaaatggaaactggacgctattttgaaaaacgtgcctaatctgctgcacatggagtcgagcaaattaaaggtccaaaaggtggagccgtggaatagcgtcagagtgacgtttaatataccacgtgaggcagcagagcggctgcggattctggctcagtcgaataaccagcaattgagggaccttggcattctctcggtgcaaatcgagggagagggggccatcaatctggcactagctcagaaccgtagccaagacgttagaatgaacggacccatgggcgccggaaattctgtccggatggaagccggattcccgatggccagtggacctggcatcataagaatgaataacccagccactgtgatgatcccaccggggggaaacgtctcgagcagcatgatggcaccaggtccaaacccggagttgcaaccaagaacacctagacccgcatcgcagagtgatgcaatggatccactcttgtccggattgcatatccaacagcagtcccatccgagtggtagtctggctcctccgcaccatcctatgcaaccagtgtcggtgaaccggcagatgaaccccgctaatttcccacagctccagcaacagcagcagcagcaacagcagcagcagcaacagcagcagcagcaacaacagcagcagcagcaacagcaactgcaggcaagacctccacagcagcatcagcagcagcaaccacaggggattagaccccagtttaccgcccctactcaggttcctgtcccccctggctggaatcagctcccttccggtgcactgcagcctccccctgcacaggggagcctggggacgatgacagcaaaccaggggtggaaaaaggcaccgctgcccggccccatgcagcagcagctgcaggctagaccttccctcgctaccgtgcagaccccatcacaccctcctcccccctatcccttcggctcacaacaggcctcgcaggctcacaccaatttcccccagatgagtaatcctggacagtttactgcacctcagatgaagtctctccaggggggaccctcaagggtccctactccacttcaacagccccacctgacgaataagagtccagccagcagccctagcagcttccagcaggggagccccgcctcctcccctaccgttaaccagacgcagcagcagatgggcccgagacctccccagaataaccccctaccgcagggctttcagcagcccgtgagtagtcccggcaggaatcccatggttcagcagggtaacgtgcctccaaactttatggtgatgcaacagcaacctccgaatcaaggacctcagtcgctgcacccgggattgggcggaatgcccaagcgcctgccacccgggttctccgctggacaggcaaatccaaattttatgcaaggtcaggttccatctaccaccgccacaaccccgggaaattccggtgcaccccaactgcaagccaaccagaatgttcagcatgccgggggccagggagccgggcctccacagaatcagatgcaggttagccacgggccacccaacatgatgcaaccatctctcatgggcattcacgggaatatgaacaaccagcaggccgggacctccggggtgccacaggtaaatctgtcaaatatgcaaggacagcctcagcagggcccaccatcgcaactcatgggaatgcatcagcaaattgtaccaagccaaggacagatggtccaacaacaaggcaccctgaatcctcaaaatcctatgattctgtctagagcacaacttatgccccagggtcagatgatggtcaatccccctagccagaatttgggtccctcccctcaacgcatgactccaccgaaacagatgctgtctcagcagggaccgcagatgatggctccccacaaccaaatgatgggtcctcaggggcaggttctcctgcagcagaacccaatgatcgagcagatcatgacaaaccagatgcaaggaaacaagcagcagttcaacacgcagaatcaaagcaatgttatgcctggccctgcccagattatgagaggacctacgccaaatatgcagggtaatatggttcagttcaccggacagatgagcggtcagatgttgcctcagcagggacctgttaataattccccctctcaggtcatgggaatccaggggcaggttctgaggcctcctggaccttccccccatatggcgcagcaacacggtgaccccgcaactactgcaaataacgacgtctctctgagccaaatgatgccagatgtgagtatacagcaaacaaacatggttccaccccacgtccaggccatgcaaggcaacagcgcatccgggaatcacttttctggccacggaatgagtttcaatgccccattcagtggggcccctaacggaaaccagatgagctgtggccagaatcctggcttcccggtgaacaaagatgtgaccctcactagtcctctcctggtgaatctgctccagtccgacatctctgctggtcatttcggggtgaacaacaagcaaaacaataccaatgcaaataagccgaaaaagaaaaagccaccacgcaaaaagaagaattcacagcaagatcttaatacaccagatactcgtccagctggcctagaggaggccgatcagcctcccctccccggagagcagggtattaatctggacaatagcggccccaagctgcctgaattctcaaaccggcccccaggctatccttcacagcccgttgaacagagacctctccagcagatgcctcctcagctgatgcagcacgtagcgcctccaccacagcccccacaacagcagccccagccccagctgccacagcagcaacagccccctcccccttcacagccacagtcccagcagcagcaacagcagcaacagcagatgatgatgatgctgatgatgcagcaagaccctaaatccgtgcgtcttccggtttctcagaatgtccacccgcctagaggccccctgaaccccgattcccagcgcatgccaatgcaacagtcaggtagcgtgcctgtgatggtaagtttgcaggggccagcttctgtaccaccgagcccagacaagcagaggatgcctatgccggtgaacacccctctcggctctaactctcgtaaaatggtgtatcaggagtccccccagaacccatccagttcccctttggctgagatggccagtctccccgaggcatcaggctccgaggcgccttctgtgcccgggggacctaataacatgccttcccacgtcgttcttccacaaaaccagttgatgatgacaggtcctaagcctggccctagccccctttctgccacccagggggctacccctcagcaacctcctgtaaatagtttacccagctctcacgggcaccattttccaaacgtggccgcacccacacagacgtccagaccgaaaaccccgaatcgcgcgtcaccacggccttattacccacagacgccaaataataggcctcctagtactgagccttccgaaatatccctcagtcccgagcggctcaatgcgtccatcgccggcttattcccgccacagatcaacatccccttgcccccgcgtcctaacctcaatcgggggttcgatcagcagggcctgaatccgacaaccctgaaggctatcggccaggcacccagcaacttgaccatgaatccttctaattttgccacccctcaaactcacaaactggacagcgtagtggtaaactccgggaagcagtccaacagcggcgcaaccaaaagggcctccccaagtaacagtaggagaagtagccctgggtcctcacggaaaactactccatcccctggccgccagaatagcaaggctcccaagctgactctcgcctctcagacaaatgctgctttgctccagaatgtcgaactcccaagaaatgttctggtcagccctacccctctggcaaatccccctgtacccggaagcttcccaaacaattcaggtctgaacccacaaaacagcacagtaagtgtggccgccgtgggtggagtggtcgaggacaataaagaatccctgaacgtccctcaagattctgattgtcagaactcccagagccgtaaagagcaagttaacatcgaactgaaagctgtgcccgcacaggaggtgaaaatggtggtgcctgaagaccagtcaaaaaaggatggccaacccagtgaccctaataaattgcctagcgtcgaggagaacaagaatttagtttcgcctgccatgcgggaggcacccacatcgctgagccagcttctcgacaatagtggggcacctaatgtgacgatcaaacctcccggcctgacagacctggaagtaaccccccccgtcgtgtcaggagaggacttgaagaaagcaagcgttattcctacactccaggatctgtcctcgtctaaggagccatcgaattctctgaaccttccacattccaatgaactatgctcatcactagtacaccccgaattgtctgaagtgagcagtaatgtcgccccgtctatcccgccagttatgtcgcgcccagtgtccagctcctccataagcaccccgctgcctccaaaccagattactgtctttgtaacttccaatcctatcacaacttctgccaacacgtccgcagcgcttcctacccatctccaatctgctctgatgtccactgttgtcaccatgcccaatgccggatccaaggtgatggtttcagaggggcagtctgctgcccagtcaaacgcccgccctcaatttatcacaccggtgtttatcaatagttcctcaattatccaggttatgaagggcagccagccttccactattccagccgcacccctgacaaccaactccggcttaatgcccccctctgttgcagtggttgggcccctccacatcccccaaaatatcaaattcagtagtgctccagttccgcctaatgctttgagttctagccctgcccctaatattcagactggccgccccttggtgctgagttccagagcaacgcctgttcagctacccagccccccttgtaccagctcaccagtggtaccgtcccatccccctgtccagcaggtaaaggaactaaaccccgacgaggcatcccctcaggtgaatacatcagcagaccagaatacgctcccgtcctcccagagcaccacaatggtctcccccctgttaactaatagtcccggatcctccgggaatagacggtcacccgtgtccagttctaaggggaagggcaaggtcgataagattggacaaattcttctcactaaggcctgcaagaaagtgaccgggtccctggaaaagggtgaagagcagtacggagccgacggggagactgaggggcagggtttagataccactgcccctggcttaatgggaaccgaacaactaagcaccgaattggactcaaaaactccaaccccccctgccccaaccctcctgaagatgacctcgagcccagtgggcccgggcactgcctccgcaggacctagtctgccaggaggagcactgcctactagcgtgcgatcgattgtgactacattagttccttccgaactcatctccgccgtgccaactacgaagagcaaccatgggggaatcgcatctgaaagtcttgccggagggctagtggaagaaaaagtggggtctcatccggagttgctgccttccatcgccccctctcagaacctggtgagcaaggaaacatctactaccgccttgcaagcttccgtagccaggccagaattggaagtgaatgccgcaattgtaagcggccagtcatctgaaccaaaagagatcgtggaaaagagcaaaatccctggccgaaggaactctagaaccgaggagcctaccgttgcatccgaaagtgtggaaaacggtcacagaaagcggtccagtcgacccgcatccgcctcttcatccaccaaagatatcacttctgccgttcagtctaagcgccggaaaagcaagtag

SEQ ID NO: 177980 - DNA, 6192 bp, Artificial Sequence
  derived and/or modified sequence
atggtgctggacgacctgcccaacctggaggacatctacaccagcctttgttcatctactatggaggactctgaaatggactttgattcaggcctggaggacgacgacacaaagtctgattcaattctcgaagacagcaccatattcgtggcattcaaaggcaacattgacgataaagactttaaatggaaattggatgcaatcttaaaaaacgtacctaacctactgcatatggagtccagcaagctgaaggtccagaaggtggaaccgtggaactctgttagagtcacttttaacatccctcgagaagccgctgaaagactgagaattctggcccaatccaataaccaacaacttagagacctgggcatcctaagtgtgcaaattgaaggggagggggcaatcaacctcgcactcgcccagaacagatcccaggatgtccgaatgaatgggccaatgggcgcaggaaacagtgtgagaatggaagcagggtttccgatggccagcggaccgggcattattcggatgaataaccctgccaccgttatgatcccacctggaggtaacgtaagcagctcaatgatggcacccggacctaatcccgaattgcagccgcgcacccctaggcctgcttctcagtctgatgctatggacccgctcttatcagggttgcatatccaacagcagtcacatcccagtggctcactcgcccccccacaccatcccatgcagcccgtatcagttaatcgacaaatgaaccctgcaaattttccgcagctacagcaacagcagcagcaacagcagcagcagcagcaacagcaacagcagcagcaacaacagcaacagcaacagcagttgcaggctcgcccacctcagcagcatcagcagcagcagccccagggtattcggccacagtttactgcccctacccaggtgccagtacctcctggctggaatcaacttccctctggagctcttcagcctccgcccgctcaagggtctcttggcaccatgacggctaaccagggttggaagaaagcaccactacctgggccaatgcagcagcaactgcaggcccggccttccctggcaactgtacaaaccccaagccacccacccccaccctatccgtttgggagtcaacaggcttctcaggcacacaccaatttcccacagatgtcaaaccccgggcagttcacagctcctcagatgaaatccctgcaggggggaccctctagggtgcctaccccattgcagcaaccccaccttacaaacaaatcccccgctagttctccttcaagctttcagcagggctcccctgcaagctcccccactgtcaaccagactcagcagcagatggggcctaggccaccccagaacaatcctctgccacagggtttccagcagccagtgagcagccctgggaggaaccctatggttcagcagggtaacgtgcctcccaatttcatggttatgcaacaacagccgccaaatcaaggcccgcagtctctacacccaggattgggtggaatgcctaagagactacctcctggatttagcgcaggccaggcaaatcccaacttcatgcaaggccaggtgccaagcaccacagctaccactcctggaaactccggagcaccccagcttcaagctaaccagaacgttcagcatgcgggcggacaaggtgcaggacccccacagaatcagatgcaggtctcgcatggacctccaaatatgatgcagcccagtctgatgggaatccacggaaacatgaacaaccagcaagctggaacatcaggcgtgccacaggtcaatctctctaatatgcagggccagcctcaacagggaccaccgtctcagcttatgggcatgcaccagcagatcgttccatctcaagggcagatggttcagcagcagggcacactcaacccccagaacccaatgatcctgtcccgggcacagctcatgcctcaggggcagatgatggtgaatcctccgagtcaaaatctaggtccctcgcctcaacgtatgactccgccgaagcagatgttgtcccagcaagggccgcaaatgatggccccgcacaaccagatgatgggacctcaggggcaggtactgctgcagcagaatccaatgatagagcagataatgacgaatcagatgcagggaaataaacagcaattcaatacccagaatcaaagcaatgtgatgccggggcccgcccaaatcatgcgaggacccacccctaatatgcagggcaatatggtgcagttcactggccaaatgtcaggccagatgctgccgcagcagggccccgttaataattcaccttcccaggtcatgggcatccagggacaggtactacgcccaccaggtccctcacctcatatggcgcaacagcatggggaccctgctacgactgccaacaatgacgtgtctttgagccaaatgatgcctgacgtgagcatccagcaaaccaacatggtaccgccacacgtgcaagctatgcagggaaacagtgcctccggcaatcacttctcagggcatggcatgagctttaatgcaccatttagtggtgctcccaatgggaatcagatgtcatgtggtcagaaccccggcttccccgtcaataaggatgtgacactgactagtcctttgctcgtgaacctactccagtccgacatctccgcagggcatttcggtgtaaataataagcagaacaacacaaatgccaacaaaccaaagaagaagaaaccgccgcgcaaaaagaaaaattctcagcaggatctgaataccccagacaccagacctgccgggctggaagaggccgatcagcctcctttgcctggagaacaaggtatcaacttggacaattcaggcccaaaactacctgagttctcaaacagacctcccggctacccaagtcagccagtggagcagcggccccttcagcagatgcccccccaactcatgcaacatgtggcaccgcctcctcagccacctcagcagcagccccagcctcagctgccgcaacaacaacagccaccacccccaagtcagccacagtctcaacagcagcagcagcagcagcagcagatgatgatgatgttaatgatgcagcaggacccaaaaagtgtgaggttgccagtgtctcagaacgtccatccaccccgaggacctttgaatccggattcacagcggatgccgatgcaacagtctgggtcagttcctgtgatggtgtccctccaaggacccgccagcgtccccccatctcctgataagcagaggatgccgatgcccgtcaatacccccctgggtagcaacagtaggaaaatggtgtaccaggaatcaccgcagaacccctcctccagcccactggcagaaatggcttctcttccggaagcttcgggcagcgaggcacctagcgtgcccggcgggcctaataatatgccaagtcacgtagtgctgcctcagaaccagctgatgatgaccggaccaaaaccgggtcctagcccattatcagctacgcagggggcaacccctcagcagccccctgtgaatagccttccatcaagccacggtcatcattttccaaatgtggccgcgcccactcaaacgagtaggcccaagacacctaatcgagccagtcccagaccatactaccctcagacccctaacaacagaccaccctccaccgaaccttctgagatctccctgagccccgaaagactaaacgccagcatagccggactgttcccacctcaaattaacattccactgccccccagaccaaacttgaacagagggttcgatcaacaaggattgaatccgaccactctgaaggccataggacaggcaccgtccaacctgacaatgaaccccagtaactttgcaaccccacagacccataagctggactcggtggttgtcaattctggcaaacagtctaattctggcgctactaagcgggcctcaccgtccaattctcggagatctagccccggatcttctcggaagaccactccctcacctggccggcaaaattcaaaggcacctaaactgactttggccagtcagaccaacgctgcactgctccagaatgtggaacttcctaggaatgtgctcgtctctcccactcccctagctaacccacccgtaccagggtcattcccgaataacagcggactcaatcctcagaacagcacagtgtctgtcgcagccgtggggggggtcgtcgaagataacaaggaatcacttaatgtgcctcaggacagcgactgccagaacagtcagagccggaaagagcaggttaatattgaactgaaggccgtcccggcacaggaggtaaagatggtggtccctgaggatcagagcaaaaaagacggccagccctctgaccccaacaaattacccagcgtagaagaaaataaaaacctggtgagcccagccatgcgcgaagccccaacttctcttagtcaactattggacaactctggggctcccaatgtcacaatcaaacccccgggccttaccgacttggaagttaccccgccggtggtgagcggagaagatctaaaaaaagcctccgttatacctaccctgcaagatttgagtagctcaaaagaaccaagcaactccttaaatcttccacattcgaatgaactttgctctagtttagtccatcctgaactcagcgaagtgtcatctaacgtggccccatccattcccccagtcatgtccaggcctgtttcttcctcgtccataagcacccccctgccgccaaatcagatcacagtgtttgtgacctcaaaccctattactacaagtgcgaatactagcgctgccctaccaactcatctgcagtccgctctcatgagcaccgttgtgactatgcccaatgctggctcaaaagtgatggtgtccgagggccagagtgccgctcaatcaaacgcacggccacaattcatcacaccggtgtttatcaactccagctcaataattcaagtaatgaagggatcccagccttctactatccccgctgccccactgaccaccaactccgggcttatgccccctagcgtggccgttgtggggcccctgcacataccccagaacatcaaattctcgtccgcaccagtgcccccaaatgcactttcaagtagcccggccccaaatattcaaactggccgcccgcttgtcttatcctctagggccacgcccgtacagctcccaagtcctccttgtacttcatcccctgtcgttcctagtcacccccccgtacagcaagtgaaggaactgaatcctgacgaggcatcccctcaagttaacacaagcgctgatcaaaatactcttccttccagtcagagcactacgatggtgagccctctgcttaccaattcaccaggaagtagcggcaacaggaggtctcctgtcagcagttccaaaggaaagggaaaggtggataagatcggtcagattctgttgactaaggcctgcaagaaggtgactggcagcttggaaaaaggagaggagcagtacggcgcagatggggaaacagaaggccaaggcttggacaccaccgcccccggccttatgggtaccgagcagctgagtacagagttggacagcaagacacctactcctccagcgcctaccctcctgaagatgacctcttctcctgtgggccccgggacggcctcggctggcccttcactgcctggaggcgcactcccaacttccgttaggtctatcgtcacgaccttggtgccttcagagcttatctccgctgtccccacaaccaagtcaaatcatggaggaatcgcctccgagtccttggcaggtggcctggtagaagagaaggtgggcagccatcctgaactactgcccagtatcgctcctagccagaacctggtgtccaaggaaactagtacgacagcattacaggctagtgtcgcgaggcccgagttggaagtcaatgccgccatcgtcagcggacagagcagcgaacccaaagaaattgtggaaaaaagtaagattccagggagaagaaatagccgtaccgaagagcccacagtcgcatccgaaagcgttgagaacgggcataggaaaagatcctcacgacctgcctcagcaagctccagtacaaaagacatcaccagtgcagtgcaatcgaagagaagaaagagcaaatag

SEQ ID NO: 177981 - DNA, 7081 bp, Artificial Sequence
  derived and/or modified sequence
ccccctccccgccggctccgtgaggccctgccgggtcgggctgcgggcggccgggcgcgggcggcgggacagacgggcgcacgcgaggactgacggacggacgcaccgagggcggcgggcacgcacggcccgggccggcgctccaaggcccgcccgggagggccggggccgcgctcagaattttgatttggctgctgggctgctaccttgaaatccaagccctaaaaatgccagcttctttggacttagaagatgacctggataaatgataaaaattaagaaagagattttgaagttttcttattgtcctcttggcatatgcttctggaataatattcaccatggttttggatgaccttccaaacttagaagacatctatacttccttgtgttcatcaacaatggaagactcagagatggattttgactctggactagaagatgatgacacaaaaagtgatagtattttggaggattccacaatttttgtggccttcaaaggaaatatagatgataaagacttcaaatggaaattagatgcaatattgaaaaacgtgcccaatttgttacacatggagtccagcaagctaaaagtacagaaggtggagccctggaacagcgtgcgtgtgacattcaacatcccccgggaagcagcggagcggctacggatccttgctcagagcaacaaccagcagcttcgggatttagggattctctccgttcagattgaaggggaaggtgctattaacctggctttggctcagaaccgaagccaagatgtgagaatgaatggacccatgggagctggaaattcagttaggatggaggcgggatttcctatggcaagtggtccaggaataataaggatgaacaaccctgccactgttatgatacccccgggtggaaatgtgtcatcttccatgatggcaccaggccccaatccagagctgcagcccaggactcctcgccctgcttctcagtcagatgcaatggatccactcctctctgggctccatatacagcagcaaagtcatccctcaggatctttagctcccccacatcacccaatgcagcctgtctctgtgaacagacaaatgaacccagctaattttccccagctgcagcagcagcagcaacaacaacaacagcagcagcagcagcagcagcagcaacaacagcaacagcagcaacaacagttgcaggcaagacccccacagcaacatcagcagcaacagccacagggaattcgaccccagtttactgccccaactcaggtgcctgttcctccaggctggaaccagctgccttctggagcccttcaacctcctccagcccagggttctctgggcacaatgactgcaaaccaagggtggaagaaggctcccttgcccggcccaatgcaacagcaactccaggcaagaccatccttagccacggtacagacgccttcccaccctccccctccatatccctttggcagccagcaagcctcacaagcccacacaaactttcctcagatgagcaacccaggccagttcacagctcctcagatgaagagtttgcagggagggccctctagggtcccaactcccttgcagcagccccacctcaccaacaagtctcctgcctcctcaccctcctccttccagcagggatcccctgcatcctccccaacggttaaccaaactcagcagcagatgggaccaaggccacctcaaaataacccacttccccagggatttcagcagcctgtcagctctccgggtcggaatcctatggttcaacagggaaatgtgccacctaacttcatggtgatgcagcagcaaccaccaaaccaggggccacagagtttacatccaggcctaggaggaatgcctaaacgcctcccacctggcttctcagcaggacaggccaatccgaactttatgcaaggtcaggtgccttcgaccacagcaaccacccctgggaattcaggagcccctcagctgcaagcaaatcaaaatgtccagcatgcaggtggtcaaggagctggtcctcctcaaaaccagatgcaggtgtcccacgggccgccaaatatgatgcagcccagcctcatgggaattcatggcaacatgaacaatcagcaggctggtacttctggggttcctcaagtgaacctcagcaacatgcaaggccagccccagcagggcccaccatctcagctgatgggcatgcaccagcaaatcgtgccctcccagggccagatggtccagcaacaaggaaccttgaaccctcagaaccctatgatcctttcaagggcccagcttatgccacagggccagatgatggtgaaccccccgagccaaaatcttgggccctcgccccaaaggatgaccccacccaagcagatgctttcccagcagggcccacaaatgatggcgccacataaccagatgatggggcctcaggggcaggttttgctccaacagaacccaatgatagagcagattatgaccaatcaaatgcaggggaataagcagcagtttaacactcagaaccagtccaatgtcatgccgggaccagcccagataatgaggggaccaactccaaacatgcaaggaaatatggtgcagtttacgggacagatgtcaggacagatgctgccccagcaagggcctgtgaacaacagtccatctcaggttatgggcattcagggacaggtcctgcggccaccagggcccagcccacacatggcccagcagcatggtgatcctgctactacagcaaataacgatgtcagtttatctcagatgatgcctgatgttagcattcaacaaaccaacatggtcccccctcatgtgcaggccatgcagggaaacagtgcctcgggaaaccacttctcaggccatgggatgtctttcaatgcacctttcagtggagctcccaatggaaatcagatgtcctgtggtcaaaatccaggcttcccagtcaataaggatgtcacgctaacgagcccattgttggtcaacttattgcagagtgacatatctgcaggccattttggggtaaacaataagcaaaataataccaacgcaaataaaccgaagaagaagaaaccccctcggaagaagaaaaatagtcagcaagatctaaacaccccagatactcgcccagctggtctggaagaggctgatcagccaccgttgcctggagaacaaggaattaacttggataactcaggccctaaactgccagaattttcaaaccggccaccaggttatccttctcaaccagttgaacagaggccacttcagcagatgcctcctcaactcatgcagcatgtggcacccccaccacagccaccacagcagcagccacagccacaactgcctcagcagcagcagccaccacctcccagtcagccacagtctcagcagcagcagcagcagcagcaacaaatgatgatgatgctcatgatgcagcaggatcccaaatcagttaggcttccagtctctcaaaatgtccatcctccaaggggccccctgaaccccgactcccagagaatgcccatgcaacagagtggcagtgtgcctgtcatggtcagtctgcaaggacctgcctccgtgccaccatcacctgataaacaaagaatgccaatgcctgtgaatactcccttgggaagcaattcaaggaaaatggtctatcaggagagcccgcagaatccttccagctcgccactggcggagatggcctcactccctgaagcaagtggcagtgaagcaccatctgtcccaggaggcccaaacaacatgccttcacatgtagtacttccccagaatcagttaatgatgacagggccaaaacctggaccatcgcccctttcagcaactcaaggtgcaactccccagcaaccccctgtaaattccctgcccagctctcacggccaccacttcccaaatgtggctgcgccaacccagacatctaggcccaaaacaccaaacagagccagccccagaccctattatcctcagacacccaacaaccgccctcccagcacagaaccttcagaaatcagtctgtcaccagaaagactcaatgcctccatagcaggactcttccctccacagattaatattcctttacctcctaggccaaatttaaacaggggctttgatcaacaaggcctaaatccaacaactttgaaggccatcgggcaagcaccttcaaatcttaccatgaatccttccaattttgctaccccacaaactcacaaattagattctgtggtagtgaattctggaaagcagtctaattctggagcaacaaaacgggcaagtccaagcaacagtcgcaggtctagtcctgggtccagtaggaaaaccactccaagccctgggaggcaaaattcaaaagcccctaaacttactctggcctctcagacaaatgcagccctattgcagaatgtggagttgccgagaaatgtattggtcagtcccactcctctggccaatccccctgtacctgggagctttcctaacaacagtgggctgaatcctcagaattctactgtgtctgtggctgcagttgggggtgttgttgaggataacaaggagagcttgaatgtgcctcaggacagtgattgccagaattcccagagtaggaaggaacaggtaaacattgaactaaaagcagtccctgcccaagaagttaaaatggttgtccctgaagatcagtccaaaaaggatgggcagccttcggatcctaacaaacttcccagtgtcgaagagaacaaaaatttggtgtctcctgctatgagggaagcaccaacatcgttaagtcaacttcttgacaactctggagctcccaatgtgacaattaaaccccctgggcttacagatctggaagtaacacctccagtagtttctggggaggacctcaaaaaagcatctgtcattcccacactgcaggatctgtcttcttctaaagaaccttctaattccctaaacttacctcacagtaatgagctgtgttcatcccttgtgcatcccgaattgagtgaggtcagttctaacgttgcaccaagcatccctccagtaatgtcaagacctgttagctcttcctccatttccactcccttgcccccaaatcaaataactgtatttgtcacttccaatcccatcacaacttcagctaacacatcagcagctttgccaactcacttgcagtctgcattgatgtcaacagttgtcacaatgcccaatgcgggtagcaaggttatggtttctgagggacagtcagctgctcagtctaatgcccggcctcagttcattacacctgtctttatcaattcatcctcaataattcaggttatgaaaggatcacagccaagcacaattcctgcagccccactgacaaccaactctggcctgatgcctccctctgttgcagttgttggccctttacacatacctcagaacataaaattttcttctgctcctgtaccgcctaatgccctctccagtagtcctgctccaaacatccagacaggtcgacctttggtccttagctcacgagccacccctgttcagcttccttcccctccttgtacgtcttctccagttgtcccttctcatccccctgtgcagcaagtgaaagaattgaatccagatgaggctagccctcaggtgaacacctcagcagatcagaacactcttccctcttcacagtcaaccacaatggtttctccccttttgaccaatagtccagggtcctctggcaaccggcgaagcccagtctcgtctagtaagggcaaaggaaaagtggacaaaattggccaaattttgttgaccaaggcatgtaagaaagttacaggctctcttgagaaaggggaagaacaatatggtgcagatggagagactgaaggccaagggctagacaccacagctccggggctcatgggaacagagcagttatccacagagctggacagtaaaaccccaacgcccccagcacccactctgctaaaaatgacctctagccctgtgggcccgggcactgcctcagcaggacccagcttacctggcggtgctctccccaccagtgtacgctcgatagtaaccactctggtaccctccgagctcatctccgccgtaccgaccacaaaaagcaatcatggtggcatagcatctgagtcacttgcgggtggcctagtggaggagaaggtgggatcccatccagaacttctacccagcatagccccgtcgcagaatttagtctcaaaggaaacttcaaccacagcactgcaggcctctgttgccagaccagagctggaggtaaatgctgccatagtctctggacaaagcagtgagcccaaagagatagttgaaaagtccaaaatcccaggccgaagaaactcccgaactgaagagccaactgtggcctctgaaagtgtggaaaatggacatcgtaaacgatcttctcgacctgcttcagcctccagctctactaaagacataaccagtgcggtgcaatccaagcgaagaaaatccaagtaaacaagcaggactgcgacttgatacttggaaatgtgtgtgacttttacaaagagcaattttgagctgtgacttttttaaatcaatttctgtacagttagtaattttaataatgtggcccttttcctagtccctgcaacctgtttcataaagtgcaatggggaaagcaggactgttgagcccttttggtgttgcgagttgaagttcaaggtttctaaaatgttgtcttgtattgaaaggagctaatgccattataaatgttactagttttcacatttcctaagcagcctagagtacagggtgagcatttttagatctcctaatgatgtattgtgccgtggaagtactgtgtgtgaatagcagtagtgggggcaaaagcaatcttctcatttggaaatgttgtaaataattttattatatagtgttttggatgtatttgttgtagaaatggaccagtgaataaagagaatctaaggatttgtacaatgtgaaataacgtgttaaataaatgtcattgtcatagaacataaagttatgttattggtaaggga

SEQ ID NO: 177982 - DNA, 9311 bp, Artificial Sequence
  derived and/or modified sequence
ctccagcccaggcaacagagcgtgactccgtctcaaaaaaaaaaaaaaaagtgaaaggaaaatgaggggagaattctcattgataataagggcgaaaaggtttttttggcagagtaatagagttttggaaaccattgcaaagctgtcaagtgtggtgtagtttttggttaaggaaatcagaggtgtcagcagacataaaagacaggggaaaacatgggaagtgtcctacctatagtgtagaaaaagcacaactatctatgtcagaggtcgacagactgtggtccataggtcaaatctggcccacgatctgtttttgtaaataacgttttattggaacatagccacactcatttatttatatattgtccatatcttcttttgtggtaccaatagcagagttgagtagtcgtgacagagatgtgttgtgtcagctcacaaagctggaaatactctttacaaaaacatttgccaacccctgatctatgtgtttgagtgttggatgttcaacctctaatttgccatccaatgtctatatgatgatagagaatgaataaacgtcttggctctgccctttgggctggattacccatgctctgtgtacctgcagcataacacagacccctgaatatttatatcagtcagtgatggcaaggtctattgttctggagtgtactgtgtggtaactgtggtagtgccagctttacacggattagataatgctcgggcttgttttgccattttttttattgggttgtcttttacaaaagatttatttatatattctgattattaatcctttgttgttggtagatattacagatgtcatttcccagtttcttgcttattttaatttttttttttttttttttgagatgaagtcttgctctgtcgcccaggctggagtgcagtcgtgccatctcagctcattgtaacctccgtctcccaggttcaagtgattctcttgcctcagcctcccaagtagctgggactacaggcatgtgccaccacacctggctgatttttgtgtttttagtagggatggggtttcatcatgttggccaggctggtctcaaactcctgacctcaagtgatccacccgtcttggcctcctaaagtgctgggattacaggtgtgagccactgcgcctggcctgttgcttattttaaaacatctgttttaaggtgtcatttgttaaaaagttctgaattttagtatcaactttatcaatcttttcctttaagatttgcagttattctttgttttgaggcagggtctcgctctgtcaccgaggctggagtgcagtggtgcgatctcggctcactgcagcctcaacctcctgggctcaagcaaccctcccacctcccatgccagttgagaccacaggcatgcgccaccatgccctgctactttttgcattttttgtagaggcggggtttcgccatgttgcccaggctagtctggaactcctgagctcaagcagtccacaaagtgctgggattacaggtgtgagctactgtgcccagcctgcaattattctttatattctggaatacctactgttgttttcaatggttagatctttaatgtatctggaatggattcttatgtgtagtgtaaggtcgggtccagtttcattttttttccctatgtataaccagtgatcccagcatcatttattgaatggggcttgctttcaaattgtgagctctttttggtggagtctgtctcaggtccttattaagcactgctgcttgctgattgtgtgaccttggacaaataaaacctcattgcgcctcagtctttaaggataatagtaatctcatagggttttgtgaggattaaatgagtcaatatacataacgtgtaaaacagtgcttggcacctagaacatgctcaataaatattagctgtactttagcactactgttcatttctgattcctcagcacctggtacagagcaggggctcattttgctcaattaaattgccaaattaatttggttttcaggtcaatcagaatggtgagagttgggctgagtgttgcaggagatgcttccaaggagctacttagttttaggggctgccttagattatctgctaggatagaactcttctcacgccatcacttttgcagagaacttctgtagcagaggttgcaaactggcaacctgtggttggatttgacctgtataagtattttgtttggtttacacaatatttttaatgtcttaaaaatgtacacagacctctgagtttctgacttaaccttgaaaaattggaagatctgtcaacagcaagcccatattcatttatagcggtaaccagctgaaacttttaggtcctgggaggaatggagaggggtcccactgactaacttttctgagagtggtcagagagttcttaagcagaattttgatttggctgctgggctgctaccttgaaatccaagccctaaaaatgccagcttctttggacttagaagatgacctggataaatgataaaaattaagaaagagattttgaagttttcttattgtcctcttggcatatgcttctggaataatattcaccatggttttggatgaccttccaaacttagaagacatctatacttccttgtgttcatcaacaatggaagactcagagatggattttgactctggactagaagatgatgacacaaaaagtgatagtattttggaggattccacaatttttgtggccttcaaaggaaatatagatgataaagacttcaaatggaaattagatgcaatattgaaaaacgtgcccaatttgttacacatggagtccagcaagctaaaagtacagaaggtggagccctggaacagcgtgcgtgtgacattcaacatcccccgggaagcagcggagcggctacggatccttgctcagagcaacaaccagcagcttcgggatttagggattctctccgttcagattgaaggggaaggtgctattaacctggctttggctcagaaccgaagccaagatgtgagaatgaatggacccatgggagctggaaattcagttaggatggaggcgggatttcctatggcaagtggtccaggaataataaggatgaacaaccctgccactgttatgatacccccgggtggaaatgtgtcatcttccatgatggcaccaggccccaatccagagctgcagcccaggactcctcgccctgcttctcagtcagatgcaatggatccactcctctctgggctccatatacagcagcaaagtcatccctcaggatctttagctcccccacatcacccaatgcagcctgtctctgtgaacagacaaatgaacccagctaattttccccagctgcagcagcagcagcaacaacaacaacagcagcagcagcagcagcagcagcaacaacagcaacagcagcaacaacagttgcaggcaagacccccacagcaacatcagcagcaacagccacagggaattcgaccccagtttactgccccaactcaggtgcctgttcctccaggctggaaccagctgccttctggagcccttcaacctcctccagcccagggttctctgggcacaatgactgcaaaccaagggtggaagaaggctcccttgcccggcccaatgcaacagcaactccaggcaagaccatccttagccacggtacagacgccttcccaccctccccctccatatccctttggcagccagcaagcctcacaagcccacacaaactttcctcagatgagcaacccaggccagttcacagctcctcagatgaagagtttgcagggagggccctctagggtcccaactcccttgcagcagccccacctcaccaacaagtctcctgcctcctcaccctcctccttccagcagggatcccctgcatcctccccaacggttaaccaaactcagcagcagatgggaccaaggccacctcaaaataacccacttccccagggatttcagcagcctgtcagctctccgggtcggaatcctatggttcaacagggaaatgtgccacctaacttcatggtgatgcagcagcaaccaccaaaccaggggccacagagtttacatccaggcctaggaggaatgcctaaacgcctcccacctggcttctcagcaggacaggccaatccgaactttatgcaaggtcaggtgccttcgaccacagcaaccacccctgggaattcaggagcccctcagctgcaagcaaatcaaaatgtccagcatgcaggtggtcaaggagctggtcctcctcaaaaccagatgcaggtgtcccacgggccgccaaatatgatgcagcccagcctcatgggaattcatggcaacatgaacaatcagcaggctggtacttctggggttcctcaagtgaacctcagcaacatgcaaggccagccccagcagggcccaccatctcagctgatgggcatgcaccagcaaatcgtgccctcccagggccagatggtccagcaacaaggaaccttgaaccctcagaaccctatgatcctttcaagggcccagcttatgccacagggccagatgatggtgaaccccccgagccaaaatcttgggccctcgccccaaaggatgaccccacccaagcagatgctttcccagcagggcccacaaatgatggcgccacataaccagatgatggggcctcaggggcaggttttgctccaacagaacccaatgatagagcagattatgaccaatcaaatgcaggggaataagcagcagtttaacactcagaaccagtccaatgtcatgccgggaccagcccagataatgaggggaccaactccaaacatgcaaggaaatatggtgcagtttacgggacagatgtcaggacagatgctgccccagcaagggcctgtgaacaacagtccatctcaggttatgggcattcagggacaggtcctgcggccaccagggcccagcccacacatggcccagcagcatggtgatcctgctactacagcaaataacgatgtcagtttatctcagatgatgcctgatgttagcattcaacaaaccaacatggtcccccctcatgtgcaggccatgcagggaaacagtgcctcgggaaaccacttctcaggccatgggatgtctttcaatgcacctttcagtggagctcccaatggaaatcagatgtcctgtggtcaaaatccaggcttcccagtcaataaggatgtcacgctaacgagcccattgttggtcaacttattgcagagtgacatatctgcaggccattttggggtaaacaataagcaaaataataccaacgcaaataaaccgaagaagaagaaaccccctcggaagaagaaaaatagtcagcaagatctaaacaccccagatactcgcccagctggtctggaagaggctgatcagccaccgttgcctggagaacaaggaattaacttggataactcaggccctaaactgccagaattttcaaaccggccaccaggttatccttctcaaccagttgaacagaggccacttcagcagatgcctcctcaactcatgcagcatgtggcacccccaccacagccaccacagcagcagccacagccacaactgcctcagcagcagcagccaccacctcccagtcagccacagtctcagcagcagcagcagcagcagcaacaaatgatgatgatgctcatgatgcagcaggatcccaaatcagttaggcttccagtctctcaaaatgtccatcctccaaggggccccctgaaccccgactcccagagaatgcccatgcaacagagtggcagtgtgcctgtcatggtcagtctgcaaggacctgcctccgtgccaccatcacctgataaacaaagaatgccaatgcctgtgaatactcccttgggaagcaattcaaggaaaatggtctatcaggagagcccgcagaatccttccagctcgccactggcggagatggcctcactccctgaagcaagtggcagtgaagcaccatctgtcccaggaggcccaaacaacatgccttcacatgtagtacttccccagaatcagttaatgatgacagggccaaaacctggaccatcgcccctttcagcaactcaaggtgcaactccccagcaaccccctgtaaattccctgcccagctctcacggccaccacttcccaaatgtggctgcgccaacccagacatctaggcccaaaacaccaaacagagccagccccagaccctattatcctcagacacccaacaaccgccctcccagcacagaaccttcagaaatcagtctgtcaccagaaagactcaatgcctccatagcaggactcttccctccacagattaatattcctttacctcctaggccaaatttaaacaggggctttgatcaacaaggcctaaatccaacaactttgaaggccatcgggcaagcaccttcaaatcttaccatgaatccttccaattttgctaccccacaaactcacaaattagattctgtggtagtgaattctggaaagcagtctaattctggagcaacaaaacgggcaagtccaagcaacagtcgcaggtctagtcctgggtccagtaggaaaaccactccaagccctgggaggcaaaattcaaaagcccctaaacttactctggcctctcagacaaatgcagccctattgcagaatgtggagttgccgagaaatgtattggtcagtcccactcctctggccaatccccctgtacctgggagctttcctaacaacagtgggctgaatcctcagaattctactgtgtctgtggctgcagttgggggtgttgttgaggataacaaggagagcttgaatgtgcctcaggacagtgattgccagaattcccagagtaggaaggaacaggtaaacattgaactaaaagcagtccctgcccaagaagttaaaatggttgtccctgaagatcagtccaaaaaggatgggcagccttcggatcctaacaaacttcccagtgtcgaagagaacaaaaatttggtgtctcctgctatgagggaagcaccaacatcgttaagtcaacttcttgacaactctggagctcccaatgtgacaattaaaccccctgggcttacagatctggaagtaacacctccagtagtttctggggaggacctcaaaaaagcatctgtcattcccacactgcaggatctgtcttcttctaaagaaccttctaattccctaaacttacctcacagtaatgagctgtgttcatcccttgtgcatcccgaattgagtgaggtcagttctaacgttgcaccaagcatccctccagtaatgtcaagacctgttagctcttcctccatttccactcccttgcccccaaatcaaataactgtatttgtcacttccaatcccatcacaacttcagctaacacatcagcagctttgccaactcacttgcagtctgcattgatgtcaacagttgtcacaatgcccaatgcgggtagcaaggttatggtttctgagggacagtcagctgctcagtctaatgcccggcctcagttcattacacctgtctttatcaattcatcctcaataattcaggttatgaaaggatcacagccaagcacaattcctgcagccccactgacaaccaactctggcctgatgcctccctctgttgcagttgttggccctttacacatacctcagaacataaaattttcttctgctcctgtaccgcctaatgccctctccagtagtcctgctccaaacatccagacaggtcgacctttggtccttagctcacgagccacccctgttcagcttccttcccctccttgtacgtcttctccagttgtcccttctcatccccctgtgcagcaagtgaaagaattgaatccagatgaggctagccctcaggtgaacacctcagcagatcagaacactcttccctcttcacagtcaaccacaatggtttctccccttttgaccaatagtccagggtcctctggcaaccggcgaagcccagtctcgtctagtaagggcaaaggaaaagtggacaaaattggccaaattttgttgaccaaggcatgtaagaaagttacaggctctcttgagaaaggggaagaacaatatggtgcagatggagagactgaaggccaagggctagacaccacagctccggggctcatgggaacagagcagttatccacagagctggacagtaaaaccccaacgcccccagcacccactctgctaaaaatgacctctagccctgtgggcccgggcactgcctcagcaggacccagcttacctggcggtgctctccccaccagtgtacgctcgatagtaaccactctggtaccctccgagctcatctccgccgtaccgaccacaaaaagcaatcatggtggcatagcatctgagtcacttgcgggtggcctagtggaggagaaggtgggatcccatccagaacttctacccagcatagccccgtcgcagaatttagtctcaaaggaaacttcaaccacagcactgcaggcctctgttgccagaccagagctggaggtaaatgctgccatagtctctggacaaagcagtgagcccaaagagatagttgaaaagtccaaaatcccaggccgaagaaactcccgaactgaagagccaactgtggcctctgaaagtgtggaaaatggacatcgtaaacgatcttctcgacctgcttcagcctccagctctactaaagacataaccagtgcggtgcaatccaagcgaagaaaatccaagtaaacaagcaggactgcgacttgatacttggaaatgtgtgtgacttttacaaagagcaattttgagctgtgacttttttaaatcaatttctgtacagttagtaattttaataatgtggcccttttcctagtccctgcaacctgtttcataaagtgcaatggggaaagcaggactgttgagcccttttggtgttgcgagttgaagttcaaggtttctaaaatgttgtcttgtattgaaaggagctaatgccattataaatgttactagttttcacatttcctaagcagcctagagtacagggtgagcatttttagatctcctaatgatgtattgtgccgtggaagtactgtgtgtgaatagcagtagtgggggcaaaagcaatcttctcatttggaaatgttgtaaataattttattatatagtgttttggatgtatttgttgtagaaatggaccagtgaataaagagaatctaaggatttgtacaatgtgaaataacgtgttaaataaatgtcattgtcatagaacataaagttatgttattggtaaggga

SEQ ID NO: 177983 - DNA, 6191 bp, Artificial Sequence
  derived and/or modified sequence
atggtcctggatgacctgcctaacttggaggacatctacacgagtctgtgttcatctacgatggaggattccgaaatggattttgattccggcctagaagatgacgataccaagagtgactcgatcctggaggacagcacaatcttcgttgcttttaagggcaatatagacgacaaggactttaagtggaagttggacgcaatcttaaagaatgtgccgaacctgctccatatggagtcttccaagctgaaggtccaaaaagttgaaccttggaatagcgtgcgtgttacctttaatattccacgggaggcagctgagagactcaggatccttgctcagtctaacaatcaacagctcagagatctcggaattctttctgtgcagatcgagggggaaggggcaatcaatctggccttggctcagaatagatcccaggatgtaagaatgaacggccctatgggggcagggaattctgtgcgcatggaagcaggattcccaatggcctccggtccgggaattattcgcatgaacaatcctgcaactgtgatgattcctccgggtggcaatgtgtcctcctccatgatggcccctggccctaacccggagctacagccacgtacgcctaggccagccagccagtcggacgcgatggatccactgctgtctggccttcacatacagcaacagtcacacccatctggatccctggccccaccacaccatccgatgcaaccggtgtccgtgaaccgccagatgaacccagccaacttcccccaactgcagcagcagcagcagcagcagcagcagcagcagcaacagcagcaacagcagcagcagcagcaacagcaacagcagctgcaggctcggccacctcagcagcaccagcagcagcagccccagggcattaggcctcagtttacggcacccactcaggtgcctgtgcctcccggatggaaccaattgccgagtggcgcattgcagccaccaccagcacagggtagtctgggcacaatgactgcaaatcaaggctggaaaaaggcaccactccctgggcctatgcagcagcaacttcaggctaggccttcgctcgcaaccgtgcaaaccccaagtcatccacctcccccatatccattcgggtctcagcaggcgagtcaggcccacaccaattttccacaaatgagcaacccaggtcaatttacggcccctcagatgaagtctcttcagggcggaccaagtcgggttccaaccccgttgcaacagcctcatctgaccaacaaaagcccagcatcaagcccttcaagcttccagcaaggctcccccgcaagttcccctactgtcaaccagacacagcagcaaatgggcccacgcccaccacagaacaatcctttgcctcaggggtttcaacagccagtcagtagcccaggcaggaatcctatggtgcaacaaggaaacgtgccccctaacttcatggtaatgcagcagcagcccccaaaccaaggcccacagagtctacatcctggactcggcggaatgccgaagaggcttcctcccggttttagcgccggtcaggctaatcctaacttcatgcaaggccaggttccaagcacaaccgccaccacacccggtaattctggcgctccccagctgcaggccaaccagaatgtccagcatgcgggaggccagggagccggtccccctcagaatcagatgcaggtctctcacggacctcccaatatgatgcagccgtcactgatgggcattcacggtaatatgaataatcagcaggccggaaccagcggcgtgccccaagtgaatttgtctaacatgcaaggacaaccgcaacaaggccctccaagccaactaatgggaatgcatcagcaaatagtgcctagccagggtcagatggttcagcagcaaggtacccttaaccctcagaatcctatgatcctttctagagcccagctgatgccccagggacagatgatggtcaacccgcctagccaaaacctggggccttcgcctcaacgcatgactccacctaagcaaatgctgtctcagcaggggccacagatgatggcgcctcataatcaaatgatgggaccacagggccaggtgctgctccagcagaacccaatgattgagcagataatgaccaatcagatgcagggtaataagcaacagtttaacacccaaaaccagagtaacgtgatgcccggtccggcacagattatgcggggtcccacgccaaatatgcaagggaacatggtgcagttcacgggtcagatgtccggccagatgcttccccaacagggtccagttaacaattcaccgtcacaggtgatggggatccagggacaagtgttgagaccgccagggccttcccctcacatggcccagcagcatggcgacccagccacaacggcaaacaatgatgttagcctcagccagatgatgcccgatgtttctatccaacaaactaacatggtccctccacacgtgcaagccatgcaaggcaattcagcttctggcaaccacttttccggccacggcatgtcatttaatgcgccttttagcggtgctccaaatggtaaccagatgtcatgcggccaaaaccctggcttccctgtcaataaggatgtgacactcaccagccctcttctggtgaacctgttacagagcgacatatccgccggacatttcggggtaaataacaaacagaataatacaaacgccaacaaaccaaaaaagaagaaaccgccaagaaagaagaagaactctcaacaggacttgaacacaccggatacccgtcctgccggattagaggaagcagaccagcccccactgcctggagaacagggaatcaatcttgacaacagtggtcccaagttgcctgaattttcaaacaggcctcctggctaccctagccagccagtggagcagcggccactgcagcagatgccgcctcaactgatgcagcacgtggcaccaccgccacagccgccacagcagcagccacagccccagctacctcagcaacaacaaccgccacctccatcacaaccacagtcccagcagcagcagcagcagcagcagcagatgatgatgatgttgatgatgcagcaggatcccaaatcggtcagactccccgtaagccagaacgttcatccccctaggggcccactcaatcccgactcgcagaggatgccgatgcagcagagtggttcagtcccagtcatggtgagtctccagggccctgcttccgtgcctcccagtcctgacaagcaacggatgcctatgcccgtcaacaccccattaggctccaattctcgcaagatggtgtatcaggagtcaccacagaatcctagctcgtctccgctggccgaaatggcatctcttcctgaggcctcaggatccgaggcaccatccgtgcctggaggacccaacaacatgcctagtcatgttgtgctccctcagaaccagctgatgatgactgggcctaagccaggccctagccccctgagcgccacccagggcgcaacgcctcagcagccgcctgtgaacagcttgccatcatctcacggtcatcacttcccaaatgtggcggcaccaacccaaactagccggcctaagacaccaaacagagcgagtccgaggccctattacccccagacaccgaataaccggcctccttctacagaaccctctgaaatatcattgtccccagaacgcctgaacgcaagtatcgccggactgtttccgcctcaaattaacattcccctaccccctcgccctaacctgaaccgcggatttgatcagcaggggctcaatcctacaacacttaaggcaatcgggcaggcccctagtaatttaacaatgaacccctctaatttcgcaacaccccagacacacaagctcgactctgtggtcgtgaattctggcaagcagtcgaattccggtgccaccaagagggcatctcctagcaacagccggcgatcgtcaccaggtagttccaggaagactaccccaagcccagggagacagaattcaaaagccccaaagcttaccctggccagccagacaaatgccgctctcctgcagaacgtggaactgcccaggaacgtccttgtctctcctacgccacttgcgaatccccctgtccctggatccttccctaacaattctggtctgaacccccagaactctaccgtttctgtggcagccgtgggcggtgttgtggaggataacaaggagtcacttaatgtaccacaggactccgactgtcagaattctcagtcacggaaggaacaggttaacattgagcttaaggcggtgcctgcacaggaagtgaagatggttgttcctgaagaccagtccaaaaaggacgggcagccttctgaccccaataaactgcctagtgtggaggagaataagaatctggtgtccccagctatgcgcgaagcacccacgtccttaagccagcttcttgacaactccggcgctcctaacgtaacaatcaaacccccaggcctcacggacctcgaggtgactccccctgtggtgtcaggcgaggacctgaaaaaagcatcagtgatccccacacttcaggatctaagcagtagcaaagagccctccaacagcctgaatcttccccactcaaatgagctatgctccagcctggtgcaccctgaactatctgaggtgtccagcaacgtggctcccagcatccctcccgtgatgagtaggcctgtgagcagtagcagtatctcaactcctctcccacccaatcagatcaccgtgttcgttacgtctaatcccattacaaccagtgccaatacatcggcagctctgcccacacacctgcagagtgctctcatgagcaccgtagttacaatgcctaatgctggatcaaaggttatggtcagcgaaggccagtcagcagcccagagcaacgctcgccctcagttcatcactccggtgttcatcaattcttcctctatcatacaggtcatgaaggggtctcaaccaagcacaattccggctgctcccttgacaaccaattctggtctaatgccgccttctgtcgctgtagtcggaccccttcacattcctcagaacatcaaattcagtagcgcgcctgtacctcctaatgcactctcatcttcacccgctcccaatatacagacgggacgccctttggtgcttagctctagagccactccagtgcagctccctagcccaccatgtacttcttctcctgtggtacctagtcaccctcctgtccagcaggtgaaggagctcaatccagacgaggcgagccctcaagttaacactagtgccgatcagaacaccctgcctagctcacaatcaacaacaatggtgagcccactgttgactaatagcccagggtcctcaggtaatagaagaagtcccgtgagctcttcaaaaggcaaaggcaaagtcgacaaaattggccaaattctgctgaccaaggcgtgtaagaaagtcactggctccctcgaaaagggcgaagaacagtatggcgcagatggggaaaccgaggggcaaggtcttgatacaacagccccaggtctgatgggcactgaacagttaagcactgagctggacagtaaaacccctaccccccctgcaccaaccctcctgaagatgacctcgtcgccagtcgggcctggcacagcatccgccggaccctcactgcccggaggcgcactgccgacctctgtaagatcgatcgtgactaccctggtcccttcagaactcatatccgcagtgcccaccaccaaatcaaaccacggcggaattgcctcagagtccctcgcaggcggattagtggaagaaaaagtcgggtcccaccccgagctgctaccatctattgcgccaagccaaaaccttgtgtcaaaagagacgtccaccacagcgcttcaggcctcggtggccagacctgagcttgaggtcaatgctgccatcgtatctgggcagtccagcgaacccaaggagattgtcgagaagagcaaaattcctggcaggcgtaactcgaggactgaagagcctaccgttgctagtgagtccgtcgagaacggacacagaaagagatcatctcgaccagctagcgcctctagttccacaaaggacatcacctcagcggtgcagtccaaaagaagaaaatctaaata

SEQ ID NO: 177984 - DNA, 6191 bp, Artificial Sequence
  derived and/or modified sequence
atggtgcttgacgatctccccaacctggaggacatttacacgtccctttgtagcagcacaatggaagacagcgaaatggacttcgactctggcctggaagatgacgacaccaagtccgacagcatactggaggacagcaccatttttgttgcattcaaggggaatatcgacgacaaagatttcaagtggaagctggacgcaattctgaagaatgtgcccaatctgctccacatggagtccagcaaactgaaagtccagaaagtggagccatggaattctgtcagagtgactttcaatatccctcgcgaggccgctgagagactacgcatccttgcccaaagcaacaatcaacagcttcgggaccttggcattcttagtgtgcaaattgagggagaaggcgcaatcaatctggctctagcacagaacagatctcaggatgttcggatgaacggcccaatgggtgctggcaattcagtacgaatggaggctggctttcctatggcgtctggaccaggaattatacgtatgaataacccagctacagtgatgatacctcccggaggcaacgtttcctcatccatgatggcacccggtccaaacccagagttgcagcctcgaactccacggccagcctcccagtctgatgccatggaccctttgctctccggactacatattcaacagcagtctcatccaagtggctcactggcccctccacatcatcccatgcagccagtttccgtgaaccgccagatgaaccccgctaacttcccccagttgcagcagcaacagcagcagcagcagcagcaacagcaacaacagcaacagcagcagcagcagcaacagcagcagcagttgcaggcacgccctccccagcagcaccaacaacagcagcctcaggggataaggccccagttcacggcacctacccaggtcccagtgccacccggatggaaccagctcccaagcggagccctgcagccgcctcccgcacaaggaagtctcgggacaatgaccgcaaaccagggatggaagaaggcccctctgccaggccctatgcaacaacaactgcaagcacggccaagcctggccaccgtgcagacacccagccacccaccccctccttatccgttcggtagccagcaggcatctcaggcgcacaccaactttccacagatgagcaaccctggccaatttaccgcccctcagatgaaatccctgcaggggggaccttcaagagtgcccacccccctccaacaacctcatctcacaaataagtctccagccagctccccctccagcttccagcaaggatctccagcctcttctcccactgtgaatcagactcagcaacagatgggccctaggcctccacagaataatcctctaccccagggatttcagcagcccgtgtcatcacctggcagaaatcccatggtgcaacagggtaatgtgcccccaaacttcatggttatgcagcagcaacctcccaaccagggaccgcaatctctccacccaggcctgggcggaatgcctaaaagacttccgcctggattcagtgctggacaggctaaccctaatttcatgcagggccaggtccctagcacgaccgcaactactcccggtaacagcggggcaccccaactccaggccaaccagaatgttcagcatgcgggaggccagggggcaggccctccccagaaccagatgcaggtgtctcacggtccccctaacatgatgcaaccatctttaatgggcattcatggcaacatgaataaccagcaggcaggcacctcaggcgtcccccaagtcaacctgagcaacatgcagggccaaccacagcaaggtcccccatctcagctgatgggcatgcatcaacagattgtgcctagccagggccaaatggtccagcagcagggcaccctaaatccccaaaaccccatgatcctctcaagagcacaactgatgccacagggtcaaatgatggttaatccgccttcccagaatttaggacccagcccgcagcgcatgactccacccaagcaaatgctgtcccagcagggccctcagatgatggccccacacaaccaaatgatgggcccacagggacaagtgctcctccaacagaacccaatgatcgaacagataatgaccaatcagatgcaggggaacaaacaacaatttaacacccagaaccagtctaacgtcatgcctggccctgctcagattatgcgagggccaacccccaatatgcagggtaacatggttcagttcacaggccagatgtcgggccagatgcttccacagcagggacctgtcaacaattcacccagccaggtcatgggcattcaggggcaggttctcagaccccctggcccttccccccacatggcccagcagcatggtgatccagccaccactgctaacaacgacgtatctttatcccagatgatgcccgacgtgtcaattcagcagactaatatggtgcctccccacgtgcaagctatgcagggaaacagcgcctccggcaaccatttctctgggcatgggatgagtttcaacgcaccattctctggtgcaccaaatggaaatcaaatgtcatgtggccagaacccaggcttccccgttaataaagacgtcacattgactagcccactgctggtgaatcttcttcagtcagatatctctgccggtcattttggggtgaataacaagcagaacaatacgaatgctaataagccaaagaagaagaagcctccacgtaaaaagaaaaacagtcaacaggatctgaacactccagatacgcgccctgctggacttgaggaggccgaccagccaccactgcccggagagcagggcattaacctggataatagcgggcctaaattacccgaattctctaacaggccacctggctatccttctcagcctgtggaacagcgtcctctccagcagatgccgcctcaattgatgcaacatgtcgctcccccaccacagccgccacagcaacaaccccaaccccagctcccccaacaacaacagccgccacccccatcacagcctcaatcccaacaacagcaacagcaacagcagcaaatgatgatgatgctgatgatgcagcaggatcctaagtccgtcagactgcccgttagccagaacgtccatcctcctcgaggcccattaaacccagatagccaacgcatgcccatgcaacagtctggttctgtacccgtcatggtgagcctacaaggacccgcttccgtgcccccttccccagacaagcagaggatgccgatgccagttaacaccccgctgggtagtaatagccgtaagatggtgtaccaggaatctcctcagaatccctcttcatcgccgctggcagagatggcctcactcccagaagcttccgggagtgaggcacctagcgtgccagggggtcctaataacatgccctcccacgtcgtcctaccacagaaccagctgatgatgacaggccctaagccaggaccatctccgctctctgcgactcagggtgctacaccacaacagccccctgtaaatagcctgccatcaagccatgggcatcatttcccgaacgtggctgctcccacgcagacatccaggcccaagaccccaaaccgggcttctccacgcccttactacccccagacccctaacaatcgtccaccaagcactgagccttctgaaattagtctgagccccgaacggctgaatgctagtattgctgggctgttcccgcctcagataaacatccctttgccaccacggccaaatttgaacaggggcttcgaccaacagggactgaacccaactacacttaaggctatcggacaagccccttccaacttgacgatgaaccctagcaatttcgcaaccccacaaacacacaagctcgatagcgttgtggttaacagcggtaaacaaagcaattcaggggctaccaaacgagcatccccttctaactcgagacgttcatcccctggatcatctagaaaaactacgcctagccctggtaggcagaactccaaagcacccaaactaaccctcgcatcacagactaatgctgccctgctgcagaatgtggaattgcctcgaaatgtactggtgagtcccactcccctggccaatcctcctgttccgggatcattccccaacaatagcgggctcaatccgcagaactccacggtcagcgtagcagcagtgggtggggtggtcgaggacaacaaggaaagtctgaatgtcccccaggacagtgattgtcagaattcccagagtaggaaagagcaggtgaatatagaactcaaagctgttcccgctcaggaagtgaagatggtggtgcctgaggatcagtcaaagaaggatggacagcctagtgatcccaataaactgccatctgttgaagaaaataagaaccttgtgtcgccggctatgcgagaagcaccgaccagtctcagccaattactcgacaacagtggtgccccaaatgttactatcaaaccaccgggattaaccgatctggaagtcacacctccggtggtttcgggcgaggatctaaaaaaggccagtgtgatccctacgttgcaagatttgagctcaagcaaggaaccaagcaattccttaaatctccctcattccaacgagctatgtagcagtttggtccatccagaactgtccgaggtgtcatccaatgtcgccccttccatcccccctgtcatgagcaggcctgtttcctcttcttctataagtacgcctttgccccctaaccagataaccgtgttcgtcacctcaaatccgattacaacatctgccaacacatctgccgctctccctacacacctgcagtctgcactgatgtctaccgtggtgaccatgccgaacgccggatcaaaggtcatggtgtccgagggccagtctgctgcgcagagtaacgcgcgtccccagtttattaccccagtctttataaattctagtagcatcattcaagtcatgaaaggctcacagccatccaccattccagctgccccactgaccaccaacagtgggcttatgcccccatcagtcgccgtcgtggggcctctccacattccacagaatatcaaatttagcagtgcacccgtgccgcctaacgcactctcctcgtcacccgcacccaatattcaaacaggcagaccgctggtgctttcctcccgtgctacacctgttcagctaccaagcccaccctgtacaagtagccctgtggtccctagtcatccgccagttcagcaggtgaaagagctgaacccggatgaggcttcacctcaagtgaacacatccgccgaccaaaatactttaccatcctcgcaaagcacaactatggttagccccttgctaaccaattcgcctgggagctccgggaatcgaaggtcccccgtgagctcttccaagggaaaaggtaaagtcgataagatcggacagatcctgctcaccaaggcatgtaagaaggtcactggctctctggagaagggtgaggaacagtacggggctgatggggagacggaggggcagggtttagatacaactgctccaggtctaatgggaactgagcagctgagtactgagctagattccaaaacccctacccctcctgcccctaccctgttgaagatgacttcctcacccgtgggaccgggtacagcatcagcagggccatccctaccaggcggagccctccccaccagcgtccgtagcatcgtcacgacactggtgccttcagagctcatatccgccgtgcccactaccaaatctaaccacggaggtattgcgtccgagagccttgccggagggctcgttgaggagaaagtcgggtctcacccagaattacttccttctatcgcaccctcccagaaccttgtgtccaaggagaccagcacgactgccctccaagcgagtgtggctaggccagaactggaggttaatgccgctattgtttccggtcagtccagtgagcctaaggaaatagtcgaaaaaagcaagatcccaggcaggcgaaactcacgaaccgaggaacctaccgtagcttctgaaagcgtggaaaatggacacagaaagaggagctccaggcccgcaagtgcatcttccagcacaaaggacatcaccagcgccgtccaatcaaaacgcagaaaatcaaaata

SEQ ID NO: 177985 - DNA, 6192 bp, Artificial Sequence
  derived and/or modified sequence
atggtgctggacgacctgcccaacctggaggacatctacaccagcctgtgcagcagcaccatggaggacagcgagatggacttcgacagcggcctggaggacgacgacaccaagagcgacagcatcctggaggacagcaccatcttcgtggccttcaagggcaacatcgacgacaaggacttcaagtggaagctggacgccatcctgaagaacgtgcccaacctgctgcacatggagagcagcaagctgaaggtgcagaaggtggagccctggaacagcgtgagagtgaccttcaacatccccagagaggccgccgagagactgagaatcctggcccagagcaacaaccagcagctgagagacctgggcatcctgagcgtgcagatcgagggcgagggcgccatcaacctggccctggcccagaacagaagccaggacgtgagaatgaacggccccatgggcgccggcaacagcgtgagaatggaggccggcttccccatggccagcggccccggcatcatcagaatgaacaaccccgccaccgtgatgatcccccccggcggcaacgtgagcagcagcatgatggcccccggccccaaccccgagctgcagcccagaacccccagacccgccagccagagcgacgccatggaccccctgctgagcggcctgcacatccagcagcagagccaccccagcggcagcctggcccccccccaccaccccatgcagcccgtgagcgtgaacagacagatgaaccccgccaacttcccccagctgcagcagcagcagcagcagcagcagcagcagcagcagcagcagcagcagcagcagcagcagcagcagcagcagcagctgcaggccagacccccccagcagcaccagcagcagcagccccagggcatcagaccccagttcaccgcccccacccaggtgcccgtgccccccggctggaaccagctgcccagcggcgccctgcagcccccccccgcccagggcagcctgggcaccatgaccgccaaccagggctggaagaaggcccccctgcccggccccatgcagcagcagctgcaggccagacccagcctggccaccgtgcagacccccagccaccccccccccccctaccccttcggcagccagcaggccagccaggcccacaccaacttcccccagatgagcaaccccggccagttcaccgccccccagatgaagagcctgcagggcggccccagcagagtgcccacccccctgcagcagccccacctgaccaacaagagccccgccagcagccccagcagcttccagcagggcagccccgccagcagccccaccgtgaaccagacccagcagcagatgggccccagacccccccagaacaaccccctgccccagggcttccagcagcccgtgagcagccccggcagaaaccccatggtgcagcagggcaacgtgccccccaacttcatggtgatgcagcagcagccccccaaccagggcccccagagcctgcaccccggcctgggcggcatgcccaagagactgccccccggcttcagcgccggccaggccaaccccaacttcatgcagggccaggtgcccagcaccaccgccaccacccccggcaacagcggcgccccccagctgcaggccaaccagaacgtgcagcacgccggcggccagggcgccggccccccccagaaccagatgcaggtgagccacggcccccccaacatgatgcagcccagcctgatgggcatccacggcaacatgaacaaccagcaggccggcaccagcggcgtgccccaggtgaacctgagcaacatgcagggccagccccagcagggcccccccagccagctgatgggcatgcaccagcagatcgtgcccagccagggccagatggtgcagcagcagggcaccctgaacccccagaaccccatgatcctgagcagagcccagctgatgccccagggccagatgatggtgaacccccccagccagaacctgggccccagcccccagagaatgaccccccccaagcagatgctgagccagcagggcccccagatgatggccccccacaaccagatgatgggcccccagggccaggtgctgctgcagcagaaccccatgatcgagcagatcatgaccaaccagatgcagggcaacaagcagcagttcaacacccagaaccagagcaacgtgatgcccggccccgcccagatcatgagaggccccacccccaacatgcagggcaacatggtgcagttcaccggccagatgagcggccagatgctgccccagcagggccccgtgaacaacagccccagccaggtgatgggcatccagggccaggtgctgagaccccccggccccagcccccacatggcccagcagcacggcgaccccgccaccaccgccaacaacgacgtgagcctgagccagatgatgcccgacgtgagcatccagcagaccaacatggtgcccccccacgtgcaggccatgcagggcaacagcgccagcggcaaccacttcagcggccacggcatgagcttcaacgcccccttcagcggcgcccccaacggcaaccagatgagctgcggccagaaccccggcttccccgtgaacaaggacgtgaccctgaccagccccctgctggtgaacctgctgcagagcgacatcagcgccggccacttcggcgtgaacaacaagcagaacaacaccaacgccaacaagcccaagaagaagaagccccccagaaagaagaagaacagccagcaggacctgaacacccccgacaccagacccgccggcctggaggaggccgaccagccccccctgcccggcgagcagggcatcaacctggacaacagcggccccaagctgcccgagttcagcaacagaccccccggctaccccagccagcccgtggagcagagacccctgcagcagatgcccccccagctgatgcagcacgtggccccccccccccagcccccccagcagcagccccagccccagctgccccagcagcagcagccccccccccccagccagccccagagccagcagcagcagcagcagcagcagcagatgatgatgatgctgatgatgcagcaggaccccaagagcgtgagactgcccgtgagccagaacgtgcacccccccagaggccccctgaaccccgacagccagagaatgcccatgcagcagagcggcagcgtgcccgtgatggtgagcctgcagggccccgccagcgtgccccccagccccgacaagcagagaatgcccatgcccgtgaacacccccctgggcagcaacagcagaaagatggtgtaccaggagagcccccagaaccccagcagcagccccctggccgagatggccagcctgcccgaggccagcggcagcgaggcccccagcgtgcccggcggccccaacaacatgcccagccacgtggtgctgccccagaaccagctgatgatgaccggccccaagcccggccccagccccctgagcgccacccagggcgccaccccccagcagccccccgtgaacagcctgcccagcagccacggccaccacttccccaacgtggccgcccccacccagaccagcagacccaagacccccaacagagccagccccagaccctactacccccagacccccaacaacagaccccccagcaccgagcccagcgagatcagcctgagccccgagagactgaacgccagcatcgccggcctgttccccccccagatcaacatccccctgccccccagacccaacctgaacagaggcttcgaccagcagggcctgaaccccaccaccctgaaggccatcggccaggcccccagcaacctgaccatgaaccccagcaacttcgccaccccccagacccacaagctggacagcgtggtggtgaacagcggcaagcagagcaacagcggcgccaccaagagagccagccccagcaacagcagaagaagcagccccggcagcagcagaaagaccacccccagccccggcagacagaacagcaaggcccccaagctgaccctggccagccagaccaacgccgccctgctgcagaacgtggagctgcccagaaacgtgctggtgagccccacccccctggccaacccccccgtgcccggcagcttccccaacaacagcggcctgaacccccagaacagcaccgtgagcgtggccgccgtgggcggcgtggtggaggacaacaaggagagcctgaacgtgccccaggacagcgactgccagaacagccagagcagaaaggagcaggtgaacatcgagctgaaggccgtgcccgcccaggaggtgaagatggtggtgcccgaggaccagagcaagaaggacggccagcccagcgaccccaacaagctgcccagcgtggaggagaacaagaacctggtgagccccgccatgagagaggcccccaccagcctgagccagctgctggacaacagcggcgcccccaacgtgaccatcaagccccccggcctgaccgacctggaggtgaccccccccgtggtgagcggcgaggacctgaagaaggccagcgtgatccccaccctgcaggacctgagcagcagcaaggagcccagcaacagcctgaacctgccccacagcaacgagctgtgcagcagcctggtgcaccccgagctgagcgaggtgagcagcaacgtggcccccagcatcccccccgtgatgagcagacccgtgagcagcagcagcatcagcacccccctgccccccaaccagatcaccgtgttcgtgaccagcaaccccatcaccaccagcgccaacaccagcgccgccctgcccacccacctgcagagcgccctgatgagcaccgtggtgaccatgcccaacgccggcagcaaggtgatggtgagcgagggccagagcgccgcccagagcaacgccagaccccagttcatcacccccgtgttcatcaacagcagcagcatcatccaggtgatgaagggcagccagcccagcaccatccccgccgcccccctgaccaccaacagcggcctgatgccccccagcgtggccgtggtgggccccctgcacatcccccagaacatcaagttcagcagcgcccccgtgccccccaacgccctgagcagcagccccgcccccaacatccagaccggcagacccctggtgctgagcagcagagccacccccgtgcagctgcccagccccccctgcaccagcagccccgtggtgcccagccacccccccgtgcagcaggtgaaggagctgaaccccgacgaggccagcccccaggtgaacaccagcgccgaccagaacaccctgcccagcagccagagcaccaccatggtgagccccctgctgaccaacagccccggcagcagcggcaacagaagaagccccgtgagcagcagcaagggcaagggcaaggtggacaagatcggccagatcctgctgaccaaggcctgcaagaaggtgaccggcagcctggagaagggcgaggagcagtacggcgccgacggcgagaccgagggccagggcctggacaccaccgcccccggcctgatgggcaccgagcagctgagcaccgagctggacagcaagacccccaccccccccgcccccaccctgctgaagatgaccagcagccccgtgggccccggcaccgccagcgccggccccagcctgcccggcggcgccctgcccaccagcgtgagaagcatcgtgaccaccctggtgcccagcgagctgatcagcgccgtgcccaccaccaagagcaaccacggcggcatcgccagcgagagcctggccggcggcctggtggaggagaaggtgggcagccaccccgagctgctgcccagcatcgcccccagccagaacctggtgagcaaggagaccagcaccaccgccctgcaggccagcgtggccagacccgagctggaggtgaacgccgccatcgtgagcggccagagcagcgagcccaaggagatcgtggagaagagcaagatccccggcagaagaaacagcagaaccgaggagcccaccgtggccagcgagagcgtggagaacggccacagaaagagaagcagcagacccgccagcgccagcagcagcaccaaggacatcaccagcgccgtgcagagcaagagaagaaagagcaagtag

SEQ ID NO: 177986 - protein, 112 aa, Artificial Sequence
  derived and/or modified sequence
MEAYEQVQKGPLKLKGVAELGVTKRKKKKKDKDKAKLLEAMGTSKKNEEEKRRGLDKRTPAQAAFEKMQEKRQMERILKKASKTHKQRVEDFNRHLDTLTEHYDIPKVSWTK

SEQ ID NO: 177987 - DNA, 339 bp, Artificial Sequence
  derived and/or modified sequence
atggaagcgtacgagcaagtccagaagggaccccttaagctgaagggagtggctgagcttggcgttactaaacgcaaaaaaaaaaagaaagataaggataaagcaaagctgttggaggccatgggtacctctaagaaaaatgaggaagagaagcggagaggccttgacaagaggacccctgctcaggcagcattcgagaaaatgcaagaaaagcgacagatggaacgcattctgaagaaggccagtaaaacccataaacagcgcgtggaggatttcaatcgccacctcgatacactaactgagcactatgacatcccaaaagtttcttggacaaagtag

SEQ ID NO: 177988 - DNA, 339 bp, Artificial Sequence
  derived and/or modified sequence
atggaggcctatgagcaggtgcagaagggccccctgaagctgaagggcgtggccgagctgggcgtgaccaagaggaagaagaagaagaaggacaaggacaaggccaagctgctggaggccatgggcaccagcaagaagaatgaggaggagaagaggcggggcctggacaagaggaccccagcccaggccgcctttgagaagatgcaggagaagaggcagatggagcgcatcctgaagaaggccagcaagacccacaagcagagggtggaggacttcaacagacacctggacaccctgacagagcactatgacatccccaaggtgtcctggaccaagtag

SEQ ID NO: 177989 - DNA, 339 bp, Artificial Sequence
  derived and/or modified sequence
atggaggcctacgagcaggtgcagaagggccccctgaagctgaagggggtggcggagttgggtgtgacaaagcgcaagaaaaagaaaaaagacaaagataaggccaagttactggaggccatggggacttctaaaaaaaatgaggaggagaagcggcggggcctggacaaacgtacgcccgctcaggccgccttcgagaagatgcaagagaagcggcaaatggaaaggattctgaagaaggccagtaagacccataaacagagggtggaagacttcaatcgccacctggacactctgactgagcactacgatatacccaaagtaagctggactaaatag

SEQ ID NO: 177990 - DNA, 339 bp, Artificial Sequence
  derived and/or modified sequence
atggaagcatatgagcaagtgcagaagggacccctgaaactcaaaggagtggccgagctgggtgtaacaaaacggaaaaagaagaagaaggacaaagacaaggctaaactgctggaggccatgggcacgtctaaaaagaacgaggaagagaagcgcagaggcctcgataaaagaacacccgcacaggccgcatttgaaaaaatgcaagaaaagagacagatggaacgaattcttaagaaagccagcaagactcacaagcagagagttgaggactttaatagacatttagatacactgaccgaacattatgatatacccaaggtaagctggaccaagtag

SEQ ID NO: 177991 - DNA, 339 bp, Artificial Sequence
  derived and/or modified sequence
atggaggcctacgagcaggtgcagaagggccccctgaagctgaagggcgtggccgagctgggcgtgaccaagagaaagaagaagaagaaggacaaggacaaggccaagctgctggaggccatgggcaccagcaagaagaacgaggaggagaagagaagaggcctggacaagagaacccccgcccaggccgccttcgagaagatgcaggagaagagacagatggagagaatcctgaagaaggccagcaagacccacaagcagagagtggaggacttcaacagacacctggacaccctgaccgagcactacgacatccccaaggtgagctggaccaagtag

SEQ ID NO: 177992 - protein, 178 aa, Artificial Sequence
  derived and/or modified sequence
MSSFSRAPQQWATFARIWYLLDGKMQPPGKLAAMASIRLQGLHKPVYHALSDCGDHVVIMNTRHIAFSGNKWEQKVYSSHTGYPGGFRQVTAAQLHLRDPVAIVKLAIYGMLPKNLHRRTMMERLHLFPDEYIPEDILKNLVEELPQPRKIPKRLDEYTQEEIDAFPRLWTPPEDYRL

SEQ ID NO: 177993 - DNA, 537 bp, Artificial Sequence
  derived and/or modified sequence
atgtcgagttttagcagagccccccagcaatgggctaccttcgcacgaatttggtatttgcttgacggcaagatgcaacctccagggaagctcgcagccatggcctctatcaggcttcagggcctgcacaagccagtgtatcacgcgcttagcgactgcggtgaccatgtagtgattatgaatactcgtcatatcgctttctcgggaaacaaatgggagcagaaggtttattcgtcccacacaggctacccagggggttttaggcaggtgaccgcagctcagctgcacttgagggatcccgtggcgatcgtgaagctggccatttatggcatgttaccaaagaacctgcatcgacgtacgatgatggaaaggctgcatctctttcccgacgagtacatacctgaggatattctgaaaaatctggtggaggaactgccacagcccaggaagatccccaagcgcttagacgaatatactcaggaagaaattgacgctttcccccggctgtggactcctcccgaggactaccgcttgtag

SEQ ID NO: 177994 - DNA, 537 bp, Artificial Sequence
  derived and/or modified sequence
atgagcagcttcagccgggccccccagcagtgggccacctttgcccgcatctggtacctgctggatggcaagatgcagcccccaggcaagctggccgccatggccagcatccggctgcagggcctgcacaagcctgtgtaccacgccctgagtgactgtggggaccacgtggtgatcatgaacaccaggcacatcgccttcagcggcaacaagtgggagcagaaggtgtacagcagccacacaggctacccaggcggcttccggcaggtgacagctgcccagctgcacctgcgggaccctgtggccatcgtgaagctggccatctacggcatgctgcccaagaacctgcacaggaggaccatgatggagcggctgcacctgttcccagatgagtacatccctgaggacatcctgaagaacctggtggaggagctgccccagcccaggaagatccccaagaggctggatgagtacacccaggaggagattgatgccttcccccggctgtggaccccacctgaggactaccgcctgtag

SEQ ID NO: 177995 - DNA, 537 bp, Artificial Sequence
  derived and/or modified sequence
atgagcagcttcagccgggccccccagcagtgggccaccttcgccagaatctggtaccttctggacgggaaaatgcagccccccggaaaacttgccgcaatggcttcaatcagattacagggcctacacaagcctgtttatcatgccctcagtgattgcggagatcacgttgtaataatgaatacccggcacattgccttctcaggcaacaagtgggagcagaaagtgtatagctcccatacagggtaccccggagggtttagacaggtgactgcggctcagttgcacctccgagaccccgtagctattgttaaactcgctatttacggcatgctgccgaaaaatctacaccgacgaactatgatggaacggctgcatctgttccccgatgaatatatcccagaagacattcttaagaacctggtagaggaacttccacagccacgaaagatcccaaagaggctggatgagtacactcaggaggaaatcgatgctttcccaaggctttggacccctcccgaggattaccggctctag

SEQ ID NO: 177996 - DNA, 537 bp, Artificial Sequence
  derived and/or modified sequence
atgagcagcttctcccgggctccacagcaatgggccacttttgctcgaatctggtacttactagatggtaaaatgcaacctccgggtaagctcgctgccatggcgtctatccgtctgcagggcctacataaacctgtttatcacgccctgagcgattgcggggatcacgtcgttatcatgaacacaagacacatagctttcagtggcaacaagtgggagcagaaggtatactctagccatacaggatatcctggtggatttagacaggtgactgctgcgcagctgcaccttcgagatcctgtagcaatcgtcaaacttgcaatttacgggatgctgcccaagaacctccacagaaggactatgatggagagactgcatctgttccccgacgagtacattccagaggacatacttaaaaacctggtggaagaactcccacagcccaggaaaatccccaagcgcctcgatgagtacacacaggaggaaatcgacgcctttccacggctttggactccccctgaggactatagattatag

SEQ ID NO: 177997 - DNA, 1086 bp, Artificial Sequence
  derived and/or modified sequence
gtttaggtcggctggaaattatgtcctccgtcggttttccgcagtttttccaccaagcgagatatttttgggagttattccctaaataactgcattatatgctcctttcatgacgaaattgctgccgtggagaagactggaggaaactcgaggaagagggagaagccgacaagtgctcgacgggctaggaactgtcctgcttgggtgttagcgtttcccgccgggccagtaaggctgagtgacccggcgtggctactaggagaaggacgtacggtcctgctagtagaggaatatgtcgagtttctctagggcgccccagcaatgggccacttttgctagaatatggtatctcttagatgggaaaatgcagccacctggcaaacttgctgctatggcatctataagacttcagggattacataaacctgtgtaccatgcactgagtgactgtggggatcatgttgttataatgaacacaagacacattgcattttctggaaacaaatgggaacaaaaagtatactcttcgcatactggctacccaggtggatttagacaagtaacagctgctcagcttcacctgagggatccagtggcaattgtaaaactagctatttatggcatgctgccaaaaaaccttcacagaagaacaatgatggaaaggttgcatctttttccagatgagtatattccagaagatattcttaagaatttagtagaggagcttcctcaaccacgaaaaatacctaaacgtctagatgagtacacacaagaagaaatagacgccttcccaagattgtggactccacctgaagattatcggctataagagaataagaattgcagaaaataacagtgaagtgattgaaactttcttctgatgagtttctctaacctacaggatggagtaaaacaactgctacagttcagcacctgttttatgtgccgaatcactgtggggaaaggtcaggaaggtatagtccttcaataggaaattgtaattaaaatataattttatagaaccatttttatgtaatctgatttgaatgttatagttgataataataaaatcacttacttggttga

SEQ ID NO: 177998 - DNA, 537 bp, Artificial Sequence
  derived and/or modified sequence
atgagcagcttcagcagagccccccagcagtgggccaccttcgccagaatctggtacctgctggacggcaagatgcagccccccggcaagctggccgccatggccagcatcagactgcagggcctgcacaagcccgtgtaccacgccctgagcgactgcggcgaccacgtggtgatcatgaacaccagacacatcgccttcagcggcaacaagtgggagcagaaggtgtacagcagccacaccggctaccccggcggcttcagacaggtgaccgccgcccagctgcacctgagagaccccgtggccatcgtgaagctggccatctacggcatgctgcccaagaacctgcacagaagaaccatgatggagagactgcacctgttccccgacgagtacatccccgaggacatcctgaagaacctggtggaggagctgccccagcccagaaagatccccaagagactggacgagtacacccaggaggagatcgacgccttccccagactgtggaccccccccgaggactacagactgtag

SEQ ID NO: 177999 - DNA, 736 bp, Artificial Sequence
  derived and/or modified sequence
ccccgggaacaaggaccggagctggatccgcggtgcggctgtgggtgagcggcgggctgcgggaccctcgcccggcggctcagaaaggcgggaagcgcacgcatttttctggcttgtttcctgaacgttggccggcggaggacccgcgagctcgggagagcgcccgggccgggctctgcattcttgttgcctcttccctggcgggggtgatactctcccgcggggcttgctgtgggggttcagggaggtggagatgggcccgccatgtgcctgcagggagcaggcgctgtggttaatacttttcttcttcgaaccctcccacagctctttagggtgagatctgctgtaccagtctcacaggtagggaaactgaggctcagggaagctgtgcagccaccggggcccagatcggtgcggtacacacccaggcagcttccactcgccgccccctaggccctggctgggttttgagggcacccaggttctctgacctgttatctgtaaatgaagtagggtacttttgtgaacaaattagctggaatccaggggcaataatttctcgcagaagtgaaaggagtcagcattggtaatagtgctgtgctgcggaagagtggagtctaaactttttcattgccagtgccccgaaactggagtgtgaaggaccgagacaaaatgaagactgtgctcatggttgctgaaaagccgtccttggcacagtcaattgccaaaatcctct

SEQ ID NO: 178000 - DNA, 1251 bp, Artificial Sequence
  derived and/or modified sequence
atggtggaccatctcctcccagtagacgagaacttctcctcccctaaatgtcctgtgggctacctcggagaccggctggtgggaagaagggcctaccacatgctcccaagcccagtctcggaggacgacagtgacgccagcagcccgtgcagctgctctagtccagatagccaggcgctttgcagctgttacggtgggggattaggaacagagagtcaggatagcattctggacttcctgctgtctcaagctacacttggttccggcggaggcagtgggagctctatcggcgcatcgtccggccctgtcgcatgggggccttggcggagagccgctgcccctgttaagggggaacacttctgtcttcccgaattccctcttggagatcctgatgatgtgcccaggcccttccaacccacgcttgaggaaattgaggaattcctcgaagagaatatggagcccggagtgaaagaagtgcctgaaggtaattcaaaagatttggatgcctgcagtcaactcagcgccgggcctcataagagccatttgcacccagggtcctccggaagagagcgttgttccccacctccaggtggagcttccgccggcggtgcacagggacccggaggggggcctaccccggacgggccaatcccagtgttacttcagattcaaccggtgcctgtgaaacaagaatccggcactgggcccgcctctcccggccaggcgccagagaacgtgaaagtagcccagctgctcgttaacatccagggacagacatttgcattagtcccacaggttgttccatcctcaaacctgaacctgccctcaaagttcgtgcgcatagcccccgtacctatcgctgccaagccagtgggtagtgggccactgggaccaggccctgctggcctgttaatgggacagaagttccccaaaaaccctgccgccgagctcataaaaatgcataaatgcactttcccggggtgctcgaagatgtacacgaaaagctctcacctgaaggcccatcttagacggcatactggggagaaaccctttgcctgtacttggccgggatgtgggtggcggttctcccgaagcgatgagctgtccagacatcgtagaagtcactccggcgtgaagccctaccagtgccctgtgtgtgagaaaaaatttgctcgctctgatcatctgtccaaacatatcaaggtgcatcggttcccacgatcctctcgatccgtgcgatctgtgaactag

SEQ ID NO: 178001 - DNA, 1251 bp, Artificial Sequence
  derived and/or modified sequence
atggtggaccacctgctgcctgtggatgagaacttcagcagccccaagtgccctgtgggctacctgggggaccggctggtgggcagaagagcctaccacatgctgcccagccctgtgtctgaagatgacagtgatgccagcagcccctgcagctgcagcagcccagacagccaggccctgtgcagctgctacggcggcggcctgggcacagagagccaggacagcatcctggacttcctgctgagccaggccaccctgggcagcggcggcggcagcggcagcagcatcggggccagcagcggccctgtggcctggggcccctggaggagagctgctgcccctgtgaagggggagcacttctgcctgcctgagttccccctgggggaccctgatgatgtgccccggcccttccagcccaccctggaggagattgaggagttcctggaggagaacatggagcccggggtgaaggaggtgcctgagggcaacagcaaggacctggatgcctgcagccagctgtctgctggcccccacaagagccacctgcaccctggcagcagcggccgggagcgctgcagccccccacctgggggcgccagcgctggaggagcccagggccctgggggcggccccaccccagatggccccatccctgtgctgctgcagatccagcctgtgcctgtgaagcaggagagcggcaccggccctgccagccctggccaggccccagaaaatgtgaaggtggcccagctgctggtgaacatccagggccagacctttgccctggtgccccaggtggtgcccagcagcaacctgaacctgcccagcaagtttgtgagaattgcccctgtgcccatcgccgccaagcctgtgggcagcggccccctgggccctggccctgctggcctgctgatgggccagaagttccccaagaacccagctgctgagctgatcaagatgcacaagtgcaccttccctggctgcagcaagatgtacaccaagagcagccacctgaaggcccacctgcggcggcacactggagagaagccctttgcctgcacctggccaggctgcggctggaggttcagcagaagtgatgagctgagccgccaccggcgcagccacagcggcgtgaagccctaccagtgccctgtgtgtgagaagaagtttgcccggagtgaccacctgagcaagcacatcaaggtgcaccgcttccccaggagcagccgctctgtgcgctctgtgaactag

SEQ ID NO: 178002 - DNA, 1251 bp, Artificial Sequence
  derived and/or modified sequence
atggtggaccacctgctgcccgtggacgagaacttcagcagccccaaatgtcctgtaggttatcttggagatcggcttgttggacggagagcctaccatatgctgccatccccagtaagcgaagacgacagtgatgcatcctccccctgttcttgctcttctcctgattcacaggcattgtgttcctgctacgggggaggtctgggtactgaatcacaggattcaatcttggattttctgctgtcacaggccacactcggaagcggaggggggtctggctctagtatcggggcttcttccggccccgttgcgtggggcccatggcggcgcgctgcggccccggtgaagggagagcacttttgtctcccagagttcccactcggagaccccgacgacgttccacgcccattccaacctacgctggaggagatcgaagaatttctggaagaaaatatggaacctggcgtgaaggaggtgcctgaaggaaactccaaggatctggacgcttgctcccagctgtctgcaggaccccacaagtctcacctgcatcctggctcctcgggccgggagcgctgctctccacccccagggggcgccagcgctggcggtgcccagggccccggaggtggcccaactccagatggccccatccctgtcctccttcaaattcagcccgtcccagtaaaacaagagtcaggcactggcccagctagccccgggcaagcaccagagaatgtgaaggtcgctcagttgctcgtcaatattcagggccagaccttcgccttggtgcctcaggtggtcccctcttccaacctcaacctgccttcaaaatttgtcagaatcgctcccgtgccaattgccgccaagccagtggggtcggggcctctgggtccaggccctgctggcctattgatgggccaaaagtttcctaagaatcctgccgccgagctgatcaagatgcataaatgtactttcccaggatgcagcaaaatgtataccaagagttcccacttgaaagcgcatctgcgacgacacacaggcgagaagccctttgcctgtacctggccaggctgcggttggcgattctccagatctgacgaactgtctcgccacaggcggtcccactccggcgtaaagccctaccagtgtcctgtctgcgagaagaaattcgctcgatccgatcatctgtcgaagcacatcaaggtgcatcggtttccacggagctctaggagtgtgagaagcgttaactag

SEQ ID NO: 178003 - DNA, 1251 bp, Artificial Sequence
  derived and/or modified sequence
atggtagaccacctcctgcccgtggacgagaatttctcttctcctaaatgtcctgtggggtacttaggagaccggttagtggggagaagggcataccacatgctgccatcccccgtttcggaagatgacagcgacgcctcttctccttgcagttgttccagtccagattctcaggccctttgctcatgctatggcggtggactgggaaccgagtcgcaagattcgatcctggactttctgctgagccaggcgaccctgggaagcggtggaggatctgggtcatctatcggagcgtcaagcggaccagttgcttggggcccatggcggcgagccgcagcccctgttaagggggagcacttttgcctgcccgagtttccgctcggggaccctgatgacgtcccccgaccatttcagccgaccttggaggaaatcgaagagtttttggaagaaaacatggaacccggagtgaaggaggtgccggaaggaaattctaaggacttggatgcatgcagtcagctctcggctggtccacacaagtctcacctgcacccgggtagctctggacgggagcgctgcagccctcctccaggcggagctagcgcaggcggagcgcagggtccgggtggcggtcccacgcctgacggacctatacccgtactgcttcagatccagcccgtccctgtgaaacaagagagtggaacaggcccagcatctccgggacaagcacctgagaacgtgaaagttgctcaactcctggtgaacatacaaggtcaaacatttgccctggtgcctcaggttgttccaagctctaatttgaacctgcccagcaagtttgtacggattgctcccgtgcctatcgccgctaaaccggtaggatccggcccactaggccctggccctgcaggtctgcttatggggcagaagtttcctaaaaatcccgcagcggagttaatcaagatgcacaaatgtacattccctggctgttcaaaaatgtatacaaagagctcacatctgaaagcacacctccggcgtcacactggtgaaaagccatttgcttgcacctggccaggttgcggctggagattttcgagaagtgacgagctaagtcgccatcgacgctcccactcgggagtgaagccgtatcagtgcccggtctgtgaaaaaaaatttgctaggtcggaccacctctccaagcacatcaaagttcatcggttcccgcgttcgtcccgctcggtgagatccgtaaactag

SEQ ID NO: 178004 - DNA, 1251 bp, Artificial Sequence
  derived and/or modified sequence
atggtggaccacctgctgcccgtggacgagaacttcagcagccccaagtgccccgtgggctacctgggcgacagactggtgggcagaagagcctaccacatgctgcccagccccgtgagcgaggacgacagcgacgccagcagcccctgcagctgcagcagccccgacagccaggccctgtgcagctgctacggcggcggcctgggcaccgagagccaggacagcatcctggacttcctgctgagccaggccaccctgggcagcggcggcggcagcggcagcagcatcggcgccagcagcggccccgtggcctggggcccctggagaagagccgccgcccccgtgaagggcgagcacttctgcctgcccgagttccccctgggcgaccccgacgacgtgcccagacccttccagcccaccctggaggagatcgaggagttcctggaggagaacatggagcccggcgtgaaggaggtgcccgagggcaacagcaaggacctggacgcctgcagccagctgagcgccggcccccacaagagccacctgcaccccggcagcagcggcagagagagatgcagccccccccccggcggcgccagcgccggcggcgcccagggccccggcggcggccccacccccgacggccccatccccgtgctgctgcagatccagcccgtgcccgtgaagcaggagagcggcaccggccccgccagccccggccaggcccccgagaacgtgaaggtggcccagctgctggtgaacatccagggccagaccttcgccctggtgccccaggtggtgcccagcagcaacctgaacctgcccagcaagttcgtgagaatcgcccccgtgcccatcgccgccaagcccgtgggcagcggccccctgggccccggccccgccggcctgctgatgggccagaagttccccaagaaccccgccgccgagctgatcaagatgcacaagtgcaccttccccggctgcagcaagatgtacaccaagagcagccacctgaaggcccacctgagaagacacaccggcgagaagcccttcgcctgcacctggcccggctgcggctggagattcagcagaagcgacgagctgagcagacacagaagaagccacagcggcgtgaagccctaccagtgccccgtgtgcgagaagaagttcgccagaagcgaccacctgagcaagcacatcaaggtgcacagattccccagaagcagcagaagcgtgagaagcgtgaactag

SEQ ID NO: 178005 - protein, 1548 aa, Artificial Sequence
  derived and/or modified sequence
MLRARPEALMLLGALLTGSLGPSGNQDALSLPWEVQRYDGWFNNLRHHERGAVGCRLQRRVPANYADGVYQALEEPQLPNPRRLSNAATRGIAGLPSLHNRTVLGVFFGYHVLSDVVSVETPGCPAEFLNIRIPPGDPVFDPDQRGDVVLPFQRSRWDPETGRSPSNPRDLANQVTGWLDGSAIYGSSHSWSDALRSFSGGQLASGPDPAFPRDSQNPLLMWAAPDPATGQNGPRGLYAFGAERGNREPFLQALGLLWFRYHNLWAQRLARQHPDWEDEELFQHARKRVIATYQNIAVYEWLPSFLQKTLPEYTGYRPFLDPSISPEFVVASEQFFSTMVPPGVYMRNASCHFRKVLNKGFQSSQALRVCNNYWIRENPNLNSTQEVNELLLGMASQISELEDNIVVEDLRDYWPGPGKFSRTDYVASSIQRGRDMGLPSYSQALLAFGLDIPRNWSDLNPNVDPQVLEATAALYNQDLSQLELLLGGLLESHGDPGPLFSAIVLDQFVRLRDGDRYWFENTRNGLFSKKEIEDIRNTTLRDVLVAVINIDPSALQPNVFVWHKGAPCPQPKQLTTDGLPQCAPLTVLDFFEGSSPGFAITIIALCCLPLVSLLLSGVVAYFRGREHKKLQKKLKESVKKEAAKDGVPAMEWPGPKERSSPIIIQLLSDRCLQVLNRHLTVLRVVQLQPLQQVNLILSNNRGCRTLLLKIPKEYDLVLLFSSEEERGAFVQQLWDFCVRWALGLHVAEMSEKELFRKAVTKQQRERILEIFFRHLFAQVLDINQADAGTLPLDSSQKVREALTCELSRAEFAESLGLKPQDMFVESMFSLADKDGNGYLSFREFLDILVVFMKGSPEDKSRLMFTMYDLDENGFLSKDEFFTMMRSFIEISNNCLSKAQLAEVVESMFRESGFQDKEELTWEDFHFMLRDHDSELRFTQLCVKGGGGGGNGIRDIFKQNISCRVSFITRTPGERSHPQGLGPPAPEAPELGGPGLKKRFGKKAAVPTPRLYTEALQEKMQRGFLAQKLQQYKRFVENYRRHIVCVAIFSAICVGVFADRAYYYGFASPPSDIAQTTLVGIILSRGTAASVSFMFSYILLTMCRNLITFLRETFLNRYVPFDAAVDFHRWIAMAAVVLAILHSAGHAVNVYIFSVSPLSLLACIFPNVFVNDGSKLPQKFYWWFFQTVPGMTGVLLLLVLAIMYVFASHHFRRRSFRGFWLTHHLYILLYALLIIHGSYALIQLPTFHIYFLVPAIIYGGDKLVSLSRKKVEISVVKAELLPSGVTYLQFQRPQGFEYKSGQWVRIACLALGTTEYHPFTLTSAPHEDTLSLHIRAVGPWTTRLREIYSSPKGNGCAGYPKLYLDGPFGEGHQEWHKFEVSVLVGGGIGVTPFASILKDLVFKSSLGSQMLCKKIYFIWVTRTQRQFEWLADIIQEVEENDHQDLVSVHIYVTQLAEKFDLRTTMLYICERHFQKVLNRSLFTGLRSITHFGRPPFEPFFNSLQEVHPQVRKIGVFSCGPPGMTKNVEKACQLVNRQDRAHFMHHYENF

SEQ ID NO: 178006 - DNA, 4647 bp, Artificial Sequence
  derived and/or modified sequence
atgctgcgtgccaggcccgaggcccttatgctgctgggcgctctactgacaggatctctggggccctccgggaatcaggatgccctcagcctcccttgggaagtccaaaggtatgacggatggtttaacaatttacgtcaccatgaaagaggcgccgtcgggtgtcgccttcagcggcgagtccctgccaactacgctgacggcgtctatcaggctctcgaagaacctcagttgcctaacccacgtcgactgagcaacgcagcaactagaggcattgccgggctgccatccctgcataacagaactgtcctgggagtgtttttcggctatcatgtcctatccgatgtggtctccgttgaaactcctggctgccccgcggaattcctgaacattcggattcctcccggtgaccctgtgttcgaccccgaccagagaggtgatgtcgtgctgcccttccagcggtctcgctgggatcccgagacaggaagatcacccagtaatcctcgagatcttgcgaaccaggtgaccggctggctggacggttctgccatatatggttcctcccactcatggtcagatgccctacgctcatttagcgggggccagctggcgtcgggcccagaccctgcttttccacgtgacagtcagaacccgctactgatgtgggccgctccagatccagctacagggcagaatgggcctcgcggattgtacgccttcggagctgagcggggaaatcgcgagcctttcttgcaggccctaggactcctgtggttcagatatcataatctgtgggctcaaagattggcaaggcagcacccagactgggaagatgaagaactatttcagcacgcccggaagcgggtgattgccacgtaccaaaacatagccgtctacgagtggttacccagttttctgcaaaaaactctgcccgaatacacaggataccgcccctttttagacccaagcatttcccccgaatttgttgttgcctccgagcagtttttttctactatggtccctcctggggtatatatgcgaaatgctagttgccacttcaggaaagttcttaataaaggattccagagctcacaggccctccgcgtgtgcaataattactggatccgggagaatcccaatctgaactccacacaggaggtcaacgagctgctacttggtatggccagtcagatcagcgagctggaggacaacatagtagtggaggaccttcgtgattactggccagggcctggaaagttctctcggacagactatgtagcctcttcgattcagcgcggtagagatatgggcctgcccagttacagccaagcactcctggcctttgggctcgacattcctaggaattggagcgacctcaatccgaacgtggatccacaggttctcgaggcaaccgccgcactctacaatcaggacttgtcccagttagagctactactaggcggcttgctcgagtctcatggtgatcctggacctctgttctctgctatcgtgctggaccagtttgtgaggctgcgagatggcgatcgatactggtttgaaaacacgaggaacggtcttttcagcaaaaaagagatcgaggatatccgtaacacaactctgcgggacgtactagtcgcggtgataaacatcgatccatccgcactacagcctaacgtgtttgtgtggcacaaaggggcaccctgcccccaacccaaacagctcacaactgatgggctgcctcagtgtgcccctctgacagttttagacttcttcgaagggagcagccctggtttcgccatcaccatcatcgccttgtgctgcctgcctctggtgtccctgctcctgtctggcgtcgtagcatactttaggggacgtgaacacaaaaagctccagaagaaactcaaagagtccgtgaagaaggaggccgcaaaggacggagtgcctgccatggagtggccaggtcccaaggaaaggtcctcccccatcatcatccaattgctgagcgaccggtgtcttcaggtgttgaaccgccatcttacagtcctgcgcgtggtacagctccagcctctgcagcaggtgaacctaatcttgtctaataatagggggtgtcgaacgttactcttgaagatcccaaaggagtatgacctggttctgttgttcagcagtgaggaggaacgcggcgcattcgttcagcagctgtgggacttctgcgtcagatgggctctcgggctgcatgtcgctgagatgagtgaaaaggagctctttcggaaagccgtgaccaagcagcaacgggagcgaattttagaaatcttctttaggcacctcttcgcccaggtcttagatattaaccaggctgacgcaggcacacttcccttggatagtagtcagaaggttcgtgaagcgctaacttgcgaactgtcccgcgcagagttcgccgagtccctcggactcaagcctcaggatatgttcgtggagagcatgttttctctggctgataaagacgggaacggctacctgagcttccgggagtttctggatatactggtagtttttatgaaaggatcgcccgaggacaaatcacgtctgatgtttaccatgtatgacctggacgaaaatggtttcctgagcaaagatgagtttttcaccatgatgagaagcttcatagaaatatcaaataactgcttgagcaaagcccagctggctgaggtggtggaatctatgttccgggaaagcggattccaagacaaagaggagttgacatgggaagactttcatttcatgctgcgagatcacgactctgaactgcggtttacacagctgtgtgtcaagggaggagggggcggtgggaacggcatcagggatattttcaaacaaaatattagttgtcgggtgtccttcatcacacgaacaccgggagagcgttctcatccccagggccttggccctcccgcccccgaagctcctgagttaggcggccctggcctgaaaaaacgatttggcaagaaagccgctgtcccaacaccaagactctacactgaggccctacaagaaaaaatgcagcggggattcctggcccagaagctccaacaatataaaaggtttgttgagaactatcggcggcatatcgtctgcgttgccatctttagtgcaatatgtgtcggtgtgttcgctgatcgcgcttactattacggatttgcatctccaccatccgacatcgcacagaccacactggtgggtatcatcctgagtagaggaacagccgcctccgtgtcctttatgtttagctatattctgctgacaatgtgtagaaacctgatcacgttcctgcgagaaactttcctgaaccggtacgtcccatttgacgccgccgtggacttccacaggtggatcgctatggccgctgtagttctggcaatcctccactccgccggacatgccgtaaacgtctacatcttttcagtgagccccctctccctgctcgcctgtatcttccctaacgttttcgtcaatgacgggtccaaactgccacagaagttctactggtggttcttccagactgtgcctggtatgactggagttctgctattgctggtcttggccatcatgtacgtgttcgcctcacaccatttcagaagaaggagtttccgggggttctggttgactcatcacctgtatatcttactttacgcactcctaattatccatggctcatacgccctcatccagctaccaacattccacatctattttcttgtgcctgctattatctacggtggcgataagctggtgagcctgtcaagaaagaaggtggagatctctgtggtgaaagcagagctcctgcccagcggagtgacctatttacaattccagcgtccacagggcttcgaatataagagcggacaatgggtgaggattgcttgcctggctttgggcaccacagaatatcatccatttaccctgactagcgctcctcacgaagatacattgtcccttcatattagagcagtggggccctggaccacaaggctgagagaaatttattcttcacccaaagggaatggctgtgcaggataccccaagctgtacctggacggcccattcggagaagggcatcaagaatggcataaatttgaagtgtccgttttggtgggaggcggtattggcgttacccccttcgcctccatccttaaagatctggtgttcaagtcctcactgggttctcaaatgctgtgcaagaagatttactttatctgggtgacacggacacagcgacagtttgaatggttggctgacatcattcaagaagtggaggagaacgatcaccaggacctggtttcggtgcacatctacgtgacccagctcgcggagaaattcgatctccgcaccacaatgctctatatatgtgagaggcattttcagaaggtactgaaccggtccctctttacagggctgagatccatcactcactttggacgaccaccattcgagcctttcttcaatagcctgcaggaagtgcacccccaggtgagaaaaattggcgttttctcttgcgggccgccaggaatgaccaaaaatgtagagaaggcttgccaattagtgaacaggcaggatcgcgctcacttcatgcaccactatgagaacttttag

SEQ ID NO: 178007 - DNA, 4647 bp, Artificial Sequence
  derived and/or modified sequence
atgctgcgggcccggcctgaggccctgatgctgctgggcgccctgctgaccggcagcctgggccccagcggcaaccaggatgccctgagcctgccctgggaggtgcagagatatgatggctggttcaacaacctgcggcaccacgagagaggagctgtgggctgccgcctgcagaggagagtgcctgccaactatgcagatggagtgtaccaggccctggaggagccccagctgcccaacccccggcggctgagcaatgctgccacccggggcattgctggcctgcccagcctgcacaacagaacagtgctgggcgtcttcttcggctaccacgtgctgagtgatgtggtgtctgtggagaccccaggctgcccagctgagttcctgaacatccgcatccccccaggggaccctgtgtttgatcctgaccagagaggagatgtggtgctgcccttccagaggagccgctgggaccctgagaccggccgcagccccagcaacccccgggacctggccaaccaggtgacaggctggctggatggcagcgccatctacggcagcagccacagctggagcgatgccctgcgctccttcagcggcggccagctggccagcggccctgaccctgccttcccccgggacagccagaaccccctgctgatgtgggccgccccagaccctgccaccggccagaatggcccccggggcctgtatgccttcggggctgagcggggcaaccgggagcccttcctgcaggccctgggcctgctgtggttccgctaccacaacctgtgggcccagaggctggcccggcagcacccagactgggaggatgaggagctgttccagcacgccaggaagagggtcatcgccacctaccagaacattgctgtgtatgagtggctgcccagcttcctgcagaagaccctgcctgagtacacaggctaccggcccttcctggaccccagcatcagccctgagtttgtggtggccagcgagcagttcttcagcaccatggtgcccccaggagtgtacatgagaaatgccagctgccacttcaggaaggtgctgaacaagggcttccagagcagccaggccctgcgggtgtgcaacaactactggatccgggagaaccccaacctgaacagcacccaggaggtgaatgagctgctgctgggcatggccagccagatcagcgagctggaggacaacatcgtggtggaggacctgcgggactactggccaggccctgggaagttcagcaggacagattatgtggccagcagcatccagaggggccgggacatgggcctgcccagctacagccaggccctgctggccttcggcctggacatccccaggaactggagcgacctgaaccccaacgtggacccccaggtgctggaggccacagctgccctgtacaaccaggacctgagccagctggagctgctgctgggcggcctgctggagagccatggagaccccggccccctcttcagcgccatcgtgctggaccagtttgtgcggctgagagatggagaccgctactggtttgagaacaccagaaatggcctcttcagcaagaaggagattgaggacatccggaacaccaccctgagagatgtgctggtggccgtcatcaacatcgaccccagcgccctgcagcccaacgtgtttgtgtggcacaagggggccccctgcccccagcccaagcagctgaccacagatggcctgccccagtgtgcccccctgactgtgctggacttctttgagggcagcagccctggctttgccatcaccatcatcgccctgtgctgcctgcccctggtgtccctgctgctgagcggcgtggtggcctacttccggggccgggagcacaagaagctgcagaagaagctgaaggagagcgtgaagaaggaggccgccaaggatggagtgcctgccatggagtggccaggccccaaggagaggagcagccccatcatcatccagctgctgagtgaccgctgcctgcaggtgctgaacagacacctgactgtgctgcgggtggtgcagctgcagcccctgcagcaggtgaacctgatcctgagcaacaacagaggctgcaggaccctgctgctgaagatccccaaggagtatgacctggtgctgctcttcagcagcgaggaggagcggggggcctttgtgcagcagctgtgggacttctgtgtgcgctgggccctgggcctgcacgtggccgagatgtctgagaaggagctgttcaggaaggctgtgaccaagcagcagcgggagcgcatcctggagatcttcttccgccacctgtttgcccaggtgctggacatcaaccaggctgatgctggcaccctgcccctggacagcagccagaaggtgcgggaggccctgacctgtgagctgagcagagctgagtttgctgagagcctgggcctgaagccccaggacatgtttgtggagagcatgttcagcctggccgacaaggatggaaatggctacctgtccttccgggagttcctggacatcctggtggtgttcatgaagggcagccctgaggacaagagccggctgatgttcaccatgtatgacctggatgaaaatggcttcctgagcaaggatgagttcttcaccatgatgaggagcttcatcgagatcagcaacaactgcctgagcaaggcccagctggccgaggtggtggagagcatgttccgggagagcggcttccaggacaaggaggagctgacctgggaggacttccacttcatgctgcgggaccatgattctgagctgcgcttcacccagctgtgtgtgaagggcggcggcggcggcggcaatggcatccgggacatcttcaagcagaacatcagctgccgggtgtccttcatcaccaggaccccaggagagaggagccacccccagggcctgggccccccagcccctgaggcccctgagctgggcggccctggcctgaagaagagatttgggaagaaggctgctgtgcccaccccccggctgtacacagaggccctgcaggagaagatgcagaggggcttcctggcccagaagctgcagcagtacaagagatttgtggagaactacagaagacacatcgtgtgtgtggccatcttcagcgccatctgtgtgggcgtgtttgctgaccgggcctactactacggctttgccagcccccccagcgacatcgcccagaccaccctggtgggcatcatcctgagccggggcacagctgcctctgtgtccttcatgttctcctacatcctgctgaccatgtgcaggaacctgatcaccttcctgcgggagaccttcctgaacagatatgtgccctttgatgctgctgtggacttccaccgctggatcgccatggctgctgtggtgctggccatcctgcacagcgctggccatgctgtgaatgtgtacatcttctctgtgagccccctgagcctgctggcctgcatcttccccaacgtgtttgtgaatgatggcagcaagctgccccagaagttctactggtggttcttccagacagtgcccggcatgactggagtgctgctgctgctggtgctggccatcatgtatgtgtttgccagccaccacttcagaagaagaagcttccggggcttctggctgacccaccacctgtacatcctgctgtatgccctgctgatcatccacggcagctatgccctgatccagctgcccaccttccacatctacttcctggtgcctgccatcatctatggaggagacaagctggtgtccctgagcaggaagaaggtggagatctctgtggtgaaggccgagctgctgcccagcggcgtgacctacctgcagttccagaggccccagggctttgagtacaagagcggccagtgggtgagaattgcctgcctggccctgggcaccacagagtaccaccccttcaccctgaccagcgcccctcatgaggacaccctgagcctgcacatccgggctgtgggcccctggaccacccggctgcgggagatctacagcagccccaagggaaatggctgtgccggctaccccaagctgtacctggatggcccctttggagagggccaccaggagtggcacaagtttgaggtgtctgtgctggtgggcggcggcattggagtgaccccatttgccagcatcctgaaggacctggtgttcaagagcagcctgggcagccagatgctgtgcaagaagatctacttcatctgggtgaccaggacccagaggcagtttgagtggctggccgacatcatccaggaggtggaggagaatgaccaccaggacctggtgtctgtgcacatctacgtgacccagctggccgagaagtttgacctgcggaccaccatgctgtacatctgtgagcggcacttccagaaggtgctgaacagaagcctcttcaccggcctgcggagcatcacccacttcggccggcccccatttgagcccttcttcaacagcctgcaggaggtgcacccccaggtgaggaagattggagtcttcagctgtggccccccaggcatgaccaagaatgtggagaaggcctgccagctggtgaaccggcaggaccgggcccacttcatgcaccactatgagaacttctag

SEQ ID NO: 178008 - DNA, 4647 bp, Artificial Sequence
  derived and/or modified sequence
atgctgcgggcccggcccgaggccctgatgctgctgggcgccctgttaactggctccctgggtccctcaggtaaccaagatgccctatccttaccttgggaggtacaacgatatgatggctggtttaacaaccttcgccatcacgaacgcggcgccgtcggctgtcgccttcaacggcgcgttcctgctaattatgccgacggagtctaccaagctctcgaagagccccaactccccaatccccgccgtctgtccaatgctgccacacgggggattgcagggctcccctccctccacaatcgcaccgtattgggcgttttctttgggtaccacgtgttgagtgatgttgttagtgtggagacccctggctgccctgcagagttcctgaacatccgcattccaccaggggaccccgtcttcgaccctgatcagcgcggggacgtggtcctgccttttcagaggagtcgctgggacccagaaactggccggtccccgtctaacccccgggatctggctaatcaggtgaccggatggctggacggttccgcaatctatggcagctcccattcatggtctgacgctctgagaagtttcagcggtggccagttagcatctggaccagacccagccttcccacgcgattcccaaaatccccttctgatgtgggcggccccagaccccgccacaggccagaacggcccccggggtctgtacgcatttggcgccgagagagggaatcgggaaccttttctccaagcactcgggttgctctggttccgctaccacaatttgtgggcccagcgactggccaggcagcaccctgattgggaagatgaagagttgttccagcacgccaggaagagggtaatcgccacctatcagaacattgcagtttatgagtggctcccgtctttcctccagaaaaccctgcctgagtacactggctaccgacctttcttggacccaagcatttctccagagttcgtggtggcctcagagcagttcttttcaaccatggtcccacccggagtgtacatgcgcaatgcaagttgccactttaggaaggtactcaacaaaggatttcagtcctcacaggctttgcgagtgtgcaataactattggatcagagagaaccctaatctgaattccacacaggaggttaatgagctcctcctcggcatggcctcgcagatctcagagctagaggataacattgttgtggaagatctcagggactactggccgggccctggaaaattcagcaggaccgattacgtggcctcttcaatccagcgaggtagggatatgggactgccatcctacagccaggctctgttggcattcggcctcgatatccctagaaactggtctgatctgaatcctaacgtggaccctcaggttctggaagcaactgcggctctctataatcaggacctctctcagctagagcttctgttgggcggattgctcgaatctcatggggaccccggccctctgtttagcgctatcgtccttgaccagtttgtccggctgcgcgacggagatagatactggttcgagaacacacggaatggattgtttagcaaaaaggaaattgaggacatcagaaacactacattgcgcgacgtgttagtcgctgttatcaacattgacccgtccgccctgcagcctaatgtcttcgtctggcacaagggcgcaccatgcccccagcccaaacagcttaccacggacgggctgccccagtgcgctcccctgactgttctcgatttctttgaaggctcttccccaggattcgcaatcacaatcatcgctctctgctgcctgcccttagtgagcctgttgctgagcggtgtggtcgcttatttccgcggacgtgagcataaaaaactccaaaaaaagctcaaggaatcagtgaagaaggaggcggccaaagacggggtccctgcgatggagtggccagggcctaaagaaagaagttcacctatcattattcagcttctgtctgatcggtgtctgcaggtattaaacagacatcttaccgtgctgagagtagttcagctgcagcctttacagcaggttaaccttattctttcaaataaccgtggatgcagaactctattgctgaaaatacccaaggaatatgatctcgttttgctcttttcctcggaagaggaacgtggtgcatttgttcagcagttatgggacttctgcgtccgttgggccctgggcctgcacgttgccgagatgtccgagaaagaacttttccgcaaagcagttacaaagcagcaacgcgagcggatccttgagattttcttccggcatctcttcgctcaagtccttgacataaaccaagctgacgccggcactcttcctctcgattcttctcagaaggtaagggaggccctgacctgcgagctgtctcgagcagagttcgctgagagcttaggcctgaagcctcaggatatgttcgtcgagtcgatgttctcattggccgataaagatggaaatgggtacctgtcgtttcgagaattccttgatatactggtggtcttcatgaagggttcccctgaggataaaagtcggctgatgttcacaatgtatgaccttgacgagaacggatttctatccaaggacgagttttttaccatgatgcggagttttatcgaaattagcaataactgccttagcaaagcccagctggctgaagttgtagagtccatgttccgggagagcgggttccaagataaagaggaactcacatgggaggacttccattttatgctgagggaccacgattccgagctgcggttcacccagctgtgtgtgaaggggggtggtggaggggggaacggcattagagatatttttaagcagaacatatcctgccgggtgagttttatcactcgtacccccggggaacgctcgcaccctcaaggcttgggaccacctgcacctgaagcacccgaactcggaggacctgggctaaagaagcgcttcggaaaaaaggcagccgtccctacacctagactttacacagaagccctgcaggaaaaaatgcaacgcgggttcttagcccagaagctacaacagtataagcgcttcgtcgaaaattaccggcggcacatcgtctgcgtggctatcttcagtgcgatctgcgttggtgtattcgctgaccgggcatactactacgggtttgcctcgcccccatctgatatcgcccaaacgacactggtaggtatcatcttgtcccgcgggactgctgctagcgtgagcttcatgttcagttacattttactgaccatgtgcagaaatctgattacttttctgagagagacctttcttaacaggtacgtgccattcgatgctgctgtggattttcatcggtggatcgccatggctgctgtggtactggcaatcctgcattcagcagggcacgccgtgaatgtatacatttttagcgtgtcccctctgagtcttttggcctgcatcttcccaaatgttttcgttaacgatggtagtaagctgcctcagaaattttattggtggtttttccagacagtgccagggatgacaggagtcttgctgcttttggtactggcaatcatgtatgtatttgcctcccaccatttcagacgcagatcttttcggggtttctggctgacacatcacttgtatatactgctttatgcgctgctgattatccatggcagctacgccctcattcagctccctaccttccacatttactttctggtgcccgctatcatctacggaggggataagctagtctctctcagccgcaagaaagttgagatttccgtcgtcaaggcagaactgcttccttcgggagtgacgtatttacaattccagcggccacaggggtttgaatacaaatccggacaatgggtgcgtatcgcatgcttggcgctggggaccaccgaataccatccattcacactcacgtcagcaccccacgaggacacactctctctgcacataagagccgtgggcccatggacaacccgcttgcgagagatttattctagcccgaaaggtaatggctgcgcgggctatccaaagctatatctcgacggcccttttggcgaggggcatcaggagtggcataaatttgaggtaagtgtgctggtgggcggggggatcggagtcacccccttcgcaagcatcctaaaagatcttgtttttaaatcctcacttggatcacagatgctatgcaaaaagatctatttcatctgggtgacccgcactcagcggcagtttgagtggcttgctgatattattcaggaagtggaggagaacgatcaccaggatctagtctccgtacatatctatgtgactcagctcgcagagaagtttgatctccggaccacaatgttgtacatctgcgagaggcatttccagaaggttctgaacagaagcctgtttaccggactacgctctatcacacacttcggtcgtcctccctttgagcctttcttcaactctctacaggaagtgcacccccaagttcgcaaaatcggcgtattttcctgcggcccccctggcatgacaaaaaacgtggagaaagcctgccaattggtcaacagacaggaccgggcccactttatgcaccattatgaaaatttctag

SEQ ID NO: 178009 - DNA, 4647 bp, Artificial Sequence
  derived and/or modified sequence
atgttacgggcacgtcccgaggctcttatgctcctgggggctctcttaactgggagcctcggcccttctggaaatcaagacgctctctccttaccctgggaggtccaaaggtatgatggttggttcaacaatctccgccaccacgagcgcggagccgtgggctgtaggctgcagcggagggtgccagcaaattatgccgacggagtatatcaagcccttgaggagccacaactgccaaatcccaggaggcttagtaatgctgccactcggggtatcgccggtctgccctctttgcacaaccgcaccgttctgggcgtgtttttcgggtaccacgtgctttccgacgtggtcagtgtcgagactcctgggtgccccgcagaattcctaaatattcggattcccccaggcgaccctgtgtttgatcctgatcagagaggggacgttgtccttccttttcagcgttctcgctgggatcccgaaaccggacggagcccatccaatccacgggatctcgcgaaccaggtgactgggtggctggacggctccgccatatacggcagcagtcacagctggtccgacgccctgcggtcgttcagtggcggacagctcgctagcggtcccgacccggctttcccccgtgatagccagaacccattgctcatgtgggccgctcccgatcctgccaccgggcagaacgggcctagagggctttatgcctttggcgcagagcgcggaaaccgggagccgttcttgcaggcactgggcctactctggtttcgctatcataacctgtgggcacagcgcttagcaagacagcatcctgattgggaagatgaagagctctttcagcatgctaggaaacgggtcatcgccacgtaccaaaatatcgccgtgtacgagtggctgccaagcttcctgcaaaaaacccttcccgagtatacaggctaccgtccattcttggacccctctatctctcccgagtttgtcgtagcttctgagcagtttttctccactatggttccccctggcgtgtatatgcggaatgccagttgccattttaggaaagttctcaacaaagggtttcaatcttctcaagcgctgcgcgtgtgtaacaactattggattagggaaaaccctaatctgaactctacccaggaggtcaatgaactgctcctgggcatggctagtcagatctcagagctcgaagacaatattgtcgtggaggacctgcgcgattattggcccggacctggaaagttttcacggactgactacgtggcctctagcatacagcgcggtcgcgacatgggacttccgtcctattctcaggcactgctagcgttcgggttggacattcccagaaattggtctgatcttaatcccaacgttgacccacaagtgctggaagcaacagctgcgttgtacaaccaggacctgagccagttggagctcctccttggtggactgctggagagccacggggatcccggacccttattctctgccatagtattagaccagttcgtacgcctgcgggacggcgaccgctattggtttgagaatactaggaacggcctattcagcaaaaaggagattgaagacattcggaatactacactgcgagatgttctggtcgctgtgattaacatagatccgagtgcccttcagcctaatgttttcgtgtggcacaaaggcgcaccctgtcctcagccaaaacagctgacgacagatgggcttccacagtgcgcgcctctcaccgtcctcgacttcttcgagggcagcagcccaggcttcgccatcaccattattgcactgtgctgcctgccactagtgtctttgctcctgagtggggtggtggcatacttccgaggtcgggagcataaaaaattgcaaaagaaacttaaggaatcagtgaagaaggaagcggctaaagacggggtgcccgctatggagtggcctggccctaaggagcgaagcagtccgattattatccaactcctgtccgacagatgcctgcaggtgttgaataggcacctcacagtcctgcgggtggtccaactgcaaccccttcagcaggttaacttgatcctttcgaataatagaggttgccggacactcttgctgaagattcctaaggaatacgatctggtgctgctgtttagcagcgaagaagaacgcggtgcctttgtgcagcagctgtgggacttttgcgtcaggtgggccctgggcctgcatgtcgcagagatgtctgagaaggagctcttccgcaaagcagtgaccaagcagcagagagagcggatcctggagatcttttttcggcacctgtttgctcaggttttagacatcaaccaggcagacgccggtaccttacctttggattcaagccagaaggtgcgagaagccctcacatgcgaacttagccgcgcagagtttgccgaaagccttgggctgaagccacaagatatgtttgtggagtccatgttctcacttgccgacaaagatggtaacgggtatctgtcatttcgcgagtttctagatattcttgtcgtgttcatgaaagggtcacccgaggacaaaagccgattgatgttcactatgtacgaccttgatgaaaacggttttttgtcaaaagatgagtttttcactatgatgcgtagcttcatcgagatttctaacaattgtctgagcaaagctcagctcgcggaggtggtcgaatccatgttccgggagtccggcttccaggataaggaggagctcacatgggaggattttcatttcatgttgcgtgatcacgactccgaactccgttttactcagttatgcgtcaaagggggtggaggcggtgggaacgggattcgggatatctttaaacagaatattagttgccgagtaagcttcataactcgtacgccaggcgaacgtagtcatccgcagggtctgggccctccagccccagaagcacccgagttgggcggacccggactaaagaagagatttggtaagaaagctgctgtaccaactccaaggctctataccgaggccctgcaggaaaagatgcagcggggatttctggcccagaagctgcagcagtataaaaggtttgtggagaactaccgacggcacattgtttgcgtggctatcttttctgccatttgcgttggtgtttttgccgaccgcgcatactattacggcttcgccagcccaccctccgatattgctcagactacactcgtcggaatcatcctctctagaggcaccgctgcatccgtaagtttcatgttcagctacattctgctgaccatgtgtaggaacttaataaccttcctgcgcgaaactttccttaacagatatgtgccattcgatgctgccgtagactttcaccgctggatcgctatggcagccgtagtactggctatcttacactccgccggacatgccgtcaatgtgtacatcttttcagtatctccactgtctctgctggcgtgcattttccctaatgtttttgtcaatgacggctccaaacttcctcaaaaattctactggtggtttttccagactgttccaggcatgaccggagtgctgttactgctcgtgcttgccattatgtatgtttttgcaagccaccactttcgcagacggtcatttcgcggattctggcttacgcaccacttgtatattctgctgtacgcccttctgatcatccacggcagctatgctctgattcagttacccacctttcatatttatttcttggtgccagcaattatctacggtggcgacaagctggtttctttgtctcgaaagaaggtcgagatttccgtcgttaaggccgagctcctcccgagcggcgttacctatctacagtttcagcgcccacagggttttgaatacaagagtggacagtgggttagaatcgcctgtctggctctaggcactacagaatatcatcccttcaccctcaccagtgcgccacacgaggataccctcagtctgcatatcagggctgtagggccatggactactaggctgcgcgaaatctacagcagccccaaaggaaatggttgcgccggataccccaaactgtacctcgacggcccttttggagaagggcaccaggaatggcacaagttcgaggtgtccgtcctggtcggcggaggaatcggcgtaacccccttcgctagtatcctaaaggacttggtctttaagtcatcactgggaagccagatgctgtgtaaaaagatttacttcatctgggtgacaaggacgcagcgccagtttgaatggttggcagacatcatccaggaagtggaagaaaacgaccatcaggaccttgtctccgtccacatctatgtgacacaattggcagaaaaatttgacctccgcacaacaatgctgtacatctgcgaaaggcatttccagaaggtgctcaatcgatctctgtttactggacttcggagcattacacactttggcaggccaccgttcgaaccgttcttcaactctctgcaggaggtacaccctcaggtccggaaaatcggggtctttagctgcgggcctcccggaatgactaaaaatgtggaaaaggcatgtcaactggtgaataggcaggatcgcgctcacttcatgcaccactacgaaaatttctag

SEQ ID NO: 178010 - DNA, 4647 bp, Artificial Sequence
  derived and/or modified sequence
atgctgagagccagacccgaggccctgatgctgctgggcgccctgctgaccggcagcctgggccccagcggcaaccaggacgccctgagcctgccctgggaggtgcagagatacgacggctggttcaacaacctgagacaccacgagagaggcgccgtgggctgcagactgcagagaagagtgcccgccaactacgccgacggcgtgtaccaggccctggaggagccccagctgcccaaccccagaagactgagcaacgccgccaccagaggcatcgccggcctgcccagcctgcacaacagaaccgtgctgggcgtgttcttcggctaccacgtgctgagcgacgtggtgagcgtggagacccccggctgccccgccgagttcctgaacatcagaatcccccccggcgaccccgtgttcgaccccgaccagagaggcgacgtggtgctgcccttccagagaagcagatgggaccccgagaccggcagaagccccagcaaccccagagacctggccaaccaggtgaccggctggctggacggcagcgccatctacggcagcagccacagctggagcgacgccctgagaagcttcagcggcggccagctggccagcggccccgaccccgccttccccagagacagccagaaccccctgctgatgtgggccgcccccgaccccgccaccggccagaacggccccagaggcctgtacgccttcggcgccgagagaggcaacagagagcccttcctgcaggccctgggcctgctgtggttcagataccacaacctgtgggcccagagactggccagacagcaccccgactgggaggacgaggagctgttccagcacgccagaaagagagtgatcgccacctaccagaacatcgccgtgtacgagtggctgcccagcttcctgcagaagaccctgcccgagtacaccggctacagacccttcctggaccccagcatcagccccgagttcgtggtggccagcgagcagttcttcagcaccatggtgccccccggcgtgtacatgagaaacgccagctgccacttcagaaaggtgctgaacaagggcttccagagcagccaggccctgagagtgtgcaacaactactggatcagagagaaccccaacctgaacagcacccaggaggtgaacgagctgctgctgggcatggccagccagatcagcgagctggaggacaacatcgtggtggaggacctgagagactactggcccggccccggcaagttcagcagaaccgactacgtggccagcagcatccagagaggcagagacatgggcctgcccagctacagccaggccctgctggccttcggcctggacatccccagaaactggagcgacctgaaccccaacgtggacccccaggtgctggaggccaccgccgccctgtacaaccaggacctgagccagctggagctgctgctgggcggcctgctggagagccacggcgaccccggccccctgttcagcgccatcgtgctggaccagttcgtgagactgagagacggcgacagatactggttcgagaacaccagaaacggcctgttcagcaagaaggagatcgaggacatcagaaacaccaccctgagagacgtgctggtggccgtgatcaacatcgaccccagcgccctgcagcccaacgtgttcgtgtggcacaagggcgccccctgcccccagcccaagcagctgaccaccgacggcctgccccagtgcgcccccctgaccgtgctggacttcttcgagggcagcagccccggcttcgccatcaccatcatcgccctgtgctgcctgcccctggtgagcctgctgctgagcggcgtggtggcctacttcagaggcagagagcacaagaagctgcagaagaagctgaaggagagcgtgaagaaggaggccgccaaggacggcgtgcccgccatggagtggcccggccccaaggagagaagcagccccatcatcatccagctgctgagcgacagatgcctgcaggtgctgaacagacacctgaccgtgctgagagtggtgcagctgcagcccctgcagcaggtgaacctgatcctgagcaacaacagaggctgcagaaccctgctgctgaagatccccaaggagtacgacctggtgctgctgttcagcagcgaggaggagagaggcgccttcgtgcagcagctgtgggacttctgcgtgagatgggccctgggcctgcacgtggccgagatgagcgagaaggagctgttcagaaaggccgtgaccaagcagcagagagagagaatcctggagatcttcttcagacacctgttcgcccaggtgctggacatcaaccaggccgacgccggcaccctgcccctggacagcagccagaaggtgagagaggccctgacctgcgagctgagcagagccgagttcgccgagagcctgggcctgaagccccaggacatgttcgtggagagcatgttcagcctggccgacaaggacggcaacggctacctgagcttcagagagttcctggacatcctggtggtgttcatgaagggcagccccgaggacaagagcagactgatgttcaccatgtacgacctggacgagaacggcttcctgagcaaggacgagttcttcaccatgatgagaagcttcatcgagatcagcaacaactgcctgagcaaggcccagctggccgaggtggtggagagcatgttcagagagagcggcttccaggacaaggaggagctgacctgggaggacttccacttcatgctgagagaccacgacagcgagctgagattcacccagctgtgcgtgaagggcggcggcggcggcggcaacggcatcagagacatcttcaagcagaacatcagctgcagagtgagcttcatcaccagaacccccggcgagagaagccacccccagggcctgggcccccccgcccccgaggcccccgagctgggcggccccggcctgaagaagagattcggcaagaaggccgccgtgcccacccccagactgtacaccgaggccctgcaggagaagatgcagagaggcttcctggcccagaagctgcagcagtacaagagattcgtggagaactacagaagacacatcgtgtgcgtggccatcttcagcgccatctgcgtgggcgtgttcgccgacagagcctactactacggcttcgccagcccccccagcgacatcgcccagaccaccctggtgggcatcatcctgagcagaggcaccgccgccagcgtgagcttcatgttcagctacatcctgctgaccatgtgcagaaacctgatcaccttcctgagagagaccttcctgaacagatacgtgcccttcgacgccgccgtggacttccacagatggatcgccatggccgccgtggtgctggccatcctgcacagcgccggccacgccgtgaacgtgtacatcttcagcgtgagccccctgagcctgctggcctgcatcttccccaacgtgttcgtgaacgacggcagcaagctgccccagaagttctactggtggttcttccagaccgtgcccggcatgaccggcgtgctgctgctgctggtgctggccatcatgtacgtgttcgccagccaccacttcagaagaagaagcttcagaggcttctggctgacccaccacctgtacatcctgctgtacgccctgctgatcatccacggcagctacgccctgatccagctgcccaccttccacatctacttcctggtgcccgccatcatctacggcggcgacaagctggtgagcctgagcagaaagaaggtggagatcagcgtggtgaaggccgagctgctgcccagcggcgtgacctacctgcagttccagagaccccagggcttcgagtacaagagcggccagtgggtgagaatcgcctgcctggccctgggcaccaccgagtaccaccccttcaccctgaccagcgccccccacgaggacaccctgagcctgcacatcagagccgtgggcccctggaccaccagactgagagagatctacagcagccccaagggcaacggctgcgccggctaccccaagctgtacctggacggccccttcggcgagggccaccaggagtggcacaagttcgaggtgagcgtgctggtgggcggcggcatcggcgtgacccccttcgccagcatcctgaaggacctggtgttcaagagcagcctgggcagccagatgctgtgcaagaagatctacttcatctgggtgaccagaacccagagacagttcgagtggctggccgacatcatccaggaggtggaggagaacgaccaccaggacctggtgagcgtgcacatctacgtgacccagctggccgagaagttcgacctgagaaccaccatgctgtacatctgcgagagacacttccagaaggtgctgaacagaagcctgttcaccggcctgagaagcatcacccacttcggcagaccccccttcgagcccttcttcaacagcctgcaggaggtgcacccccaggtgagaaagatcggcgtgttcagctgcggcccccccggcatgaccaagaacgtggagaaggcctgccagctggtgaacagacaggacagagcccacttcatgcaccactacgagaacttctag

SEQ ID NO: 178011 - DNA, 6533 bp, Artificial Sequence
  derived and/or modified sequence
ggttctgcgggttggcgctgagtttggaagtcgcgcgggaccccttttatagcagcgtgggcgacgtgccacacgggtgtcccagcccaggggctggtctgagctggaagaggttgtgcaaataagggccccacctccacggcaggagggtgagccctaggtccagatgctcacactggcgcaggtctgtcctgagccgacacctgcacagtggcgagaccaaggacccagagagaaaggtgagagtgcagccggggaggctgaggatcggcggagctggaagagtgagggtgaaggcaagaagtagagcacagaagcaaagattttaagaggaaagaagacatctgaacccaacaccaccctaaaccacaggctgcagggttggcatgctccgtgcaagaccagaggcactgatgctcctgggagctcttctgactggatccctgggtccatcgggcaatcaggacgcactctcactgccctgggaagtgcagcgctatgacggctggtttaacaacctgaggcaccacgagcgtggtgctgttggctgccggttgcagcgccgcgtaccagccaattacgccgacggtgtgtatcaggctctggaggagccgcagctgcccaacccgcgccggctcagcaacgcagccacgcggggcatagccggcctgccgtcgctccacaaccgcaccgtactgggggtcttctttggctaccatgttctttccgacgtggtgagcgtggaaacgcccggttgccccgccgagttcctcaacatccgcatcccacctggagaccccgtgttcgaccccgaccagcgcggggacgtggtgctgcccttccagaggagccgctgggaccccgagaccggacggagtcccagcaacccccgggacctggccaaccaggtgacgggctggctggacggcagcgccatctatggctcctcgcactcctggagcgacgcgctgcggagcttctcggggggacagctggcgtcggggcccgaccccgctttcccccgagactcgcagaaccccctgctcatgtgggcggcgcccgaccccgccaccgggcagaacgggccccgggggctgtacgccttcggggcagagagagggaaccgggaacccttcctgcaggcgctgggcctgctctggttccgctaccacaacctgtgggcgcagaggctggcccgccagcacccagactgggaggacgaggagctgttccagcacgcacgcaagagggtcatcgccacctaccagaacatcgctgtgtatgagtggctgcccagcttcctgcagaaaacactcccggagtatacaggataccgtcctttcctagaccccagcatctccccggaatttgtggtggcctctgagcagttcttctctaccatggtgccccctggtgtctacatgagaaatgccagctgtcatttccggaaggtcctgaacaagggttttcaaagctcccaagctctcagggtctgcaacaactactggattcgggagaaccccaatctgaacagtacccaggaggtgaatgagctgctgctgggaatggcctcccagatttcggagttggaggacaacatagtggttgaagatctgagggattactggcctggccctggcaaattctcccgtacagactatgtggccagcagcatccaacgtggccgagatatggggctgcccagctatagccaggccctgctggcctttgggctggacatcccaaggaactggagtgatctcaaccctaatgtggacccccaggtgctggaggccacagctgccctgtacaaccaggacctatcccagctagagctgctccttggggggctcctggagagccatggggaccctggacccctgttcagtgccattgtcctcgaccagtttgtacggctgcgggatggtgaccgctactggtttgagaacaccaggaatgggctgttctccaagaaggagattgaagacatccgaaataccaccctgcgggacgtgctggtcgctgttatcaacattgaccccagtgccctgcagcccaatgtctttgtctggcataaaggtgcaccctgccctcaacctaagcagctcacaactgacggcctgccccagtgtgcacccctgactgtgcttgacttctttgaaggcagcagccctggttttgccatcaccatcattgctctctgctgccttcccttagtgagtctgcttctctctggagtggtggcctatttccggggccgagaacacaagaagctacaaaagaaactcaaagagagcgtgaagaaggaagcagccaaagatggagtgccagcgatggagtggccaggccccaaggagaggagcagtcccatcatcatccagctgctgtcagacaggtgtctgcaggtcctgaacaggcatctcactgtgctccgtgtggtccagctgcagcctctgcagcaggtcaacctcatcctgtccaacaaccgaggatgccgcaccctgctgctcaagatccctaaggagtatgacctggtgctgctgtttagttctgaagaggaacggggcgcctttgtgcagcagctatgggacttctgcgtgcgctgggctctgggcctccatgtggctgagatgagcgagaaggagctatttaggaaggctgtgacaaagcagcagcgggaacgcatcctggagatcttcttcagacacctttttgctcaggtgctggacatcaaccaggccgacgcagggaccctgcccctggactcctcccagaaggtgcgggaggccctgacctgcgagctgagcagggccgagtttgccgagtccctgggcctcaagccccaggacatgtttgtggagtccatgttctctctggctgacaaggatggcaatggctacctgtccttccgagagttcctggacatcctggtggtcttcatgaaaggctccccagaggataagtcccgtctaatgtttaccatgtatgacctggatgagaatggcttcctctccaaggacgaattcttcaccatgatgcgatccttcatcgagatctccaacaactgcctgtccaaggcccagctggccgaggtggtggagtctatgttccgggagtcgggattccaggacaaggaggagctgacatgggaggattttcacttcatgctgcgggaccatgacagcgagctccgcttcacgcagctctgtgtcaaaggtggaggtggaggtggaaatggtattagagatatctttaaacaaaacatcagctgtcgagtctcgttcatcactcggacacctggggagcgctcccacccccagggactggggccccctgccccagaagccccagagctgggaggccctggactgaagaagaggtttggcaaaaaggcagcagtgcccactccccggctgtacacagaggcgctgcaagagaagatgcagcgaggcttcctagcccaaaagctgcagcagtacaagcgcttcgtggagaactaccggaggcacatcgtgtgtgtggcaatcttctcggccatctgtgttggcgtgtttgcagatcgtgcttactactatggctttgcctcgccaccctcggacattgcacagaccaccctcgtgggcatcatcctgtcacgaggcacggcggccagcgtctccttcatgttctcttatatcttgctcaccatgtgccgcaacctcataaccttcctgcgagagactttcctcaaccgctatgtgccttttgatgccgcagtggacttccaccgctggatcgccatggctgctgttgtcctggccattttgcacagtgctggccacgcagtcaatgtctacatcttctcagtcagcccactcagcctgctggcctgcatattccccaacgtctttgtgaatgatgggtccaagcttccccagaagttctattggtggttcttccagaccgtcccaggtatgacaggtgtgcttctgctcctggtcctggccatcatgtatgtcttcgcctcccaccacttccgccgccgcagcttccggggcttctggctgacccaccacctctacatcctgctctatgccctgctcatcatccatggcagctatgctctgatccagctgcccactttccacatctacttcctggtcccggcaatcatctatggaggtgacaagctggtgagcctgagccggaagaaggtggagatcagcgtggtgaaggcggagctgctgccctcaggagtgacctacctgcaattccagaggccccaaggctttgagtacaagtcaggacagtgggtgcggatcgcctgcctggctctggggaccaccgagtaccaccccttcacactgacctccgcgccccatgaggacacactcagcctgcacatccgggcagtggggccctggaccactcgcctcagggagatctactcatccccaaagggcaatggctgtgctggatacccaaagctgtaccttgatggaccgtttggagagggccatcaggagtggcataaatttgaggtgtcagtgttggtgggagggggcattggggtcaccccctttgcctccatcctcaaagacctggtcttcaagtcatccttgggcagccaaatgctgtgtaagaagatctacttcatctgggtgacacggacccagcgtcagtttgagtggctggctgacatcatccaagaggtggaggagaacgaccaccaggacctggtgtctgtgcacatttatgtcacccagctggctgagaagttcgacctcaggaccaccatgctatacatctgcgagcggcacttccagaaagtgctgaaccggagtctgttcacgggcctgcgctccatcacccactttggccgtccccccttcgagcccttcttcaactccctgcaggaggtccacccacaggtgcgcaagatcggggtgttcagctgcggccctccaggaatgaccaagaatgtagagaaggcctgtcagctcgtcaacaggcaggaccgagcccacttcatgcaccactatgagaacttctgagcctgtcctccctggctgctgcttccagtatcctgccttctcttctgtgcacctaagttgcccagccctgctggcaatctctccatcagaatccaccttaggcctcagctggagggctgcagagcccctcccaatattgggagaatattgacccagacaattatacaaatgagaaaaggcaggagactatgttctacaattgcagtgcatgatgattataagtccacctgtttatcaacggcaccattcctgcagccctccagacttcctgcccttagcaagtgcgcaaccagtcaggatctcccaaagaagataaagaccactcctcaccccagctcaagccatggcaggcgtggcaagcaaagtggggaggagacagtccctgcttgtgacaagtgtggaggtgaaaaggtacaatagtgcttgtctccgatagctccccacatctctaattgacttccacaaaatcgatgcgttgctttggtatttgcttggactgacatttgagggaggaggaggctgggatcctctggctgagaatctcctcagagcccagtgcagaagctgtgatgcttagaacctggacagcccgactgcctcaactctgtctccaggtctattccctccagctccaaaaggagcagccctacttctaccccttcccgtccccaaagtgtcagcaactttgaggagggcaccaggaaacaaagatgcctccccagccctgatattcttgatgtcaccagtgatacccactgccctgacccctgggcaggcccctctctgcatctactggagtggtccctgggctctggggctgaaggattccagcctctctgccagatattcagtactcgatctcaattcccctcttccacaagagttgggtgaccagctgtcctagtttgcccaggactctccctgttttagcactgaaagtctcttgccccaggaaaccccatcagtcccaggcagattgggacagctggtcaccttacgcaagagccaggctgaaacatcccctccatactcagctctttaacttttcttttcctttttcatcgggctctttcctaaaaagctgagctgtaaaatattttacatcgaggtataataaataatcatgtacatgttttaccaccacccaggtcaagacatagaatgtttcaacatttccatcaccccagaaactccccttgtacccccttccacttcgtctcccctagctcctagaagcaaccactgatgtgatttctaccaaatccagttttggtcctactaaatatactcttttgagactggcctcttttactcaccataatgcctttgtaattcatccatgctgttgtgtgtatcagcagtttgttccttttcattgctgagtagtattctattgtagagatgtaccacagtttgtttattcttctgttgatggacgtttgggttgtttctaattttgaatgattataaataaaaattctgtgagtgttcttgtaccta

SEQ ID NO: 178012 - protein, 491 aa, Artificial Sequence
  derived and/or modified sequence
MAGQGLPLHVATLLTGLLECLGFAGVLFGWPSLVFVFKNEDYFKDLCGPDAGPIGNATGQADCKAQDERFSLIFTLGSFMNNFMTFPTGYIFDRFKTTVARLIAIFFYTTATLIIAFTSAGSAVLLFLAMPMLTIGGILFLITNLQIGNLFGQHRSTIITLYNGAFDSSSAVFLIIKLLYEKGISLRASFIFISVCSTWHVARTFLLMPRGHIPYPLPPNYSYGLCPGNGTTKEEKETAEHENRELQSKEFLSAKEETPGAGQKQELRSFWSYAFSRRFAWHLVWLSVIQLWHYLFIGTLNSLLTNMAGGDMARVSTYTNAFAFTQFGVLCAPWNGLLMDRLKQKYQKEARKTGSSTLAVALCSTVPSLALTSLLCLGFALCASVPILPLQYLTFILQVISRSFLYGSNAAFLTLAFPSEHFGKLFGLVMALSAVVSLLQFPIFTLIKGSLQNDPFYVNVMFMLAILLTFFHPFLVYRECRTWKESPSAIA

SEQ ID NO: 178013 - protein, 102 aa, Artificial Sequence
  derived and/or modified sequence
MAGQGLPLHVATLLTGLLECLGFAGVLFGWPSLVFVFKNEDYFKDLCGPDAGPIGNATGQADCKAQDERFSLIFTLGSFMNNFMTFPTGYIFDRFKTTVARL

SEQ ID NO: 178014 - protein, 169 aa, Artificial Sequence
  derived and/or modified sequence
MAGQGLPLHVATLLTGLLECLGFAGVLFGWPSLVFVFKNEDYFKDLCGPDAGPIGNATGQADCKAQDERFSLIFTLGSFMNNFMTFPTGYIFDRFKTTVARLIAIFFYTTATLIIAFTSAGSAVLLFLAMPMLTIGGILFLITNLQIGNLFGQHRSTIITLYNGAFDSS

SEQ ID NO: 178015 - protein, 148 aa, Artificial Sequence
  derived and/or modified sequence
MAGQGLPLHVATLLTGLLECLGFAGVLFGWPSLVFVFKNEDYFKDLCGPDAGPIGNATGQADCKAQDERFSLIFTLGSFMNNFMTFPTGYIFDRFKTTVARLIAIFFYTTATLIIAFTSAGSAVLLFLAMPMLTIGGILFLITNLQIG

SEQ ID NO: 178016 - protein, 119 aa, Artificial Sequence
  derived and/or modified sequence
MAGQGLPLHVATLLTGLLECLGFAGVLFGWPSLVFVFKNEDYFKDLCGPDAGPIGNATGQADCKAQDERFSLIFTLGSFMNNFMTFPTGYIFDRFKTTVARLIAIFFYTTATLIIAFTS

SEQ ID NO: 178017 - protein, 22 aa, Artificial Sequence
  derived and/or modified sequence
MAGQGLPLHVATLLTGLLECLG

SEQ ID NO: 178018 - protein, 331 aa, Artificial Sequence
  derived and/or modified sequence
MAGQGLPLHVATLLTGLLECLGFAGVLFGWPSLVFVFKNEDYFKDLCGPDAGPIGNATGQADCKAQDERFSLIFTLGSFMNNFMTFPTGYIFDRFKTTVARLIAIFFYTTATLIIAFTSAGSAVLLFLAMPMLTIGGILFLITNLQIGNLFGQHRSTIITLYNGAFDSSSAVFLIIKLLYEKGISLRASFIFISVCSTWHVARTFLLMPRGHIPYPLPPNYSYGLCPGNGTTKEEKETAEHENRELQSKEFLSAKEETPGAGQKQELRSFWSYAFSRRFAWHLVWLSVIQLWHYLFIGTLNSLLTNMAGGDMARVSTYTNAFAFTQFGVLC

SEQ ID NO: 178019 - protein, 44 aa, Artificial Sequence
  derived and/or modified sequence
MAGQGLPLHVATLLTGLLECLGFAGVLFGWPSLVFVFKNEDYFK

SEQ ID NO: 178020 - protein, 98 aa, Artificial Sequence
  derived and/or modified sequence
MAGQGLPLHVATLLTGLLECLGFAGVLFGWPSLVFVFKNEDYFKDLCGPDAGPIGNATGQADCKAQDERFSLIFTLGSFMNNFMTFPTGYIFDRFKTT

SEQ ID NO: 178021 - protein, 78 aa, Artificial Sequence
  derived and/or modified sequence
MAGQGLPLHVATLLTGLLECLGFAGVLFGWPSLVFVFKNEDYFKDLCGPDAGPIGNATGQADCKAQDERFSLIFTLGS

SEQ ID NO: 178022 - protein, 107 aa, Artificial Sequence
  derived and/or modified sequence
MAGQGLPLHVATLLTGLLECLGFAGVLFGWPSLVFVFKNEDYFKDLCGPDAGPIGNATGQADCKAQDERFSLIFTLGSFMNNFMTFPTGYIFDRFKTTVARLIAIFF

SEQ ID NO: 178023 - protein, 110 aa, Artificial Sequence
  derived and/or modified sequence
MAGQGLPLHVATLLTGLLECLGFAGVLFGWPSLVFVFKNEDYFKDLCGPDAGPIGNATGQADCKAQDERFSLIFTLGSFMNNFMTFPTGYIFDRFKTTVARLIAIFFYTT

SEQ ID NO: 178024 - DNA, 1476 bp, Artificial Sequence
  derived and/or modified sequence
atggccggccagggcctgcccctgcacgtggccaccctgctgaccggcctgctggagtgcctgggcttcgccggcgtgctgttcggctggcccagcctggtgttcgtgttcaagaacgaggactacttcaaggacctgtgcggccccgacgccggccccatcggcaacgccaccggccaggccgactgcaaggcccaggacgagagattcagcctgatcttcaccctgggcagcttcatgaacaacttcatgaccttccccaccggctacatcttcgacagattcaagaccaccgtggccagactgatcgccatcttcttctacaccaccgccaccctgatcatcgccttcaccagcgccggcagcgccgtgctgctgttcctggccatgcccatgctgaccatcggcggcatcctgttcctgatcaccaacctgcagatcggcaacctgttcggccagcacagaagcaccatcatcaccctgtacaacggcgccttcgacagcagcagcgccgtgttcctgatcatcaagctgctgtacgagaagggcatcagcctgagagccagcttcatcttcatcagcgtgtgcagcacctggcacgtggccagaaccttcctgctgatgcccagaggccacatcccctaccccctgccccccaactacagctacggcctgtgccccggcaacggcaccaccaaggaggagaaggagaccgccgagcacgagaacagagagctgcagagcaaggagttcctgagcgccaaggaggagacccccggcgccggccagaagcaggagctgagaagcttctggagctacgccttcagcagaagattcgcctggcacctggtgtggctgagcgtgatccagctgtggcactacctgttcatcggcaccctgaacagcctgctgaccaacatggccggcggcgacatggccagagtgagcacctacaccaacgccttcgccttcacccagttcggcgtgctgtgcgccccctggaacggcctgctgatggacagactgaagcagaagtaccagaaggaggccagaaagaccggcagcagcaccctggccgtggccctgtgcagcaccgtgcccagcctggccctgaccagcctgctgtgcctgggcttcgccctgtgcgccagcgtgcccatcctgcccctgcagtacctgaccttcatcctgcaggtgatcagcagaagcttcctgtacggcagcaacgccgccttcctgaccctggccttccccagcgagcacttcggcaagctgttcggcctggtgatggccctgagcgccgtggtgagcctgctgcagttccccatcttcaccctgatcaagggcagcctgcagaacgaccccttctacgtgaacgtgatgttcatgctggccatcctgctgaccttcttccaccccttcctggtgtacagagagtgcagaacctggaaggagagccccagcgccatcgcctag

SEQ ID NO: 178025 - DNA, 309 bp, Artificial Sequence
  derived and/or modified sequence
atggccggccagggcctgcccctgcacgtggccaccctgctgaccggcctgctggagtgcctgggcttcgccggcgtgctgttcggctggcccagcctggtgttcgtgttcaagaacgaggactacttcaaggacctgtgcggccccgacgccggccccatcggcaacgccaccggccaggccgactgcaaggcccaggacgagagattcagcctgatcttcaccctgggcagcttcatgaacaacttcatgaccttccccaccggctacatcttcgacagattcaagaccaccgtggccagactgtag

SEQ ID NO: 178026 - DNA, 510 bp, Artificial Sequence
  derived and/or modified sequence
atggccggccagggcctgcccctgcacgtggccaccctgctgaccggcctgctggagtgcctgggcttcgccggcgtgctgttcggctggcccagcctggtgttcgtgttcaagaacgaggactacttcaaggacctgtgcggccccgacgccggccccatcggcaacgccaccggccaggccgactgcaaggcccaggacgagagattcagcctgatcttcaccctgggcagcttcatgaacaacttcatgaccttccccaccggctacatcttcgacagattcaagaccaccgtggccagactgatcgccatcttcttctacaccaccgccaccctgatcatcgccttcaccagcgccggcagcgccgtgctgctgttcctggccatgcccatgctgaccatcggcggcatcctgttcctgatcaccaacctgcagatcggcaacctgttcggccagcacagaagcaccatcatcaccctgtacaacggcgccttcgacagcagctag

SEQ ID NO: 178027 - DNA, 447 bp, Artificial Sequence
  derived and/or modified sequence
atggccggccagggcctgcccctgcacgtggccaccctgctgaccggcctgctggagtgcctgggcttcgccggcgtgctgttcggctggcccagcctggtgttcgtgttcaagaacgaggactacttcaaggacctgtgcggccccgacgccggccccatcggcaacgccaccggccaggccgactgcaaggcccaggacgagagattcagcctgatcttcaccctgggcagcttcatgaacaacttcatgaccttccccaccggctacatcttcgacagattcaagaccaccgtggccagactgatcgccatcttcttctacaccaccgccaccctgatcatcgccttcaccagcgccggcagcgccgtgctgctgttcctggccatgcccatgctgaccatcggcggcatcctgttcctgatcaccaacctgcagatcggctag

SEQ ID NO: 178028 - DNA, 360 bp, Artificial Sequence
  derived and/or modified sequence
atggccggccagggcctgcccctgcacgtggccaccctgctgaccggcctgctggagtgcctgggcttcgccggcgtgctgttcggctggcccagcctggtgttcgtgttcaagaacgaggactacttcaaggacctgtgcggccccgacgccggccccatcggcaacgccaccggccaggccgactgcaaggcccaggacgagagattcagcctgatcttcaccctgggcagcttcatgaacaacttcatgaccttccccaccggctacatcttcgacagattcaagaccaccgtggccagactgatcgccatcttcttctacaccaccgccaccctgatcatcgccttcaccagctag

SEQ ID NO: 178029 - DNA, 996 bp, Artificial Sequence
  derived and/or modified sequence
atggccggccagggcctgcccctgcacgtggccaccctgctgaccggcctgctggagtgcctgggcttcgccggcgtgctgttcggctggcccagcctggtgttcgtgttcaagaacgaggactacttcaaggacctgtgcggccccgacgccggccccatcggcaacgccaccggccaggccgactgcaaggcccaggacgagagattcagcctgatcttcaccctgggcagcttcatgaacaacttcatgaccttccccaccggctacatcttcgacagattcaagaccaccgtggccagactgatcgccatcttcttctacaccaccgccaccctgatcatcgccttcaccagcgccggcagcgccgtgctgctgttcctggccatgcccatgctgaccatcggcggcatcctgttcctgatcaccaacctgcagatcggcaacctgttcggccagcacagaagcaccatcatcaccctgtacaacggcgccttcgacagcagcagcgccgtgttcctgatcatcaagctgctgtacgagaagggcatcagcctgagagccagcttcatcttcatcagcgtgtgcagcacctggcacgtggccagaaccttcctgctgatgcccagaggccacatcccctaccccctgccccccaactacagctacggcctgtgccccggcaacggcaccaccaaggaggagaaggagaccgccgagcacgagaacagagagctgcagagcaaggagttcctgagcgccaaggaggagacccccggcgccggccagaagcaggagctgagaagcttctggagctacgccttcagcagaagattcgcctggcacctggtgtggctgagcgtgatccagctgtggcactacctgttcatcggcaccctgaacagcctgctgaccaacatggccggcggcgacatggccagagtgagcacctacaccaacgccttcgccttcacccagttcggcgtgctgtgctag

SEQ ID NO: 178030 - DNA, 135 bp, Artificial Sequence
  derived and/or modified sequence
atggccggccagggcctgcccctgcacgtggccaccctgctgaccggcctgctggagtgcctgggcttcgccggcgtgctgttcggctggcccagcctggtgttcgtgttcaagaacgaggactacttcaagtag

SEQ ID NO: 178031 - DNA, 297 bp, Artificial Sequence
  derived and/or modified sequence
atggccggccagggcctgcccctgcacgtggccaccctgctgaccggcctgctggagtgcctgggcttcgccggcgtgctgttcggctggcccagcctggtgttcgtgttcaagaacgaggactacttcaaggacctgtgcggccccgacgccggccccatcggcaacgccaccggccaggccgactgcaaggcccaggacgagagattcagcctgatcttcaccctgggcagcttcatgaacaacttcatgaccttccccaccggctacatcttcgacagattcaagaccacctag

SEQ ID NO: 178032 - DNA, 237 bp, Artificial Sequence
  derived and/or modified sequence
atggccggccagggcctgcccctgcacgtggccaccctgctgaccggcctgctggagtgcctgggcttcgccggcgtgctgttcggctggcccagcctggtgttcgtgttcaagaacgaggactacttcaaggacctgtgcggccccgacgccggccccatcggcaacgccaccggccaggccgactgcaaggcccaggacgagagattcagcctgatcttcaccctgggcagctag

SEQ ID NO: 178033 - DNA, 324 bp, Artificial Sequence
  derived and/or modified sequence
atggccggccagggcctgcccctgcacgtggccaccctgctgaccggcctgctggagtgcctgggcttcgccggcgtgctgttcggctggcccagcctggtgttcgtgttcaagaacgaggactacttcaaggacctgtgcggccccgacgccggccccatcggcaacgccaccggccaggccgactgcaaggcccaggacgagagattcagcctgatcttcaccctgggcagcttcatgaacaacttcatgaccttccccaccggctacatcttcgacagattcaagaccaccgtggccagactgatcgccatcttcttctag

SEQ ID NO: 178034 - DNA, 333 bp, Artificial Sequence
  derived and/or modified sequence
atggccggccagggcctgcccctgcacgtggccaccctgctgaccggcctgctggagtgcctgggcttcgccggcgtgctgttcggctggcccagcctggtgttcgtgttcaagaacgaggactacttcaaggacctgtgcggccccgacgccggccccatcggcaacgccaccggccaggccgactgcaaggcccaggacgagagattcagcctgatcttcaccctgggcagcttcatgaacaacttcatgaccttccccaccggctacatcttcgacagattcaagaccaccgtggccagactgatcgccatcttcttctacaccacctag

SEQ ID NO: 178035 - DNA, 1476 bp, Artificial Sequence
  derived and/or modified sequence
atggcgggccaaggactgcccctgcacgtggcaactctactaacaggtctcctcgaatgtctaggttttgcaggcgtgctcttcggatggccgagccttgtgttcgtgttcaagaatgaggattatttcaaggacctgtgcgggccagatgcagggcctatcggcaatgccacaggacaggctgactgtaaagcccaggatgagagattctccctcatcttcacacttggtagctttatgaacaactttatgacctttccaactggctatattttcgatcgattcaagactactgtggccaggctaatcgctattttcttctacactactgcaaccttgataatcgctttcacgtcggctgggagtgccgtgttgcttttcctggccatgcccatgctgaccattgggggaatcctattccttataacaaacctgcagatcggcaatctgttcgggcaacatcgttctaccataattaccctgtataacggcgcctttgactcctcctctgccgtgttcctgattataaaactgctgtacgagaaaggtatatcactgcgcgcctcgtttatttttatcagtgtgtgcagtacatggcatgtcgcccggactttcctgctaatgccacgaggccacatcccatatcccctacccccaaactactcttacggtctgtgtccaggcaacggaacaaccaaagaggaaaaagaaactgcagagcacgagaatagggaactgcagtctaaggagttcctctccgccaaggaagagacaccaggcgcgggacagaagcaggaactgaggtccttctggtcttatgccttctcccggcgctttgcttggcatctcgtgtggttgtccgttattcagttgtggcactatctctttatagggactctcaactcattgctaacaaacatggcaggcggagacatggcgcgcgtcagcacctacactaacgcatttgcattcacacagttcggtgttctctgtgcaccttggaacggcctgctcatggacagacttaagcaaaagtatcagaaggaggcacgtaagacaggcagctccacacttgcggtagcactttgcagtactgtgccctcgctggcgctgaccagcctcctatgcctgggctttgcactatgcgccagcgtgcctatacttccactacaatacctgacttttattctacaggtgatctctcgcagtttcctctacggttcaaacgcagctttcctgaccctagcttttccctcagagcattttggcaagctcttcggcctagtcatggctctgagcgctgtggttagcctccttcagttccctatctttacccttattaaggggtccctgcagaatgatccattctacgtgaatgttatgttcatgctcgccatccttctgacctttttccatccctttctcgtatatagagaatgccgcacatggaaggagtccccatcggccattgcatag

SEQ ID NO: 178036 - DNA, 1476 bp, Artificial Sequence
  derived and/or modified sequence
atggcgggccagggcctgcctcttcacgttgctaccctactgactggactgctcgaatgtttgggtttcgccggcgtgttgtttggctggcctagcttagtgtttgtgttcaagaatgaggattatttcaaggacctctgcggacccgacgccggacccattggaaacgcaaccggtcaggccgactgcaaagcccaagatgaacgtttctccctcattttcacactgggatcatttatgaataacttcatgacgttcccaacgggatatatttttgaccgcttcaagacaaccgtagccagactgatcgctattttcttctacactaccgccaccttgataattgcttttacgtctgctggtagcgccgttcttctcttcttggcgatgcctatgctgacgatcggaggtattctgtttctaattacaaacctccaaattggaaatcttttcggacagcaccggtctaccatcatcacattgtataatggggcatttgacagcagttccgccgtgttcttgattattaagcttctgtacgagaaaggtatttccctcagggcttctttcatctttatcagcgtgtgtagtacgtggcatgtggcacgcacgttcctcctcatgcccagagggcacattccctacccactcccacctaactacagctacgggctctgccctggtaatgggacgaccaaggaagagaaggagaccgcggaacacgagaatcgagagctccagagcaaggaattcctgtctgccaaggaagaaacccccggggccgggcagaaacaggagcttagaagtttctggtcttatgcgttctcccgtcggttcgcgtggcatttagtgtggctttcagtgattcagctgtggcattatctttttattggcacgctaaacagtctcctgacaaatatggcgggcggggacatggcacgcgtatcgacttacactaacgcattcgcttttacccagtttggcgtgctatgcgctccctggaatggtcttctgatggatcggctgaagcaaaaataccaaaaagaagcacgcaaaaccggctccagcactctggccgttgccctgtgtagcactgtcccctctctggccttaacgtctctgctgtgtttgggcttcgctctctgtgcaagcgttcccatcctcccattgcagtatctcaccttcattttgcaggtgataagtcgcagttttctttatggttccaacgctgcattcctaactctggcatttccctctgagcattttgggaaactctttgggcttgtcatggcactgagcgccgtggtgagcctgcttcagtttcccattttcacccttattaaggggtcattgcagaacgacccattttacgtgaatgttatgtttatgttagccattttgctaacattttttcatccatttctggtgtacagggaatgtcgaacctggaaagagagtccgagcgcaatcgcctag

SEQ ID NO: 178037 - DNA, 1476 bp, Artificial Sequence
  derived and/or modified sequence
atggctggtcagggcttgccactgcacgttgctactttgttgaccggcctgctggagtgtctgggtttcgccggagtcctgttcgggtggccctcccttgtgtttgtgtttaagaatgaagactacttcaaggatctttgcggtcctgatgccggtcctattggaaacgccacagggcaggcagactgcaaagcccaggacgagaggttcagcttgattttcaccctgggatccttcatgaataacttcatgaccttcccaacgggatatatttttgacagattcaaaactaccgtggcccgcctgattgctattttcttctacacaacagctacactgattattgccttcacatcagcagggagcgcagtactcctgttcttagcaatgcctatgctgacgataggaggtatactcttcctaataacgaatctccagattggaaatttgttcgggcagcatcgctctactattattaccctctacaatggcgccttcgactcatcctcagccgtttttttgatcatcaaactcctgtatgagaagggaatttctctgcgggcctcatttatcttcattagcgtgtgctccacctggcacgttgcacggacctttctgctcatgccccggggccatattccttacccactcccacccaactacagctatggactatgtcctggtaatggaactacaaaggaagagaaagagacagctgagcacgagaatcgtgagctgcagagcaaagaatttctgtcagcaaaggaagagacgccaggtgctggccagaagcaggaactccggtccttttggagctatgctttttctcggcgctttgcctggcatctcgtgtggctatctgtgatacagctgtggcattacctgtttattggtacactgaatagcctgctcacaaatatggctggaggcgatatggccagagtcagtacctacactaacgccttcgccttcacccaatttggggtgctctgtgcaccttggaacggcctgctcatggaccgactgaaacagaagtatcagaaggaagcacgtaaaaccgggtcttccactctggcagtggcattgtgtagtactgtccctagcctggctctgacctctctgctgtgtctcggttttgccctgtgcgcatccgtgccaatactccctctgcagtatctgaccttcattctccaggtgatcagtcgctccttcctatatggcagtaatgccgcttttctgacgctcgccttcccatcagaacacttcgggaagcttttcggcctagtcatggctttgtccgccgtcgtgagcctgctgcagttccccatctttactctgatcaaggggtccttgcagaacgatcctttttacgtgaatgtcatgttcatgctggcgattctgttgaccttctttcatccctttctcgtgtaccgggagtgtcgaacctggaaagagtctccctccgccatcgcctag

SEQ ID NO: 178038 - DNA, 309 bp, Artificial Sequence
  derived and/or modified sequence
atggctggccagggcctgcccctccatgtcgcaactctcctcacagggctgctagagtgcttgggattcgcaggagtcctgttcgggtggcctagcctggtgtttgttttcaagaacgaggactactttaaagatctgtgtggccctgatgccggcccaatcgggaacgctacagggcaggccgactgcaaagcacaagatgagaggttctccctcatattcactttggggtcctttatgaataactttatgacctttccaactgggtacatttttgacaggttcaaaacaactgttgcacgcctttag

SEQ ID NO: 178039 - DNA, 510 bp, Artificial Sequence
  derived and/or modified sequence
atggcaggacagggactccccctgcacgtcgctaccttgctgactggtctgctggagtgcctcgggtttgctggcgtcctgttcggatggccctccctggtgtttgtatttaaaaatgaggactattttaaagacttatgcggcccggatgccggtcccattggaaacgccacaggccaagctgattgtaaggcacaggatgagaggttcagcctgatcttcacactcgggtctttcatgaataacttcatgactttcccaacgggatatatctttgatcgctttaaaaccacggtggcaagactgattgccatctttttctacacaacggcaacccttatcatcgctttcacttctgccggatctgccgtgcttttgttcctggccatgcctatgctgactattgggggcattctgttcctgattacaaacctacagatcggtaatctgttcgggcagcatcgcagtacaattattacactctataacggtgcctttgactcaagctag

SEQ ID NO: 178040 - DNA, 447 bp, Artificial Sequence
  derived and/or modified sequence
atggcggggcaaggcttacctctgcacgtcgccacgctcctgaccgggctgcttgagtgcctgggcttcgccggagtgctattcggatggccaagcctggtgtttgtatttaaaaatgaggattattttaaagacttgtgcggacccgacgccgggcctatcgggaacgccaccggccaagctgattgcaaggcccaggacgaacgcttttccctgatcttcaccttaggctcattcatgaataactttatgaccttcccaactgggtacatattcgatagatttaagaccacagtggctaggctgatcgcaattttcttctatacgaccgctacactgataatcgccttcacttcagcaggtagcgccgtcttgctgttcctggcaatgcccatgttgacaattgggggcattctgttcctgattacgaaccttcagatcgggtag

SEQ ID NO: 178041 - DNA, 360 bp, Artificial Sequence
  derived and/or modified sequence
atggctggccagggcctcccattgcacgtagccaccctcctgacaggtctgctcgaatgcctgggatttgcaggcgtgctatttggatggccctcgctagtcttcgtgttcaagaacgaagattactttaaagacctgtgcggccccgacgcaggtcctatcgggaatgctaccggccaggccgattgcaaagcccaggatgagcggtttagtctgattttcacactgggctcatttatgaataactttatgactttccccacagggtatatcttcgaccggttcaaaactacagtggctaggttaattgctatctttttttatactacagccacattgattatagcgtttaccagttag

SEQ ID NO: 178042 - DNA, 1476 bp, Artificial Sequence
  derived and/or modified sequence
atggctggtcagggacttcccctgcatgttgcaaccctgctgacaggcctccttgaatgtctgggttttgcaggcgtgctgtttggatggccaagcttggtatttgtttttaagaacgaggattatttcaaagatctctgtggaccagacgccggccctattggcaacgccaccggccaggccgactgcaaagcccaagatgagagattctctctgatctttactctggggagcttcatgaataattttatgacattcccgaccggctatattttcgaccgttttaagacaaccgtggccaggctgattgccatttttttttacaccactgcaaccctaatcatcgcttttacttcagcaggtagtgccgttctgctctttctagcaatgcccatgctgacaattggggggatcctgtttctgatcaccaacttgcagatcggcaacctgtttggacaacatcgaagcacgattatcacactgtataacggggcttttgatagctcatctgctgtgttcctcatcatcaaactgctgtacgaaaagggcattagcttaagagcttcattcatctttatcagtgtatgttctacttggcacgtcgctaggacctttctgcttatgccacgcggacacatcccatatcctctgcctcctaattactcctacggactgtgtccagggaacgggacaacaaaggaggagaaggagacagcagaacatgagaatcgtgagctacagtccaaggaattcttgtccgccaaggaggaaactcctggcgccgggcagaagcaggagctaagatccttttggtcatatgcctttagtcgacgcttcgcttggcatctggtgtggctatctgtgatccaattgtggcactacctgttcattgggactctcaactccctcttgaccaacatggctggcggggacatggcacgggtatcaacttataccaacgctttcgctttcacacagtttggcgtgctttgcgcaccatggaacggattgctgatggataggctgaagcagaagtaccagaaggaagcacgtaagacggggagcagcacacttgccgttgccctgtgctccaccgtgccttccttggctttgaccagcctactgtgtctgggcttcgccctgtgcgcatccgtgccaattttgccactccagtacctcactttcatccttcaggttattagtcgatcctttctatatgggagcaacgccgcttttctgacactcgcctttccgagtgaacatttcggaaaactctttggtctggtgatggccttgagcgctgtcgtatctctgctgcaatttccaatctttactctgattaaaggttctcttcagaacgatcctttttacgtcaatgtaatgtttatgctcgcaatcctcctgacgttcttccacccatttttagtgtatagagaatgcaggacatggaaagaatcccctagtgcaattgcttag

SEQ ID NO: 178043 - DNA, 996 bp, Artificial Sequence
  derived and/or modified sequence
atggctggtcagggtctccccttacacgtggctactctcctcactgggttgctggagtgtcttggttttgctggtgtgctgttcggctggcccagcctggtgttcgtttttaagaacgaagactacttcaaggacctctgcggtccagacgccgggcccattggcaatgcaaccggtcaggccgattgtaaagctcaggacgagaggttttccctcatctttaccttaggtagctttatgaacaacttcatgactttccctacagggtatatttttgaccgttttaaaaccaccgtggccagactgatagctatcttcttctataccactgcaaccctgatcatagcctttacaagtgccggcagtgctgtattgctcttcctggcgatgcctatgctcaccattggcggcatccttttcctgattacaaacttacagatcggcaacctgtttgggcagcacaggagcaccatcattaccctgtataacggagctttcgatagtagttctgcagtgttcctgatcatcaaattgctgtatgagaagggaatttcactgcgggcaagcttcatcttcatttctgtctgctcaacctggcacgttgcccggacatttcttctcatgccgagaggacatattccgtatcctctgccccccaattacagttacggcttgtgcccaggcaacgggaccaccaaagaagaaaaagagacggcagaacacgagaacagggagctccagagtaaggaattcctcagtgccaaggaggagacccctggagccggtcaaaagcaagaattgagatctttctggagttacgctttcagcagacgtttcgcatggcaccttgtttggttgtctgtgattcaactgtggcattatctttttatcggcacccttaactccctgttgaccaacatggctggaggcgacatggcgcgagtgtccacctatactaacgcttttgccttcacccagttcggagttctgtgctag

SEQ ID NO: 178044 - DNA, 135 bp, Artificial Sequence
  derived and/or modified sequence
atggccggccaggggctgccccttcacgtagccaccctgcttacgggtttactagagtgtctgggctttgccggtgtgttgttcggttggccaagcttggttttcgtgttcaaaaacgaggactacttcaagtag

SEQ ID NO: 178045 - DNA, 297 bp, Artificial Sequence
  derived and/or modified sequence
atggcagggcaggggctcccactacacgtggcgacactgttaactggcctcttggagtgcctcgggtttgcaggcgttctgtttggctggccatctttggtcttcgtctttaaaaacgaggactactttaaggacctgtgcggacccgacgctggacctattggtaacgcaaccggtcaggcggactgcaaagcacaggacgagaggttctcattaatctttaccctgggatcctttatgaacaactttatgactttccctaccggctatatctttgataggttcaaaacaacttag

SEQ ID NO: 178046 - DNA, 237 bp, Artificial Sequence
  derived and/or modified sequence
atggcaggccaagggttaccactccacgtggcgaccctgctgacaggacttctggagtgcttaggctttgctggcgtgctgttcggctggccctcacttgtgtttgtgttcaaaaacgaagattactttaaagacttgtgtggcccggatgccggccccattggcaatgctaccgggcaagctgattgcaaagctcaagacgagcggttctcccttatttttacactcggcagctag

SEQ ID NO: 178047 - DNA, 324 bp, Artificial Sequence
  derived and/or modified sequence
atggcaggacagggccttccgctgcacgtcgccacccttctcaccggactcctagagtgcttgggatttgccggggttctctttggatggccttctctggtcttcgtctttaagaatgaagattactttaaagatctgtgcggaccggacgccggacccataggcaacgccaccgggcaggccgactgtaaagcacaggatgagcggttctcactcatcttcacgctgggttcttttatgaataattttatgacattccccaccggttacattttcgataggttcaagaccactgtagcccgtctcatagcaatttttttctag

SEQ ID NO: 178048 - DNA, 333 bp, Artificial Sequence
  derived and/or modified sequence
atggcagggcagggtctgccactgcacgtcgccaccctgttgactgggctgcttgagtgcctgggattcgccggcgttctgttcgggtggccctcactggtgtttgtcttcaaaaatgaggattacttcaaagacctgtgcggcccagatgcaggccctatcggtaatgcaacagggcaggctgactgtaaagcacaggatgagcggttttccctgatctttaccctcgggtcttttatgaacaattttatgacattcccaactgggtacatttttgatcgatttaaaacaaccgtggccagactgattgccattttcttctacacaacatag

SEQ ID NO: 178049 - DNA, 1476 bp, Artificial Sequence
  derived and/or modified sequence
atggccggccagggcctgcccctgcacgtggccaccctgctgaccggcctgctggagtgcctgggctttgctggggtgctgtttggctggcccagcctggtgtttgtgttcaagaatgaagactacttcaaggacctgtgtggcccagatgctggccccatcggaaatgccaccggccaggccgactgcaaggcccaggatgagcgcttcagcctcatcttcaccctgggcagcttcatgaacaacttcatgaccttccccaccggctacatctttgaccgcttcaagaccaccgtggcccggctgattgccatcttcttctacaccacagccaccctcatcatcgccttcaccagcgctggcagcgctgtgctgctcttcctggccatgcccatgctgaccatcggcggcatcctcttcctgatcaccaacctgcagatcggcaacctgtttggccagcacaggagcaccatcatcaccctgtacaatggagcctttgacagcagcagcgctgtgttcctgatcatcaagctgctgtatgagaagggcatcagcctgcgggccagcttcatcttcatctctgtgtgcagcacctggcacgtggcccggaccttcctgctgatgccccggggccacatcccctaccccctgccccccaactacagctatggcctgtgccctggaaatggcaccaccaaggaggagaaggagacagctgagcacgagaaccgggagctgcagagcaaggagttcctgagcgccaaggaggagaccccaggagctggccagaagcaggagctgcgctccttctggagctatgccttcagcagaagatttgcctggcacctggtgtggctgagcgtcatccagctgtggcactacctgttcatcggcaccctgaacagcctgctgaccaacatggccggcggggacatggcccgggtgtccacctacaccaatgcctttgccttcacccagtttggagtgctgtgtgccccctggaatggcctgctgatggaccggctgaagcagaagtaccagaaggaggccaggaagacaggcagcagcaccctggccgtggccctgtgcagcacagtgcccagcctggccctgaccagcctgctgtgcctgggctttgccctgtgtgcctctgtgcccatcctgcccctgcagtacctgaccttcatcctgcaggtgatcagccgctccttcctgtatggcagcaatgctgccttcctgaccctggccttccccagcgagcactttgggaagctgtttggcctggtgatggccctgtctgctgtggtgtccctgctgcagttccccatcttcaccctcatcaagggcagcctgcagaatgaccccttctacgtgaatgtgatgttcatgctggccatcctgctgaccttcttccaccccttcctggtgtacagagaatgtaggacctggaaggagagccccagcgccatcgcctag

SEQ ID NO: 178050 - DNA, 309 bp, Artificial Sequence
  derived and/or modified sequence
atggccggccagggcctgcccctgcacgtggccaccctgctgaccggcctgctggagtgcctgggctttgctggggtgctgtttggctggcccagcctggtgtttgtgttcaagaatgaagactacttcaaggacctgtgtggcccagatgctggccccatcggaaatgccaccggccaggccgactgcaaggcccaggatgagcgcttcagcctcatcttcaccctgggcagcttcatgaacaacttcatgaccttccccaccggctacatctttgaccgcttcaagaccaccgtggcccggctgtag

SEQ ID NO: 178051 - DNA, 510 bp, Artificial Sequence
  derived and/or modified sequence
atggccggccagggcctgcccctgcacgtggccaccctgctgaccggcctgctggagtgcctgggctttgctggggtgctgtttggctggcccagcctggtgtttgtgttcaagaatgaagactacttcaaggacctgtgtggcccagatgctggccccatcggaaatgccaccggccaggccgactgcaaggcccaggatgagcgcttcagcctcatcttcaccctgggcagcttcatgaacaacttcatgaccttccccaccggctacatctttgaccgcttcaagaccaccgtggcccggctgattgccatcttcttctacaccacagccaccctcatcatcgccttcaccagcgctggcagcgctgtgctgctcttcctggccatgcccatgctgaccatcggcggcatcctcttcctgatcaccaacctgcagatcggcaacctgtttggccagcacaggagcaccatcatcaccctgtacaatggagcctttgacagcagctag

SEQ ID NO: 178052 - DNA, 447 bp, Artificial Sequence
  derived and/or modified sequence
atggccggccagggcctgcccctgcacgtggccaccctgctgaccggcctgctggagtgcctgggctttgctggggtgctgtttggctggcccagcctggtgtttgtgttcaagaatgaagactacttcaaggacctgtgtggcccagatgctggccccatcggaaatgccaccggccaggccgactgcaaggcccaggatgagcgcttcagcctcatcttcaccctgggcagcttcatgaacaacttcatgaccttccccaccggctacatctttgaccgcttcaagaccaccgtggcccggctgattgccatcttcttctacaccacagccaccctcatcatcgccttcaccagcgctggcagcgctgtgctgctcttcctggccatgcccatgctgaccatcggcggcatcctcttcctgatcaccaacctgcagattggatag

SEQ ID NO: 178053 - DNA, 360 bp, Artificial Sequence
  derived and/or modified sequence
atggccggccagggcctgcccctgcacgtggccaccctgctgaccggcctgctggagtgcctgggctttgctggggtgctgtttggctggcccagcctggtgtttgtgttcaagaatgaagactacttcaaggacctgtgtggcccagatgctggccccatcggaaatgccaccggccaggccgactgcaaggcccaggatgagcgcttcagcctcatcttcaccctgggcagcttcatgaacaacttcatgaccttccccaccggctacatctttgaccgcttcaagaccaccgtggcccggctgattgccatcttcttctacaccacagccaccctcatcatcgccttcaccagctag

SEQ ID NO: 178054 - DNA, 996 bp, Artificial Sequence
  derived and/or modified sequence
atggccggccagggcctgcccctgcacgtggccaccctgctgaccggcctgctggagtgcctgggctttgctggggtgctgtttggctggcccagcctggtgtttgtgttcaagaatgaagactacttcaaggacctgtgtggcccagatgctggccccatcggaaatgccaccggccaggccgactgcaaggcccaggatgagcgcttcagcctcatcttcaccctgggcagcttcatgaacaacttcatgaccttccccaccggctacatctttgaccgcttcaagaccaccgtggcccggctgattgccatcttcttctacaccacagccaccctcatcatcgccttcaccagcgctggcagcgctgtgctgctcttcctggccatgcccatgctgaccatcggcggcatcctcttcctgatcaccaacctgcagatcggcaacctgtttggccagcacaggagcaccatcatcaccctgtacaatggagcctttgacagcagcagcgctgtgttcctgatcatcaagctgctgtatgagaagggcatcagcctgcgggccagcttcatcttcatctctgtgtgcagcacctggcacgtggcccggaccttcctgctgatgccccggggccacatcccctaccccctgccccccaactacagctatggcctgtgccctggaaatggcaccaccaaggaggagaaggagacagctgagcacgagaaccgggagctgcagagcaaggagttcctgagcgccaaggaggagaccccaggagctggccagaagcaggagctgcgctccttctggagctatgccttcagcagaagatttgcctggcacctggtgtggctgagcgtcatccagctgtggcactacctgttcatcggcaccctgaacagcctgctgaccaacatggccggcggggacatggcccgggtgtccacctacaccaatgcctttgccttcacccagtttggagtgctgtgctag

SEQ ID NO: 178055 - DNA, 135 bp, Artificial Sequence
  derived and/or modified sequence
atggccggccagggcctgcccctgcacgtggccaccctgctgaccggcctgctggagtgcctgggctttgctggggtgctgtttggctggcccagcctggtgtttgtgttcaagaatgaagactacttcaagtag

SEQ ID NO: 178056 - DNA, 297 bp, Artificial Sequence
  derived and/or modified sequence
atggccggccagggcctgcccctgcacgtggccaccctgctgaccggcctgctggagtgcctgggctttgctggggtgctgtttggctggcccagcctggtgtttgtgttcaagaatgaagactacttcaaggacctgtgtggcccagatgctggccccatcggaaatgccaccggccaggccgactgcaaggcccaggatgagcgcttcagcctcatcttcaccctgggcagcttcatgaacaacttcatgaccttccccaccggctacatctttgaccgcttcaagaccacctag

SEQ ID NO: 178057 - DNA, 237 bp, Artificial Sequence
  derived and/or modified sequence
atggccggccagggcctgcccctgcacgtggccaccctgctgaccggcctgctggagtgcctgggctttgctggggtgctgtttggctggcccagcctggtgtttgtgttcaagaatgaagactacttcaaggacctgtgtggcccagatgctggccccatcggaaatgccaccggccaggccgactgcaaggcccaggatgagcgcttcagcctcatcttcaccctgggcagctag

SEQ ID NO: 178058 - DNA, 324 bp, Artificial Sequence
  derived and/or modified sequence
atggccggccagggcctgcccctgcacgtggccaccctgctgaccggcctgctggagtgcctgggctttgctggggtgctgtttggctggcccagcctggtgtttgtgttcaagaatgaagactacttcaaggacctgtgtggcccagatgctggccccatcggaaatgccaccggccaggccgactgcaaggcccaggatgagcgcttcagcctcatcttcaccctgggcagcttcatgaacaacttcatgaccttccccaccggctacatctttgaccgcttcaagaccaccgtggcccggctgattgccatcttcttctag

SEQ ID NO: 178059 - DNA, 333 bp, Artificial Sequence
  derived and/or modified sequence
atggccggccagggcctgcccctgcacgtggccaccctgctgaccggcctgctggagtgcctgggctttgctggggtgctgtttggctggcccagcctggtgtttgtgttcaagaatgaagactacttcaaggacctgtgtggcccagatgctggccccatcggaaatgccaccggccaggccgactgcaaggcccaggatgagcgcttcagcctcatcttcaccctgggcagcttcatgaacaacttcatgaccttccccaccggctacatctttgaccgcttcaagaccaccgtggcccggctgattgccatcttcttctacaccacctag

SEQ ID NO: 178060 - DNA, 1476 bp, Artificial Sequence
  derived and/or modified sequence
atggccggccagggcctgcccctgcacgtggccaccctgctgaccggactactggaatgcctgggtttcgcaggagtgcttttcgggtggccctcgttggtgtttgtttttaaaaacgaagattactttaaggatttatgtgggcctgacgccggccccattggcaacgctacaggtcaggccgactgcaaggcacaggacgagcggttttctttgatatttacgctgggaagtttcatgaataacttcatgacatttcccaccggctatattttcgatagattcaaaaccaccgtcgctaggctgatcgcgatttttttctacacgaccgccacactcataatagcatttacctcagctggatccgccgtgcttctgtttctcgccatgcctatgcttacaatcgggggtatattatttctcataacaaatctgcaaatcggcaacttgtttggccaacaccgatctacaatcattacactgtacaacggagctttcgactcctcttctgccgtcttcttgatcattaaactgctgtatgagaaggggattagcctccgagcatcctttatctttatctctgtttgctccacgtggcatgtcgcacgtacattcctgttgatgccgcgaggtcacataccttaccctctaccacccaactactcgtatggtctttgtccgggaaacggaacaacaaaggaggagaaagaaacagccgaacatgaaaatcgtgagctgcagagcaaagaattcttatccgcaaaggaggagactcccggcgccggtcaaaaacaggaactccgctccttctggtcatacgcattctcaagaaggttcgcttggcacctcgtgtggctttccgtgattcaactgtggcactacctgtttatcgggaccttgaattctctactgacaaatatggcgggcggagatatggctagggtgtcaacctacactaatgcttttgcctttacacagtttggcgtactgtgcgccccctggaacggtctacttatggatagactgaaacaaaagtatcagaaggaggctcggaagaccggaagcagtacgcttgccgtcgctttgtgcagcacagtgccgtctttggctctgacttccctactgtgtctgggcttcgcgctgtgcgcatccgtacccatcttaccactacagtacctcaccttcatcctgcaggtcatcagccgctcgtttctgtacggctccaacgcagctttcctgacactcgccttccccagcgaacactttggaaaactcttcgggctcgttatggcactcagcgcggtcgtgtccctgctacaatttccgatatttacgttaattaaaggctccctccagaacgacccattttatgtgaatgtgatgtttatgttggcaattttgctaactttctttcaccctttcctcgtttaccgagaatgccgtacttggaaagagtctccttcggccatcgcctag

SEQ ID NO: 178061 - DNA, 1476 bp, Artificial Sequence
  derived and/or modified sequence
atggccggccagggcctgcccctgcacgtggccaccctgctgaccgggttgctcgagtgtctgggcttcgccggcgttctttttggttggcctagcctggtgttcgtcttcaagaacgaggactatttcaaggatttgtgtgggcccgacgctggcccaatcgggaacgcgaccggtcaggctgattgtaaggcacaagacgaaaggttcagcctaatctttactcttggcagctttatgaacaactttatgacttttcctacaggctatatttttgatcgattcaaaacgactgtcgctcgccttatagccatcttcttttatacaaccgctactctgatcattgccttcacatcagccgggagcgctgttctgttgttcctggctatgcctatgctcacgataggtggtatcttgtttctcattacaaatctgcagatcggtaacctgtttgggcagcatcggagcacaattattacgttgtacaacggcgcctttgattcctcgtcggctgtgtttctcattatcaagctgctctatgaaaagggcatctcgcttagggcgtcgttcatctttattagcgtctgtagtacatggcacgttgcccggactttcctgctcatgccaaggggtcacattccctatcctctacctcccaattattcctacggcctgtgcccgggtaatggcaccacaaaggaggagaaggaaaccgcagagcacgagaacagagagctccaatctaaggagtttctgtcggccaaggaagaaacgccgggagctgggcagaaacaggagctccgttcgttttggtcttatgccttcagccgcaggtttgcatggcacctggtttggctgtctgttatacaactctggcactacctgttcatcggaacactaaattctctgctaacaaacatggcggggggggatatggcccgcgtcagcacatataccaacgcctttgctttcacccagttcggagtgctttgcgctccctggaatggccttttgatggaccgcctgaaacagaaatatcagaaagaggcacggaaaacagggtcatcgacgctggcagtggctctatgtagtactgtgccatctctggcccttacgagcctcttgtgtttgggctttgccctgtgtgcctctgtaccaatcttgccgctacagtacttaacgttcatccttcaagtgatcagccgaagtttcctctacggttccaacgctgcctttcttacccttgccttcccttcagagcattttggtaagctctttgggctcgtaatggcactctcagctgtcgtctccctgctgcagttcccaatattcacgctgattaaggggtctttacagaatgacccgttctacgtcaatgtgatgtttatgctcgccatcctgctcacttttttccatccattcctcgtttaccgtgagtgccgtacgtggaaagagagcccctcggctatagcttag

SEQ ID NO: 178062 - DNA, 1476 bp, Artificial Sequence
  derived and/or modified sequence
atggccggccagggcctgcccctgcacgtggccaccctgctgaccggactgcttgagtgcttaggcttcgcaggagttctattcgggtggccatctctggtgttcgtgttcaaaaatgaggattacttcaaagatctgtgtggtcccgacgcaggccctattgggaacgccacaggtcaagcagactgcaaggcccaagacgagcgcttttcccttatctttacactgggatccttcatgaataactttatgacatttccgactgggtatatatttgaccggtttaaaaccacagtcgctagacttattgctatcttcttctacactaccgccacactgattattgccttcacctccgcaggctcggcagtgctcctctttttggccatgccaatgctaaccatcggagggatcttattcctgatcaccaatcttcagatcgggaatttgttcggacagcaccgctctaccattataactttatataacggcgcctttgattcctcttccgccgtttttctcattatcaagctcctgtatgaaaaaggcatttccctgagagcctcctttattttcattagcgtctgcagcacatggcatgtagcaaggacattcttgctgatgcctcggggacacatcccgtatccactgccgcccaattacagttacggcttatgcccaggtaacgggacaaccaaggaagagaaggaaaccgcagaacatgaaaaccgagagctgcaatcgaaagagtttttatcggctaaagaagagaccccaggagccggccagaagcaggaactgcggtctttctggtcgtacgcattcagtcggcggtttgcctggcacctggtttggctttcggtcattcaattgtggcattacctctttataggtacgctgaacagcctactgaccaacatggctggaggggatatggcaagagtctcaacctatacaaacgcctttgccttcacacaattcggggttctttgtgccccctggaacggcctgctgatggacaggctgaaacagaagtatcagaaggaggctcgaaaaacaggttctagcacactggccgtcgccctgtgttccaccgtgccatctctcgctctcacttcgctgctatgcctcggtttcgcactctgcgctagcgtgccaattttgcccttacaatacctcacttttatacttcaggtgataagcagaagtttcctctatggctcaaatgcagcgttcttgactcttgctttcccttctgaacacttcgggaagctgtttggattggtaatggctttgtctgctgttgtgagcctcctccaattcccaatcttcaccctcatcaaaggctcactgcagaacgatccattttacgtgaacgtaatgttcatgctggccatactactaacattctttcatccttttcttgtgtatcgtgaatgtcggacctggaaagaaagtcctagtgcgatagcttag

SEQ ID NO: 178063 - DNA, 309 bp, Artificial Sequence
  derived and/or modified sequence
atggccggccagggcctgcccctgcacgtggccaccctgctgaccgggttactggagtgcctgggatttgccggggtgctctttgggtggccttccctggtattcgttttcaagaatgaagattactttaaggacctgtgtggccccgacgccggcccaatcggcaacgctacaggccaggctgactgtaaagcacaagatgaaagatttagcctcatcttcactctcggctctttcatgaacaatttcatgacatttcctacaggttatattttcgatagattcaaaaccactgtagctcgcctgtag

SEQ ID NO: 178064 - DNA, 510 bp, Artificial Sequence
  derived and/or modified sequence
atggccggccagggcctgcccctgcacgtggccaccctgctgaccgggttgttagaatgtttggggtttgctggagtcttattcgggtggccatctttagtgttcgtttttaaaaatgaggattactttaaggacttgtgtggcccggacgccggccccatcgggaacgctacaggacaggccgattgcaaggctcaggacgaacgattttccctaatttttacactgggttcctttatgaataactttatgacctttcccaccggctatatttttgatcgatttaaaacaaccgttgcgcggctgattgccattttcttctacaccaccgctacgcttataatcgctttcacatcagccggctctgccgtactcctcttcttagccatgcccatgctgaccatcggtggaattttgtttcttataaccaatctacagatcggtaatctttttggacagcataggtcaaccattatcaccctatacaatggggcattcgactctagttag

SEQ ID NO: 178065 - DNA, 447 bp, Artificial Sequence
  derived and/or modified sequence
atggccggccagggcctgcccctgcacgtggccaccctgctgaccggcttgctggagtgccttgggttcgcaggagtgctgttcgggtggccgtcgcttgtcttcgtctttaaaaacgaggactattttaaagatctgtgtggtccagacgcaggacctattgggaacgccactggccaggctgattgcaaggcccaggatgagcgctttagtttgatttttacactgggtagctttatgaacaatttcatgacatttcctactggctatatatttgaccgctttaagacgactgttgctcgcctgatcgctatctttttttataccacagctacactgatcatcgcatttaccagcgcaggctccgccgttctcctattcctcgccatgcccatgctgacgatcggtggaattctcttccttatcactaatctccaaattggctag

SEQ ID NO: 178066 - DNA, 360 bp, Artificial Sequence
  derived and/or modified sequence
atggccggccagggcctgcccctgcacgtggccaccctgctgaccggccttctcgagtgcctcggatttgcgggagtgctctttggctggcccagcctggtttttgtttttaagaacgaggattactttaaggacctgtgcgggccagacgccggacccattggcaatgcgactggccaggctgactgcaaggcccaggatgaaagattctcccttatcttcacactggggagtttcatgaacaatttcatgacatttcctacggggtacatatttgaccggttcaagacaaccgtcgctcgattgattgccatcttcttctatacaactgccaccctaataatagcattcacatcgtag

SEQ ID NO: 178067 - DNA, 1476 bp, Artificial Sequence
  derived and/or modified sequence
atggccggccagggcctgcccctgcacgtggccaccctgctgaccggcctactcgagtgcctcggttttgctggggttctgttcggttggccttcattagtcttcgtctttaaaaatgaagactacttcaaagacctgtgcggccccgatgccggacctataggaaatgcaacaggccaagctgactgtaaggctcaggatgagcgcttctcccttatcttcactttaggtagctttatgaacaacttcatgacgttcccaacaggctatattttcgacagattcaaaaccacagtcgcgcggttaatcgccattttcttctataccacagccacgctgatcatcgctttcacctcagccggaagtgctgtactcttattcctagctatgccaatgcttaccatcggaggaatcctgttccttattactaatcttcagattggaaatctgttcggacagcacaggtctaccatcattaccctgtacaatggagccttcgattcttctagtgctgtgttcctgatcatcaaattgttgtacgaaaaaggtatctcccttcgcgccagcttcatttttataagcgtttgttctacttggcatgttgccagaacttttctcttgatgccgagaggtcacatcccatatccattgcctccaaactatagttatgggctttgtcccggcaatgggacaacaaaggaagaaaaagagacagctgaacacgagaatagggagcttcagtcaaaagaattcctttcagccaaagaggagacgcccggggccggacagaagcaagagctgcgatctttttggtcttacgcattcagcaggcggtttgcctggcatcttgtatggctttccgtgatacaactttggcattacctgtttatcggcactttgaactctctgcttacaaacatggccggtggcgacatggccagagtttcgacctacacaaacgcctttgccttcacacagttcggggtgttgtgcgccccctggaatggtctcctgatggacaggttgaaacagaaatatcaaaaagaggctagaaaaactggatccagcaccctcgccgtcgctctttgttctacagtgccatctctggctctgacatcactgctctgcctgggatttgcactttgtgccagcgtgcctatcttgccgttgcagtatctaacctttatcttacaggtgatctcacggtctttcctgtacggcagcaatgcagctttcttgacgctggcctttccgtctgagcattttgggaaactctttggactggttatggccctgtccgcggtggtgagtctccttcagttccccatttttactttgattaaaggtagtctgcagaatgaccccttttacgttaacgtgatgtttatgttggccattctgctcacattcttccaccctttcttggtttacagagaatgtcgtacctggaaggaaagcccatctgcaattgcctag

SEQ ID NO: 178068 - DNA, 996 bp, Artificial Sequence
  derived and/or modified sequence
atggccggccagggcctgcccctgcacgtggccaccctgctgaccggactgctggaatgccttggatttgccggggttctgtttggatggccaagtctcgtcttcgtgtttaaaaacgaggactacttcaaggatctgtgtggccccgacgctggacctatcggcaacgcgacaggtcaggctgactgtaaagcacaggacgagaggttcagcctcatttttaccctggggtcctttatgaataacttcatgacattccctaccgggtacatcttcgataggtttaagacgaccgtggctagactaatcgccattttcttttacactaccgccactttgataatcgcgttcactagtgccgggagcgccgtcctgttatttctggccatgcccatgttgacgatcgggggtatcctcttcctgatcaccaatctgcaaatcggtaacctgttcgggcagcatcgctcaacaatcattaccctctataacggcgcattcgattctagttcagccgtattcctgattattaaactcctgtacgagaagggaatcagtctccgcgcttcgttcatattcatttccgtgtgctctacctggcacgtcgctagaacatttctgctgatgccacggggtcatatcccctatccactccctcctaattacagctatgggctgtgccccggaaacgggacgaccaaagaagagaaggaaaccgccgagcatgaaaatcgggaactgcagtctaaggaattcctgtcagccaaggaggagaccccaggcgctggccagaagcaggagcttagatccttctggagctacgcattctctcgccggttcgcttggcatcttgtttggttaagcgttatacagctgtggcattatctgtttattggtacactcaacagccttctgaccaatatggccgggggagacatggctcgggtgtctacatatacaaatgcgtttgcatttacccagtttggtgtcctgtgctag

SEQ ID NO: 178069 - DNA, 135 bp, Artificial Sequence
  derived and/or modified sequence
atggccggccagggcctgcccctgcacgtggccaccctgctgaccggactgctggaatgtttaggctttgcaggggtccttttcggctggccttccctggtgttcgtctttaagaacgaagattatttcaagtag

SEQ ID NO: 178070 - DNA, 297 bp, Artificial Sequence
  derived and/or modified sequence
atggccggccagggcctgcccctgcacgtggccaccctgctgaccggcctgctggagtgtctgggattcgccggcgtgctcttcggctggccttcgctcgtgttcgtatttaaaaatgaagactattttaaagatctctgcgggcccgacgctggacccatcgggaacgcaacgggccaagccgattgcaaagcccaggacgagcgcttctctcttatcttcacgcttggcagcttcatgaacaatttcatgactttcccaaccggttatatctttgacaggtttaagacaacctag

SEQ ID NO: 178071 - DNA, 237 bp, Artificial Sequence
  derived and/or modified sequence
atggccggccagggcctgcccctgcacgtggccaccctgctgaccgggctcctggaatgcctgggttttgcaggcgtacttttcgggtggccaagtcttgtgttcgttttcaaaaatgaggattactttaaagatctgtgcggccccgatgcaggacctattgggaacgccacaggacaggctgactgcaaagcccaggacgagcgctttagtctgatttttacactggggtcatag

SEQ ID NO: 178072 - DNA, 324 bp, Artificial Sequence
  derived and/or modified sequence
atggccggccagggcctgcccctgcacgtggccaccctgctgaccgggctcctcgaatgcctcggatttgcaggcgtgctcttcggttggccatcgctcgttttcgtctttaaaaatgaagactacttcaaggatttgtgtggacccgatgccgggcccatcgggaatgccacaggacaagccgactgcaaagcccaagatgaacgattttcacttatctttacgctgggctctttcatgaataacttcatgacctttcccaccggctacattttcgatagatttaagacaaccgttgcacggctcatcgctattttcttctag

SEQ ID NO: 178073 - DNA, 333 bp, Artificial Sequence
  derived and/or modified sequence
atggccggccagggcctgcccctgcacgtggccaccctgctgaccggccttctcgaatgtctaggcttcgccggcgtgctgtttggttggccttccctcgtcttcgtgttcaaaaacgaagactatttcaaagacctctgcggccctgatgcaggacctatcggcaacgccacgggccaggccgactgcaaggctcaagatgaacgcttttctttaattttcactctcggtagcttcatgaacaatttcatgaccttcccaactggctatatcttcgatcgtttcaagacgacagtggcgagactcatagccatcttcttctacaccacttag

SEQ ID NO: 178074 - DNA, 1476 bp, Artificial Sequence
  derived and/or modified sequence
atggccggacagggactgcccctccatgttgcgactttgcttaccggcttgttggaatgtctcggattcgcgggagtactcttcggctggccaagtcttgtctttgtgtttaagaacgaagattacttcaaagatctctgcgggccagatgcaggcccaattggcaacgcaacaggtcaggctgattgcaaagctcaagatgaacgatttagcctgatatttaccctaggcagttttatgaacaatttcatgacctttccaacaggttatatattcgataggttcaaaactaccgtggctaggctgatcgccatattcttctataccacagccaccttgattatcgcctttacctccgccggatccgcggtactgctgtttttagccatgccaatgctgaccattggaggtatcctctttttgatcacgaatcttcaaataggaaacctgtttggtcagcacagatccacaatcatcaccctatacaatggtgctttcgattcttcatctgccgtgttcttaattattaagctgctgtacgaaaagggtatcagcctgagggcgtctttcatattcatcagcgtgtgcagtacatggcacgtggccagaacttttctgctgatgccccgtggccacataccttacccattaccaccaaactactcatacgggttatgtcctgggaacggcactaccaaggaagagaaggagacagctgagcacgagaacagggagctgcaaagcaaagagtttctttccgccaaggaagagacccctggggctgggcagaagcaggaactgaggtcattctggagttacgctttttcaaggagattcgcctggcacctagtctggctctctgtgattcaactttggcactacctgttcattgggacgctaaactctctgctcaccaatatggcaggtggcgatatggccagagtgagcacctacaccaacgcttttgccttcacccagttcggggtgttatgcgcgccttggaacggattactcatggatcggttaaaacaaaagtaccagaaagaggccagaaaaaccgggtcttccacactcgcagtcgccctctgcagcacagtcccatcccttgctctcacctctttgctctgcctcggctttgccctctgtgcctccgttccaatcctgccactgcagtacctgacgtttatcctccaagtcatttcaaggtcttttctgtatggctcaaatgcagccttcctcaccctggccttcccctccgagcactttgggaagctgtttgggctcgtcatggccctgtctgccgtcgtgtctctgttgcaattccccattttcacactgatcaagggaagtctgcagaatgatcccttctatgtgaatgtgatgtttatgctggcaattttgcttacgttttttcacccttttttggtatatagagaatgcaggacttggaaagagagtcctagcgcaatcgcatag

SEQ ID NO: 178075 - DNA, 1476 bp, Artificial Sequence
  derived and/or modified sequence
atggccggtcaaggcctgccacttcatgttgcgacactgctgacgggattgctcgagtgcctggggtttgctggcgttctttttgggtggccgagccttgtcttcgtgttcaaaaatgaggactacttcaaagatctttgtggccctgacgccggtccaataggcaacgctacgggccaggcagattgcaaggcccaggacgagcgatttagtctcatctttaccctgggaagttttatgaataatttcatgacattccccacaggctacatttttgaccgattcaaaactaccgtggcacggctcatcgctattttcttttatactaccgcaacactaataattgctttcacctctgctggctccgccgtgttgctcttcttggctatgcccatgctgactattggcggaatcctattcctcatcaccaacttacaaataggcaacctgttcgggcaacatagaagtactattatcacactgtataatggtgcctttgactcctcttcagccgtgttcttgatcatcaaactcctgtatgagaagggtatcagcctccgagcttctttcatctttatatccgtctgcagtacctggcatgttgcgcgtacctttctgttaatgccacgcggtcacatcccatatcccctgcctcctaactacagttatggcctctgtccgggtaacgggaccactaaggaggagaaagagacagctgagcatgaaaaccgtgaactgcagagcaaagaattcctgtcggcaaaagaggaaacccccggagctggacagaagcaggaattacgttctttttggagctacgcattcagcaggcggtttgcctggcatctcgtctggctctccgtgattcagctctggcattatctcttcatcggcaccttgaactctcttttaacgaacatggcgggtggggatatggcccgagtgtctacctacacaaatgcctttgcttttactcaattcggtgtcctgtgcgcaccttggaacggcttgctgatggataggttgaagcagaaataccagaaagaagctcgcaagacaggcagttccactttagctgtggccctgtgctctaccgtgccctcgctagccctcacttctcttctgtgtctcggattcgctctctgcgcctcagttccaatcttgcctctgcagtacctcacctttatcctccaggtcatcagtcgatctttcctgtacggtagcaacgccgcatttctcacactggcgtttccaagcgagcatttcggaaaactgttcgggctggtaatggccttgtccgccgtcgtctcactactccagttccccatatttaccttaatcaaggggagtctccagaacgacccattctacgtgaacgtgatgttcatgttagccattttactaaccttcttccaccccttcctcgtttacagggagtgcaggacatggaaggaatctccttctgccattgcgtag

SEQ ID NO: 178076 - DNA, 1476 bp, Artificial Sequence
  derived and/or modified sequence
atggctggacaggggttacccctgcatgtggccaccttgctgactgggctgctcgaatgccttgggttcgcaggggtgctttttgggtggccttccctggtattcgtttttaagaatgaagattacttcaaggacctgtgtgggccagacgccggtcctatcggtaacgccacaggacaggcagattgcaaggcacaagatgagagattcagcttgatcttcactttggggagctttatgaacaattttatgacattcccgaccggttatattttcgatcgctttaagacaacagttgctcgcttgatagcaatctttttctataccaccgcaacgctgataattgcttttacctccgcgggttcagctgtcttgttgttcctcgccatgccaatgcttactataggagggatcttattcttgataactaatctgcagattgggaatctcttcgggcagcacaggagtacaattattactctttataacggggcattcgactccagtagcgcagtctttttgataataaaactcctgtacgaaaagggaatcagtctcagagcatcctttatctttatctctgtatgcagcacttggcatgtggcaagaacttttctcctcatgccacgcggtcatataccctatccactcccaccgaactattcctatggtctgtgtccaggcaacggtacaacaaaggaggaaaaggaaaccgcagagcacgagaatcgcgagcttcaatcgaaagagtttctctccgccaaagaagagaccccgggagccggacagaagcaggagcttagatcgttttggagttatgccttcagccggcgttttgcgtggcacctggtctggcttagcgttatacagctgtggcattacctttttatcgggactttgaactcactgctgaccaacatggccggaggcgacatggcaagagtctctacatacaccaacgccttcgcgtttacgcagttcggagtgctgtgcgccccttggaatggtctccttatggatcgactgaagcagaagtaccagaaggaggctaggaaaacaggatcaagtaccttagcagtcgccctctgctcaacagttccttcactggccctgacgagtctgctgtgtcttgggttcgccctgtgcgcttcagttcccatcttacccttgcagtatttaacgttcattctgcaagttatttcgcggagctttctgtacgggtccaatgcagcctttctgaccctagccttcccatctgaacacttcggaaaattgttcggcttggtcatggctttgtcggctgtcgtgtccctgttacagtttcccatcttcacactgatcaaggggtcactccagaatgaccccttttatgtgaatgtgatgttcatgttagccatcctgcttaccttcttccatccattcttagtctacagggagtgccgaacgtggaaggaaagcccgagcgctatcgcttag

SEQ ID NO: 178077 - DNA, 309 bp, Artificial Sequence
  derived and/or modified sequence
atggccggtcagggcctgcccctccacgtggcaacattgctcacaggactgcttgagtgtcttggttttgccggagtgttgtttggttggcctagtttagtgtttgtgtttaagaatgaggactacttcaaggacttatgcggtcctgacgcgggtcctattggcaacgctaccggacaagctgattgcaaagcgcaggatgaacgattcagcctgatctttactctcggctcattcatgaacaacttcatgacttttcctacaggctatatctttgatcgattcaagactaccgtggcacggctctag

SEQ ID NO: 178078 - DNA, 510 bp, Artificial Sequence
  derived and/or modified sequence
atggctgggcaaggattacccctgcacgttgcaacacttctgacaggtttattggaatgcctcggatttgccggagtgttgtttggctggccttccttggtgttcgtgtttaagaacgaagactattttaaagatctgtgtggacctgatgccggtccgatcgggaatgcaaccggccaggcagactgcaaggcgcaggacgagcggttctctttaatctttacactcggatcttttatgaacaacttcatgacttttcctaccgggtacatcttcgaccgattcaagaccacggtggctcggctgattgctatctttttctacacaaccgcaaccttgattatcgcatttactagcgcagggtctgcggtgttattattcctggcaatgcccatgcttaccattggcggtatcctgtttctgatcacaaaccttcagattggcaacctgtttggacagcaccgctctaccattatcacgctgtacaacggggcattcgattcttcatag

SEQ ID NO: 178079 - DNA, 447 bp, Artificial Sequence
  derived and/or modified sequence
atggcgggacaggggttgcctctccatgtagcgacactcttgaccggcctcttagagtgccttggattcgccggagtgctcttcgggtggccttctttagtctttgtgtttaagaacgaggattatttcaaggacctttgcggacccgacgcaggccctatcggcaatgccactggtcaggctgactgcaaggcgcaggacgaacgttttagcctgatattcactctggggtcttttatgaacaatttcatgacgttccctactggttacatattcgatcgatttaagacaacagtggctcgattgatcgcaattttcttctataccaccgccacactgatcattgcctttacttcagcagggtctgctgttctcctgtttcttgcgatgcccatgctaaccatcggcggtattcttttcctcatcaccaatctgcagattggatag

SEQ ID NO: 178080 - DNA, 360 bp, Artificial Sequence
  derived and/or modified sequence
atggctgggcaaggactcccacttcacgtagcaaccttgctcaccggattgcttgagtgcttaggatttgcgggagtcctcttcggatggccatcccttgtgttcgtctttaaaaatgaggactattttaaggatctgtgcgggcctgacgctggacccattggaaacgccaccggacaggcagactgtaaagcacaagatgaacggttctcactgatctttacccttggaagctttatgaataactttatgacatttccaacaggctatatttttgataggttcaagacgaccgtggccagactgatcgcaattttcttctacaccaccgctacacttatcattgcattcacctcctag

SEQ ID NO: 178081 - DNA, 1476 bp, Artificial Sequence
  derived and/or modified sequence
atggccggtcaaggacttccactccacgtcgccaccctcctaacagggctcctggaatgtttgggtttcgcaggagtactgttcggttggccttctctcgtctttgttttcaaaaacgaggactacttcaaagatctctgtgggcctgacgcgggacctatagggaacgccacaggccaggccgactgtaaggcacaggacgagagattctccctcatttttaccctgggttcctttatgaataatttcatgacctttccgaccggctatatatttgatcgcttcaaaacaaccgtggctaggctgatagcaatttttttttatacaaccgcgaccctgattatagccttcacatctgctggatctgccgtactgctcttcctagccatgccaatgctgaccatcggtggtattctgttcctgattacgaacctccagattggaaacttgtttgggcagcacaggtcaaccattataactctatataatggtgcgtttgacagttctagcgctgtatttctcattattaagctgctctatgaaaagggaatctctctccgtgcctcctttatcttcatcagcgtttgctccacttggcacgtggcccgaactttcctgctgatgccccgtggccacattccctaccctctcccccctaactatagctacggcctgtgccccggaaatggaaccacaaaggaggagaaagagacagccgagcatgaaaatagggaactccagagcaaggaatttctatccgcgaaagaagaaacgcctggagccggacagaagcaagaactcagaagtttttggagctacgctttttcacgccgttttgcgtggcacctggtgtggctgtcagtcattcagctgtggcactacctgttcattggtaccttgaacagtttgcttactaatatggccggaggcgacatggcaagagtgtccacatatacaaatgcctttgcattcacccagttcggtgtcttatgtgcaccatggaacggattgcttatggataggctgaagcagaagtaccagaaggaggctagaaaaactggcagcagcacactggccgtggccctgtgctccacagtaccatcgttagctctgacttcccttttgtgtctcggctttgctctgtgcgcctccgtccctattctcccgctacaatacctaaccttcatacttcaggtaatctcacgctccttcctgtacggctctaacgccgctttcctcacgctggcattccctagcgaacatttcggcaagctatttggcctcgtcatggcactgtcagcagtggttagcctactgcagtttcctattttcacactaataaagggtagcctacagaacgatcctttctatgtgaatgttatgtttatgcttgctatcctgctcacattttttcacccttttttggtttatcgcgaatgcaggacatggaaagaatccccgtcggccattgcatag

SEQ ID NO: 178082 - DNA, 996 bp, Artificial Sequence
  derived and/or modified sequence
atggcgggacagggccttccgctgcacgtggcgaccctgctcactgggctactggagtgcctgggcttcgcaggagtcctgttcggatggcctagtttggtttttgtatttaaaaatgaagactatttcaaggacctgtgtggcccagacgcaggacctataggtaacgctacaggacaggccgattgcaaggcccaggatgagagattttctctgatatttactctcgggtcgtttatgaataactttatgaccttcccaacaggatacatctttgatcggtttaaaaccaccgttgccaggttgatcgccatttttttctataccacagcaaccctcattatcgctttcaccagcgctgggtcagcagttctgcttttccttgcaatgcccatgctgaccattggcggaattctcttcctgattacaaacctgcaaatcgggaacctgtttggtcaacacagaagtaccattataacactctacaacggggcatttgactcatcctctgcagtgtttttgataatcaagttactatatgagaaaggcatttctttgcgcgcttcattcatatttattagtgtctgtagtacctggcatgtcgccagaacttttctgctcatgcctcgcggacacattccttaccccttgcccccaaactattcctacgggctctgtcccggtaacggcactacgaaggaagagaaggagacagccgagcatgagaatcgcgagctgcagtctaaggaattcctctctgcaaaagaggagacgcccggagcaggacaaaaacaagagcttcgatcattctggagttatgccttttcacggcgattcgcctggcacctggtctggctcagtgttatccagctctggcattacctgttcattggcacattgaactctctgctgaccaacatggcaggcggtgatatggccagggtctcaacatacactaatgccttcgccttcacccagttcggcgtgctgtgttag

SEQ ID NO: 178083 - DNA, 135 bp, Artificial Sequence
  derived and/or modified sequence
atggcaggccaggggctaccccttcatgtagcaacacttcttactggactgcttgagtgcctaggctttgcaggagtcctgttcggatggccttctctggtgtttgtttttaagaacgaagattacttcaaatag

SEQ ID NO: 178084 - DNA, 297 bp, Artificial Sequence
  derived and/or modified sequence
atggccggtcagggccttcctttgcacgtggcgactctgctgactggactgctggaatgtctgggcttcgctggggtgctgtttggctggccatcacttgtgtttgtcttcaagaacgaggattactttaaagatctttgcggcccagatgctggaccaattggtaacgcgactggacaagccgactgtaaggcgcaggatgagagattcagtctcatctttaccctgggttcttttatgaataattttatgacgttccctactggctatattttcgaccggtttaaaaccacatag

SEQ ID NO: 178085 - DNA, 237 bp, Artificial Sequence
  derived and/or modified sequence
atggccggtcaaggcttgcccttgcacgtggcaaccctgctgaccggattgctcgaatgtcttggctttgccggagttctgttcgggtggccttcgctagtgttcgtattcaaaaacgaagactacttcaaggatttatgtgggcctgacgcgggtcccatcgggaacgccacaggacaagctgattgcaaagcacaggatgagcgcttcagcttaatttttaccctcggtagttag

SEQ ID NO: 178086 - DNA, 324 bp, Artificial Sequence
  derived and/or modified sequence
atggcgggacaggggttgccgttacatgtggccaccctgctcacaggattgctggagtgcctgggattcgcaggcgtgctcttcgggtggccttccctggtatttgtcttcaagaacgaggattatttcaaggacctttgcggacctgacgctggcccaattgggaacgctacaggtcaggccgattgcaaagcacaggatgaaaggttttctttgatctttaccttaggctcttttatgaataattttatgacctttcctaccgggtatattttcgacagattcaagaccactgtggctcgccttattgccatctttttttag

SEQ ID NO: 178087 - DNA, 333 bp, Artificial Sequence
  derived and/or modified sequence
atggctggccagggccttcctctgcatgtagctacactcctgacagggctcctggagtgtctgggtttcgccggagttctttttggatggcctagcctcgtcttcgtgttcaagaacgaggattactttaaagacctgtgcggacccgacgccggtccaatcggcaatgccaccggccaggcagattgcaaagctcaggacgaacgcttctctctgatcttcaccctgggtagcttcatgaataactttatgacctttccgaccggctacattttcgacaggtttaagactaccgtcgcacgtctcattgcgatctttttttacactacctag

SEQ ID NO: 178088 - DNA, 2595 bp, Artificial Sequence
  derived and/or modified sequence
gctctgggagtgtgaaactgggagagacggttaagctggggacggtattcagaattcgagcgcaggagctccgcttctccacctgctcccggggagctattgggatccagagaatcacccgctgatggtttttgcccaggcctgaaacaaccagagagctacgggaaaggaagggcttggcttgccagaggaattttccaagtgctcaaacgccaggcttacggcgcctgtgatccgtccaggaggacaaagtgggatttgaagatccactccacttctgctcatggcgggccagggcctgcccctgcacgtggccacactgctgactgggctgctggaatgcctgggctttgctggcgtcctctttggctggccttcactagtgtttgtcttcaagaatgaagattactttaaggatctgtgtggaccagatgctgggccgattggcaatgccacagggcaggctgactgcaaagcccaggatgagaggttctcactcatcttcaccctggggtccttcatgaacaacttcatgacattccccactggctacatctttgaccggttcaagaccaccgtggcacgcctcatagccatatttttctacaccaccgccacactcatcatagccttcacctctgcaggctcagccgtgctgctcttcctggccatgccaatgctcaccattgggggaatcctgtttctcatcaccaacctgcagattgggaacctatttggccaacaccgttcgaccatcatcactctgtacaatggagcatttgactcttcctcggcagtcttccttattattaagcttctttatgaaaaaggcatcagcctcagggcctccttcatcttcatctctgtctgcagtacctggcatgtagcacgcactttcctcctgatgccccgggggcacatcccatacccactgccccccaactacagctatggcctgtgccctgggaatggcaccacaaaggaagagaaggaaacagctgagcatgaaaacagggagctacagtcaaaggagttcctttcagcgaaggaagagaccccaggggcagggcagaagcaggaactccgctccttctggagctacgctttctctcggcgctttgcctggcacctggtgtggctgtctgtgatacagttgtggcactacctcttcattggcactctcaactccttgctgaccaacatggccggtggggacatggcacgagtcagcacctacacaaatgcctttgccttcactcagttcggagtgctgtgtgccccctggaatggcctgctcatggaccggcttaaacagaagtaccagaaggaagcaagaaagacaggttcctccactttggcggtggccctctgctcgacggtgccttcgctggccctgacatccctgctgtgcctgggcttcgccctctgtgcctcagtccccatcctccctctccagtacctcaccttcatcctgcaagtgatcagccgctccttcctctatgggagcaacgcggccttcctcacccttgctttcccttcagagcactttggcaagctctttgggctggtgatggccttgtcggctgtggtgtctctgctccagttccccatcttcaccctcatcaaaggctcccttcagaatgacccattttacgtgaatgtgatgttcatgcttgccattcttctgacattcttccacccctttctggtatatcgggaatgccgtacttggaaagaaagtccctctgcaattgcatagttcagaagccctcacttttcagccccgaggatggttttgttcatcttccaccacctttgaggacctcgtgtcccaaaagactttgcctatcccagcaaaacacacacacacacacacacacacacaaaataaagacacacaaggacgtctgcgcagcaagaaaagaatctcagttgccaagcagattgatatcacacagactcaaagcaaaggcatgtggaacttctttatttcaaaacagaagtgtctccttgcacttagccttggcagacccttgactccaggggagatgacctgggggaggaagtgtgtcaactatttctttaggcctgtttggctccgaagcctatatgtgcctggatcctctgccacgggttaaattttcaggtgaagagtgaggttgtcatggcctcagctatgcttcctggctctccctcaagagtgcagccttggctagagaactcacagctctgggaaaaagaggagcagacagggttccctgggcccagtctcagcccagccactgatgctggatgaccttggcctgaccctggtctggtctcagaatcacttttcccatctgtaaaattgagatgaattttggtgttgaaagttcttcctggagcagatgtcctagaaggttttaggaatagtgacagagtcaggccaccccaagggccatgggagccagctgacctgcttgaccgaaggatttctgacagactatctttggggatgttttcaagaagggatataagttatttactttgggcatttaaaagaaaatttctctcgggaataattttatagaaaaataaagcttctgtgtctaaggc

SEQ ID NO: 178089 - DNA, 2619 bp, Artificial Sequence
  derived and/or modified sequence
gagcggcccccggaggctttcctggtagaagttgatgcgaggaagggcggcggggaccaggggacggtattcagaattcgagcgcaggagctccgcttctccacctgctcccggggagctattgggatccagagaatcacccgctgatggtttttgcccaggcctgaaacaaccagagagctacgggaaaggaagggcttggcttgccagaggaattttccaagtgctcaaacgccaggcttacggcgcctgtgatccgtccaggaggacaaagtgggatttgaagatccactccacttctgctcatggcgggccagggcctgcccctgcacgtggccacactgctgactgggctgctggaatgcctgggctttgctggcgtcctctttggctggccttcactagtgtttgtcttcaagaatgaagattactttaaggatctgtgtggaccagatgctgggccgattggcaatgccacagggcaggctgactgcaaagcccaggatgagaggttctcactcatcttcaccctggggtccttcatgaacaacttcatgacattccccactggctacatctttgaccggttcaagaccaccgtggcacgcctcatagccatatttttctacaccaccgccacactcatcatagccttcacctctgcaggctcagccgtgctgctcttcctggccatgccaatgctcaccattgggggaatcctgtttctcatcaccaacctgcagattgggaacctatttggccaacaccgttcgaccatcatcactctgtacaatggagcatttgactcttcctcggcagtcttccttattattaagcttctttatgaaaaaggcatcagcctcagggcctccttcatcttcatctctgtctgcagtacctggcatgtagcacgcactttcctcctgatgccccgggggcacatcccatacccactgccccccaactacagctatggcctgtgccctgggaatggcaccacaaaggaagagaaggaaacagctgagcatgaaaacagggagctacagtcaaaggagttcctttcagcgaaggaagagaccccaggggcagggcagaagcaggaactccgctccttctggagctacgctttctctcggcgctttgcctggcacctggtgtggctgtctgtgatacagttgtggcactacctcttcattggcactctcaactccttgctgaccaacatggccggtggggacatggcacgagtcagcacctacacaaatgcctttgccttcactcagttcggagtgctgtgtgccccctggaatggcctgctcatggaccggcttaaacagaagtaccagaaggaagcaagaaagacaggttcctccactttggcggtggccctctgctcgacggtgccttcgctggccctgacatccctgctgtgcctgggcttcgccctctgtgcctcagtccccatcctccctctccagtacctcaccttcatcctgcaagtgatcagccgctccttcctctatgggagcaacgcggccttcctcacccttgctttcccttcagagcactttggcaagctctttgggctggtgatggccttgtcggctgtggtgtctctgctccagttccccatcttcaccctcatcaaaggctcccttcagaatgacccattttacgtgaatgtgatgttcatgcttgccattcttctgacattcttccacccctttctggtatatcgggaatgccgtacttggaaagaaagtccctctgcaattgcatagttcagaagccctcacttttcagccccgaggatggttttgttcatcttccaccacctttgaggacctcgtgtcccaaaagactttgcctatcccagcaaaacacacacacacacacacacacacacaaaataaagacacacaaggacgtctgcgcagcaagaaaagaatctcagttgccaagcagattgatatcacacagactcaaagcaaaggcatgtggaacttctttatttcaaaacagaagtgtctccttgcacttagccttggcagacccttgactccaggggagatgacctgggggaggaagtgtgtcaactatttctttaggcctgtttggctccgaagcctatatgtgcctggatcctctgccacgggttaaattttcaggtgaagagtgaggttgtcatggcctcagctatgcttcctggctctccctcaagagtgcagccttggctagagaactcacagctctgggaaaaagaggagcagacagggttccctgggcccagtctcagcccagccactgatgctggatgaccttggcctgaccctggtctggtctcagaatcacttttcccatctgtaaaattgagatgaattttggtgttgaaagttcttcctggagcagatgtcctagaaggttttaggaatagtgacagagtcaggccaccccaagggccatgggagccagctgacctgcttgaccgaaggatttctgacagactatctttggggatgttttcaagaagggatataagttatttactttgggcatttaaaagaaaatttctctcgggaataattttatagaaaaataaagcttctgtgtctaaggcaa

SEQ ID NO: 178090 - DNA, 2617 bp, Artificial Sequence
  derived and/or modified sequence
gcgaatgcgaacctggcccgtgcggaaagggcgcggagagccccggcgcggagcaggcgggggacggtattcagaattcgagcgcaggagctccgcttctccacctgctcccggggagctattgggatccagagaatcacccgctgatggtttttgcccaggcctgaaacaaccagagagctacgggaaaggaagggcttggcttgccagaggaattttccaagtgctcaaacgccaggcttacggcgcctgtgatccgtccaggaggacaaagtgggatttgaagatccactccacttctgctcatggcgggccagggcctgcccctgcacgtggccacactgctgactgggctgctggaatgcctgggctttgctggcgtcctctttggctggccttcactagtgtttgtcttcaagaatgaagattactttaaggatctgtgtggaccagatgctgggccgattggcaatgccacagggcaggctgactgcaaagcccaggatgagaggttctcactcatcttcaccctggggtccttcatgaacaacttcatgacattccccactggctacatctttgaccggttcaagaccaccgtggcacgcctcatagccatatttttctacaccaccgccacactcatcatagccttcacctctgcaggctcagccgtgctgctcttcctggccatgccaatgctcaccattgggggaatcctgtttctcatcaccaacctgcagattgggaacctatttggccaacaccgttcgaccatcatcactctgtacaatggagcatttgactcttcctcggcagtcttccttattattaagcttctttatgaaaaaggcatcagcctcagggcctccttcatcttcatctctgtctgcagtacctggcatgtagcacgcactttcctcctgatgccccgggggcacatcccatacccactgccccccaactacagctatggcctgtgccctgggaatggcaccacaaaggaagagaaggaaacagctgagcatgaaaacagggagctacagtcaaaggagttcctttcagcgaaggaagagaccccaggggcagggcagaagcaggaactccgctccttctggagctacgctttctctcggcgctttgcctggcacctggtgtggctgtctgtgatacagttgtggcactacctcttcattggcactctcaactccttgctgaccaacatggccggtggggacatggcacgagtcagcacctacacaaatgcctttgccttcactcagttcggagtgctgtgtgccccctggaatggcctgctcatggaccggcttaaacagaagtaccagaaggaagcaagaaagacaggttcctccactttggcggtggccctctgctcgacggtgccttcgctggccctgacatccctgctgtgcctgggcttcgccctctgtgcctcagtccccatcctccctctccagtacctcaccttcatcctgcaagtgatcagccgctccttcctctatgggagcaacgcggccttcctcacccttgctttcccttcagagcactttggcaagctctttgggctggtgatggccttgtcggctgtggtgtctctgctccagttccccatcttcaccctcatcaaaggctcccttcagaatgacccattttacgtgaatgtgatgttcatgcttgccattcttctgacattcttccacccctttctggtatatcgggaatgccgtacttggaaagaaagtccctctgcaattgcatagttcagaagccctcacttttcagccccgaggatggttttgttcatcttccaccacctttgaggacctcgtgtcccaaaagactttgcctatcccagcaaaacacacacacacacacacacacacacaaaataaagacacacaaggacgtctgcgcagcaagaaaagaatctcagttgccaagcagattgatatcacacagactcaaagcaaaggcatgtggaacttctttatttcaaaacagaagtgtctccttgcacttagccttggcagacccttgactccaggggagatgacctgggggaggaagtgtgtcaactatttctttaggcctgtttggctccgaagcctatatgtgcctggatcctctgccacgggttaaattttcaggtgaagagtgaggttgtcatggcctcagctatgcttcctggctctccctcaagagtgcagccttggctagagaactcacagctctgggaaaaagaggagcagacagggttccctgggcccagtctcagcccagccactgatgctggatgaccttggcctgaccctggtctggtctcagaatcacttttcccatctgtaaaattgagatgaattttggtgttgaaagttcttcctggagcagatgtcctagaaggttttaggaatagtgacagagtcaggccaccccaagggccatgggagccagctgacctgcttgaccgaaggatttctgacagactatctttggggatgttttcaagaagggatataagttatttactttgggcatttaaaagaaaatttctctcgggaataattttatagaaaaataaagcttctgtgtctaaggc

SEQ ID NO: 178091 - DNA, 539 bp, Artificial Sequence
  derived and/or modified sequence
gcgaacctggcccgtgcggaaagggcgcggagagccccggcgcggagcaggcgggatccagagaatcacccgctgatggtttttgcccaggcctgaaacaaccagagagctacgggaaaggaagggcttggcttgccagaggaattttccaagtgctcaaacgccaggcttacggcgcctgtgatccgtccaggaggacaaagtgggatttgaagatccactccacttctgctcatggcgggccagggcctgcccctgcacgtggccacactgctgactgggctgctggaatgcctgggctttgctggcgtcctctttggctggccttcactagtgtttgtcttcaagaatgaagattactttaaggatctgtgtggaccagatgctgggccgattggcaatgccacagggcaggctgactgcaaagcccaggatgagaggttctcactcatcttcaccctggggtccttcatgaacaacttcatgacattccccactggctacatctttgaccggttcaagaccaccgtggcacgcct

SEQ ID NO: 178092 - DNA, 801 bp, Artificial Sequence
  derived and/or modified sequence
acattttccctaggtgggcctgagcgagtaacagcattcaactaacttggggacggtattcagaattcgagcgcaggagctccgcttctccacctgctcccggggagctattgggatccagagaatcacccgctgatggtttttgcccaggcctgaaacaaccagagagctacgggaaaggaagggcttggcttgccagaggaattttccaagtgctcaaacgccaggcttacggcgcctgtgatccgtccaggaggacaaagtgggatttgaagatccactccacttctgctcatggcgggccagggcctgcccctgcacgtggccacactgctgactgggctgctggaatgcctgggctttgctggcgtcctctttggctggccttcactagtgtttgtcttcaagaatgaagattactttaaggatctgtgtggaccagatgctgggccgattggcaatgccacagggcaggctgactgcaaagcccaggatgagaggttctcactcatcttcaccctggggtccttcatgaacaacttcatgacattccccactggctacatctttgaccggttcaagaccaccgtggcacgcctcatagccatatttttctacaccaccgccacactcatcatagccttcacctctgcaggctcagccgtgctgctcttcctggccatgccaatgctcaccattgggggaatcctgtttctcatcaccaacctgcagattgggaacctatttggccaacaccgttcgaccatcatcactctgtacaatggagcatttgactcttcc

SEQ ID NO: 178093 - DNA, 653 bp, Artificial Sequence
  derived and/or modified sequence
gggacggtattcagaattcgagcgcaggagctccgcttctccacctgctcccggggagctattgggcctgaaacaaccagagagctacgggaaaggaagggcttggcttgccagaggaattttccaagtgctcaaacgccaggcttacggcgcctgtgatccgtccaggaggacaaagtgggatttgaagatccactccacttctgctcatggcgggccagggcctgcccctgcacgtggccacactgctgactgggctgctggaatgcctgggctttgctggcgtcctctttggctggccttcactagtgtttgtcttcaagaatgaagattactttaaggatctgtgtggaccagatgctgggccgattggcaatgccacagggcaggctgactgcaaagcccaggatgagaggttctcactcatcttcaccctggggtccttcatgaacaacttcatgacattccccactggctacatctttgaccggttcaagaccaccgtggcacgcctcatagccatatttttctacaccaccgccacactcatcatagccttcacctctgcaggctcagccgtgctgctcttcctggccatgccaatgctcaccattgggggaatcctgtttctcatcaccaacctgcagattggg

SEQ ID NO: 178094 - DNA, 560 bp, Artificial Sequence
  derived and/or modified sequence
gaatgcgaacctggcccgtgcggaaagggcgcggagagccccggcgcggagcaggcgggcctgaaacaaccagagagctacgggaaaggaagggcttggcttgccagaggaattttccaagtgctcaaacgccaggcttacggcgcctgtgatccgtccaggaggacaaagtgggatttgaagatccactccacttctgctcatggcgggccagggcctgcccctgcacgtggccacactgctgactgggctgctggaatgcctgggctttgctggcgtcctctttggctggccttcactagtgtttgtcttcaagaatgaagattactttaaggatctgtgtggaccagatgctgggccgattggcaatgccacagggcaggctgactgcaaagcccaggatgagaggttctcactcatcttcaccctggggtccttcatgaacaacttcatgacattccccactggctacatctttgaccggttcaagaccaccgtggcacgcctcatagccatatttttctacaccaccgccacactcatcatagccttcacctctg

SEQ ID NO: 178095 - DNA, 2207 bp, Artificial Sequence
  derived and/or modified sequence
agtaaactgaagataacaccaacttggcagcgggagtttgtgtcttctgtatgaaatctccctgcctctgcacctggttgagttgctgtcattattttaggggacggtattcagaattcgagcgcaggagctccgcttctccacctgctcccggggagctattgggatccagagaatcacccgctgatggtttttgcccaggcctgaaacaaccagagagctacgggaaaggaagggcttggcttgccagaggaattttccaagtgctcaaacgccaggcttacggcgcctgtgatccgtccaggaggacaaagtgggatttgaagatccactccacttctgctcatggcgggccagggcctgcccctgcacgtggccacactgctgactgggctgctggaatgcctgggctttgctggcgtcctctttggctggccttcactagtgtttgtcttcaagaatgaagattactttaaggatctgtgtggaccagatgctgggccgattggcaatgccacagggcaggctgactgcaaagcccaggatgagaggttctcactcatcttcaccctggggtccttcatgaacaacttcatgacattccccactggctacatctttgaccggttcaagaccaccgtggcacgcctcatagccatatttttctacaccaccgccacactcatcatagccttcacctctgcaggctcagccgtgctgctcttcctggccatgccaatgctcaccattgggggaatcctgtttctcatcaccaacctgcagattgggaacctatttggccaacaccgttcgaccatcatcactctgtacaatggagcatttgactcttcctcggcagtcttccttattattaagcttctttatgaaaaaggcatcagcctcagggcctccttcatcttcatctctgtctgcagtacctggcatgtagcacgcactttcctcctgatgccccgggggcacatcccatacccactgccccccaactacagctatggcctgtgccctgggaatggcaccacaaaggaagagaaggaaacagctgagcatgaaaacagggagctacagtcaaaggagttcctttcagcgaaggaagagaccccaggggcagggcagaagcaggaactccgctccttctggagctacgctttctctcggcgctttgcctggcacctggtgtggctgtctgtgatacagttgtggcactacctcttcattggcactctcaactccttgctgaccaacatggccggtggggacatggcacgagtcagcacctacacaaatgcctttgccttcactcagttcggagtgctgtgtgccccctggaatggcctgctcatggaccggcttaaacagaagtaccagaaggaagcaagaaagacaggttcctccactttggcggtggccctctgctcgacggtgccttcgctggccctgacatccctgctgtgcctgggcttcgccctctgtgcctcagtccccatcctccctctccagtacctcaccttcatcctgcaagtgatcagccgctccttcctctatgggagcaacgcggccttcctcacccttgctttcccttcagagcactttggcaagctctttgggctggtgatggccttgtcggctgtggtgtctctgctccagttccccatcttcaccctcatcaaaggctcccttcagaatgacccattttacgtgaatgtgatgttcatgcttgccattcttctgacattcttccacccctttctggtatatcgggaatgccgtacttggaaagaaagtccctctgcaattgcatagttcagaagccctcacttttcagccccgaggatggttttgttcatcttccaccacctttgaggacctcgtgtcccaaaagactttgcctatcccagcaaaacacacacacacacacacacacacacaaaataaagacacacaaggacgtctgcgcagcaagaaaagaatctcagttgccaagcagattgatatcacacagactcaaagcaaaggcatgtggaacttctttatttcaaaacagaagtgtctccttgcacttagccttggcagacccttgactccaggggagatgacctgggggaggaagtgtgtcaactatttctttaggcctgtttggctccgaagcctatatgtgcctggatcctctgccacgggttaaattttca

SEQ ID NO: 178096 - DNA, 397 bp, Artificial Sequence
  derived and/or modified sequence
gggaggctgaaaggcagcgaggagggagggaaagacaccgctggggttctagggggttctagagggagaagtttcaagagggagaggggacggtattcagaattcgagcgcaggagctccgcttctccacctgctcccggggagctattgggatccagagaatcacccgctgatggtttttgcccaggcctgaaacaaccagagagctacgggaaaggaagggcttggcttgccagaggaattttccaagtgctcaaacgccaggcttacggcgcctgtgatccgtccaggaggacaaagtgggatttgaagatccactccacttctgctcatggcgggccagggcctgcccctgcacgtggccacactgctgactgggctgctggaatgcctgggc

SEQ ID NO: 178097 - DNA, 1434 bp, Artificial Sequence
  derived and/or modified sequence
tttcgggcgccatggggcgccgagcgcggcctggcccctcgggctcctctgcggggagggcaggccgcaggctggagcggggtgcggaggctggcggggagcggcccccggaggctttcctggtagaagttgatgcgaggaagggcggcggggaccaggggacggtattcagaattcgagcgcaggagctccgcttctccacctgctcccggggagctattgggcctcctcttccagcagcctctatctttattctacaggatccagagaatcacccgctgatggtttttgcccaggcctgaaacaaccagagagctacgggaaaggaagggcttggcttgccagaggaattttccaagtgctcaaacgccaggcttacggcgcctgtgatccgtccaggaggacaaagtgggatttgaagatccactccacttctgctcatggcgggccagggcctgcccctgcacgtggccacactgctgactgggctgctggaatgcctgggctttgctggcgtcctctttggctggccttcactagtgtttgtcttcaagaatgaagattactttaaggatctgtgtggaccagatgctgggccgattggcaatgccacagggcaggctgactgcaaagcccaggatgagaggttctcactcatcttcaccctggggtccttcatgaacaacttcatgacattccccactggctacatctttgaccggttcaagaccaccgtggcacgcctcatagccatatttttctacaccaccgccacactcatcatagccttcacctctgcaggctcagccgtgctgctcttcctggccatgccaatgctcaccattgggggaatcctgtttctcatcaccaacctgcagattgggaacctatttggccaacaccgttcgaccatcatcactctgtacaatggagcatttgactcttcctcggcagtcttccttattattaagcttctttatgaaaaaggcatcagcctcagggcctccttcatcttcatctctgtctgcagtacctggcatgtagcacgcactttcctcctgatgccccgggggcacatcccatacccactgccccccaactacagctatggcctgtgccctgggaatggcaccacaaaggaagagaaggaaacagctgagcatgaaaacagggagctacagtcaaaggagttcctttcagcgaaggaagagaccccaggggcagggcagaagcaggaactccgctccttctggagctacgctttctctcggcgctttgcctggcacctggtgtggctgtctgtgatacagttgtggcactacctcttcattggcactctcaactccttgctgaccaacatggccggtggggacatggcacgagtcagcacctacacaaatgcctttgccttcactcagttcggagtgctgtgtg

SEQ ID NO: 178098 - DNA, 573 bp, Artificial Sequence
  derived and/or modified sequence
gcgaatgcgaacctggcccgtgcggaaagggcgcggagagccccggcgcggagcaggcggtaaactgaagataacaccaacttggcagcgggagtttgtgtcttctgtatgaaatctccctgcctctgcacctggttgagttgctgtcattattttaggggacggtattcagaattcgagcgcaggagctccgcttctccacctgctcccggggagctattgggcctcctcttccagcagcctctatctttattctacaggatccagagaatcacccgctgatggtttttgcccaggcctgaaacaaccagagagctacgggaaaggaagggcttggcttgccagaggaattttccaagtgctcaaacgccaggcttacggcgcctgtgatccgtccaggaggacaaagtgggatttgaagatccactccacttctgctcatggcgggccagggcctgcccctgcacgtggccacactgctgactgggctgctggaatgcctgggctttgctggcgtcctctttggctggccttcactagtgtttgtcttcaagaatgaagattactttaagg

SEQ ID NO: 178099 - DNA, 587 bp, Artificial Sequence
  derived and/or modified sequence
atgtgctgtctgtgtgtcctctgggtgctgggtgtgacattttccctaggggacggtattcagaattcgagcgcaggagctccgcttctccacctgctcccggggagctattgggatccagagaatcacccgctgatggtttttgcccaggcctgaaacaaccagagagctacgggaaaggaagggcttggcttgccagaggaattttccaagtgctcaaacgccaggcttacggcgcctgtgatccgtccaggaggacaaagtgggatttgaagatccactccacttctgctcatggcgggccagggcctgcccctgcacgtggccacactgctgactgggctgctggaatgcctgggctttgctggcgtcctctttggctggccttcactagtgtttgtcttcaagaatgaagattactttaaggatctgtgtggaccagatgctgggccgattggcaatgccacagggcaggctgactgcaaagcccaggatgagaggttctcactcatcttcaccctggggtccttcatgaacaacttcatgacattccccactggctacatctttgaccggttcaagaccac

SEQ ID NO: 178100 - DNA, 571 bp, Artificial Sequence
  derived and/or modified sequence
gcgaacctggcccgtgcggaaagggcgcggagagccccggcgcggagcaggcgggggacggtattcagaattcgagcgcaggagctccgcttctccacctgctcccggggagctattgggcctcctcttccagcagcctctatctttattctacaggatccagagaatcacccgctgatggtttttgcccaggcctgaaacaaccagagagctacgggaaaggaagggcttggcttgccagaggaattttccaagtgctcaaacgccaggcttacggcgcctgtgatccgtccaggaggacaaagtgggatttgaagatccactccacttctgctcatggcgggccagggcctgcccctgcacgtggccacactgctgactgggctgctggaatgcctgggctttgctggcgtcctctttggctggccttcactagtgtttgtcttcaagaatgaagattactttaaggatctgtgtggaccagatgctgggccgattggcaatgccacagggcaggctgactgcaaagcccaggatgagaggttctcactcatcttcaccctggggtcct

SEQ ID NO: 178101 - DNA, 581 bp, Artificial Sequence
  derived and/or modified sequence
aaatagagtgtgtgtgtccctatgccctcatgtgctgtctgtgtgtcctctgggtgctgggtgtgacattttccctaggatccagagaatcacccgctgatggtttttgcccaggcctgaaacaaccagagagctacgggaaaggaagggcttggcttgccagaggaattttccaagtgctcaaacgccaggcttacggcgcctgtgatccgtccaggaggacaaagtgggatttgaagatccactccacttctgctcatggcgggccagggcctgcccctgcacgtggccacactgctgactgggctgctggaatgcctgggctttgctggcgtcctctttggctggccttcactagtgtttgtcttcaagaatgaagattactttaaggatctgtgtggaccagatgctgggccgattggcaatgccacagggcaggctgactgcaaagcccaggatgagaggttctcactcatcttcaccctggggtccttcatgaacaacttcatgacattccccactggctacatctttgaccggttcaagaccaccgtggcacgcctcatagccatatttttcta

SEQ ID NO: 178102 - DNA, 589 bp, Artificial Sequence
  derived and/or modified sequence
gcgaatgcgaacctggcccgtgcggaaagggcgcggagagccccggcgcggagcaggcggcctctatctttattctacaggatccagagaatcacccgctgatggtttttgcccaggcctgaaacaaccagagagctacgggaaaggaagggcttggcttgccagaggaattttccaagtgctcaaacgccaggcttacggcgcctgtgatccgtccaggaggacaaagtgggatttgaagatccactccacttctgctcatggcgggccagggcctgcccctgcacgtggccacactgctgactgggctgctggaatgcctgggctttgctggcgtcctctttggctggccttcactagtgtttgtcttcaagaatgaagattactttaaggatctgtgtggaccagatgctgggccgattggcaatgccacagggcaggctgactgcaaagcccaggatgagaggttctcactcatcttcaccctggggtccttcatgaacaacttcatgacattccccactggctacatctttgaccggttcaagaccaccgtggcacgcctcatagccatatttttctacaccac

SEQ ID NO: 178103 - protein, 1390 aa, Artificial Sequence
  derived and/or modified sequence
MVVLRSSLELHNHSAASATGSLDLSSDFLSLEHIGRRRLRSAGAAQKKPAATTAKAGDGSSVKEVETYHRTRALRSLRKDAQNSSDSSFEKNVEITEQLANGRHFTRQLARQQADKKKEEHREDKVIPVTRSLRARNIVQSTEHLHEDNGDVEVRRSCRIRSRYSGVNQSMLFDKLITNTAEAVLQKMDDMKKMRRQRMRELEDLGVFNETEESNLNMYTRGKQKDIQRTDEETTDNQEGSVESSEEGEDQEHEDDGEDEDDEDDDDDDDDDDDDDDEDDEDEEDGEEENQKRYYLRQRKATVYYQAPLEKPRHQRKPNIFYSGPASPARPRYRLSSAGPRSPYCKRMNRRRHAIHSSDSTSSSSSEDEQHFERRRKRSRNRAINRCLPLNFRKDELKGIYKDRMKIGASLADVDPMQLDSSVRFDSVGGLSNHIAALKEMVVFPLLYPEVFEKFKIQPPRGCLFYGPPGTGKTLVARALANECSQGDKRVAFFMRKGADCLSKWVGESERQLRLLFDQAYQMRPSIIFFDEIDGLAPVRSSRQDQIHSSIVSTLLALMDGLDSRGEIVVIGATNRLDSIDPALRRPGRFDREFLFSLPDKEARKEILKIHTRDWNPKPLDTFLEELAENCVGYCGADIKSICAEAALCALRRRYPQIYTTSEKLQLDLSSINISAKDFEVAMQKMIPASQRAVTSPGQALSTVVKPLLQNTVDKILEALQRVFPHAEFRTNKTLDSDISCPLLESDLAYSDDDVPSVYENGLSQKSSHKAKDNFNFLHLNRNACYQPMSFRPRILIVGEPGFGQGSHLAPAVIHALEKFTVYTLDIPVLFGVSTTSPEETCAQVIREAKRTAPSIVYVPHIHVWWEIVGPTLKATFTTLLQNIPSFAPVLLLATSDKPHSALPEEVQELFIRDYGEIFNVQLPDKEERTKFFEDLILKQAAKPPISKKKAVLQALEVLPVAPPPEPRSLTAEEVKRLEEQEEDTFRELRIFLRNVTHRLAIDKRFRVFTKPVDPDEVPDYVTVIKQPMDLSSVISKIDLHKYLTVKDYLRDIDLICSNALEYNPDRDPGDRLIRHRACALRDTAYAIIKEELDEDFEQLCEEIQESRKKRGCSSSKYAPSYYHVMPKQNSTLVGDKRSDPEQNEKLKTPSTPVACSTPAQLKRKIRKKSNWYLGTIKKRRKISQAKDDSQNAIDHKIESDTEETQDTSVDHNETGNTGESSVEENEKQQNASESKLELRNNSNTCNIENELEDSRKTTACTELRDKIACNGDASSSQIIHISDENEGKEMCVLRMTRARRSQVEQQQLITVEKALAILSQPTPSLVVDHERLKNLLKTVVKKSQNYNIFQLENLYAVISQCIYRHRKDHDKTSLIQKMEQEVENFSCSR

SEQ ID NO: 178104 - DNA, 4173 bp, Artificial Sequence
  derived and/or modified sequence
atggtagtgctgagatcatcacttgaactgcacaaccattcagccgcatcagctactggatccttggatctgtcttctgactttctctccctggaacatattggacgccgacggctccgcagcgccggcgccgcccagaagaagcccgccgcaacaactgctaaggcaggggacggcagcagcgttaaagaagtcgaaacctatcaccgaactcgggccctgcgtagcttgcgcaaggacgcgcagaatagttctgattctagctttgaaaagaacgtggagatcactgaacaactggccaacgggcggcactttacacgtcaactggcccggcaacaggctgacaaaaagaaagaggagcacagggaagacaaggtcattcccgtgacaaggtccttgcgagctaggaacatagtccagtctactgagcacctacacgaagacaacggtgatgtggaggtgcggcgtagctgtcgtatcagaagtagatacagtggcgtaaatcagagtatgttatttgataagcttattaccaataccgcagaggctgtgctccaaaagatggacgacatgaaaaaaatgagaagacagaggatgcgtgaacttgaggatttaggcgtctttaatgaaaccgaagaaagcaatctgaacatgtacactcggggaaaacagaaggatatacagcgcaccgacgaggagaccacagataaccaggaaggatccgtagagtctagcgaagaaggagaggaccaggagcacgaggatgacggtgaagacgaggatgatgaggatgacgatgacgatgatgacgacgatgacgacgacgatgacgaagacgatgaggacgaagaggatggcgaggaggagaatcagaagcgatactacctgcggcaacggaaagcgactgtctattatcaggctccgctggagaagccaagacaccaaagaaaacccaacatcttttactctggccccgcttctccagcacgaccccgttacaggctaagtagcgccgggccccgatccccgtactgcaaacgcatgaatcgtaggcggcacgccatccattccagtgatagcaccagtagcagctcctctgaggacgaacaacacttcgagcgcagacgtaaaagatcccgtaacagggccatcaaccgatgtttaccgttgaacttccgcaaggatgaattaaaaggaatctacaaagatcgtatgaaaattggcgctagtctggccgatgtcgatccgatgcaacttgattcttctgtgcgcttcgactccgtcggcggattgtccaaccatatcgcagcactgaaggagatggttgtgtttccgctgttatatcctgaggtgttcgagaagtttaaaattcagcccccgagaggctgcctgttctacgggccccccgggaccggcaaaaccctggtggcccgcgcgctggccaacgagtgctctcagggcgacaagagagtcgcattcttcatgagaaaaggcgctgactgtttgtccaagtgggtgggcgagagcgagcgacaactgcggctgctgttcgatcaggcgtaccaaatgagaccatccatcatctttttcgacgagatcgacggacttgcccctgtaaggtcatccaggcaggatcagattcactcttccattgtgagcactttgctcgcactgatggacggcttagactcacgcggtgagatagttgtgatcggcgccacaaatcgcctagacagtatcgatccagctttgagacgacctggacgattcgaccgagaattcttattctcgttgccggataaagaggcccggaaggagatccttaagatccatacacgtgattggaatccgaaacctctcgatacgtttctggaggagcttgcagagaattgcgtgggctactgtggggctgacatcaagtctatctgtgccgaggctgcactttgcgcgctgcgtcgccgatatcctcagatctataccacgtctgaaaagctgcagctcgacctatccagcatcaacatcagcgccaaagacttcgaagttgcgatgcagaaaatgatacctgccagccaacgcgccgtgacctcgccgggacaagccctgtccacagtcgtgaagcccttgctgcagaataccgtggacaaaattttagaggcattgcagcgtgtgtttccccacgctgagtttcggacgaataagacattggactctgacattagctgtccactcctggaatccgatttggcctactccgacgatgatgtacccagcgtgtacgagaatggactgtcacagaaaagttcccataaagctaaagacaatttcaacttcctgcacctaaacagaaatgcctgctaccagcccatgtcctttcgcccaaggatattgatcgtcggtgaaccaggatttggccaggggtcccacctggcccctgcggtcatccatgcattggaaaaattcaccgtgtacacgctggatatcccggtgcttttcggggtgtccacaacgtctcctgaagagacgtgcgctcaggtgatcagggaggccaagaggaccgctcctagcatagtttacgtgcctcatatccacgtttggtgggaaatcgttggcccaaccctgaaggctacgttcacgaccctcctccagaacataccatccttcgcgcctgtccttctcctggccacctcagataaaccacacagtgcccttcctgaggaagtgcaggaactcttcattcgggactatggtgagatctttaacgtccagttgccagataaggaggaaagaactaagttcttcgaggacctcatcctcaagcaagcagctaaaccaccaatatcaaagaaaaaggcggtgctccaggccttagaggtcctgccagtcgcacctcctccggaaccgcggtcactgactgccgaggaagttaagagactcgaggagcaggaagaggacacgtttagagagctgcggatctttctccgaaacgtcacccatcgactggctatagataagagattcagagttttcacgaagccagtagatcctgacgaagttcccgactacgtaaccgtcattaaacagcccatggacttatcttccgtgataagcaaaattgacctccataagtaccttacagttaaagactacctccgggatattgacctgatctgcagtaacgcgctggaatacaatccagatcgggatccaggggaccggctgattcgccatagagcttgtgcgctgcgcgacaccgcctatgccatcatcaaagaggagctggatgaggactttgagcagctgtgcgaggaaatccaggagtctcgaaagaagagaggctgttcttcaagcaaatacgccccttcatactaccatgtaatgcctaagcagaattcgacactcgtgggggacaagaggagcgaccctgagcagaacgaaaagttgaaaaccccaagcacaccagtcgcttgcagcacacccgcacagctgaaacgtaagattagaaaaaagagtaattggtatctcggaacaatcaagaagcgccgaaaaatttctcaggcaaaggatgacagtcaaaacgctatcgaccacaaaatagaatccgataccgaagaaacccaggacaccagcgtagaccataatgagacaggaaacaccggtgagtccagcgttgaagagaatgagaagcaacaaaatgcatctgaatcaaagctcgagttacggaacaattcaaacacttgtaatatcgaaaatgagcttgaggatagtcggaaaaccaccgcttgtactgaactccgggataagatcgcttgtaacggagacgcctcaagctctcagatcatccacattagcgatgagaacgagggcaaggaaatgtgcgtcctgaggatgacacgggcccgacgaagtcaggttgagcagcaacagctgatcactgttgaaaaggctctggccatcctgagccagcccacgccttcattagtggtggatcatgaacggttgaaaaacttgttgaagaccgtcgtcaaaaaaagccagaactataacatttttcaattagagaatctgtacgccgtgatatcacagtgcatctacagacatagaaaggaccatgacaaaactagcctcatacagaaaatggagcaagaggtcgaaaatttttcgtgtagtaggtag

SEQ ID NO: 178105 - DNA, 4173 bp, Artificial Sequence
  derived and/or modified sequence
atggtggtgctgcggagcagcctggagctgcacaaccacagcgctgccagcgccaccggcagcctggacctgagcagtgacttcctgagcctggagcacatcggcagaagaaggctgcggtctgctggggccgcccagaagaagccagctgccaccacagccaaggctggagatggcagctctgtgaaggaggtggagacctaccacaggacccgggccctgcggagcctgaggaaggatgcccagaacagcagtgacagcagctttgagaagaatgtggagatcacagagcagctggccaacggccgccacttcacccggcagctggcccggcagcaggccgacaagaagaaggaggagcaccgggaggacaaggtgattcctgtgaccaggagcctgcgggccaggaacatcgtgcagagcacagagcacctgcatgaagataatggagatgtggaggtgagaagaagctgccgcatccgcagccgctacagcggcgtgaaccagagcatgctgtttgacaagctgatcaccaacacagctgaggccgtgctgcagaagatggatgacatgaagaagatgaggcggcagaggatgagggagctggaggacctgggcgtcttcaatgaaacagaggagagcaacctgaacatgtacacccggggcaagcagaaggacatccagaggacagatgaggagaccacagacaaccaggagggctctgtggagagcagcgaggagggggaggaccaggagcatgaagatgatggagaagatgaagatgatgaagatgatgatgatgatgatgatgatgatgatgatgatgatgatgaagatgatgaagatgaggaggatggagaggaggagaaccagaagcgctactacctgcggcagaggaaggccaccgtgtactaccaggcccccctggagaagcccaggcaccagaggaagcccaacatcttctacagcggccctgccagccctgcccggccccgctaccgcctgagcagcgctggccccaggagcccctactgcaagaggatgaacagaagaagacatgccatccacagcagtgacagcaccagcagcagcagcagtgaagatgagcagcactttgagaggaggaggaagaggagcaggaacagagccatcaaccgctgcctgcccctgaacttcaggaaggatgagctgaagggcatctacaaggacaggatgaagattggagccagcctggctgatgtggaccccatgcagctggacagctctgtgcgctttgattctgtgggcggcctgagcaaccacatcgccgccctgaaggagatggtggtgttccccctgctgtacccagaggtgtttgagaagttcaagatccagcccccccggggctgcctcttctacggccccccaggcaccgggaagaccctggtggcccgggccctggccaatgaatgttcccagggcgacaagagggtggccttcttcatgaggaaaggagctgactgcctgagcaagtgggtgggggagagcgagcggcagctgcggctgctgtttgaccaggcctaccagatgaggcccagcatcatcttctttgatgaaattgatggcctggcccctgtgcgcagcagccggcaggaccagatccacagcagcatcgtgtccaccctgctggccctgatggatggcctggacagcagaggagagatcgtggtgattggagccaccaaccggctggacagcattgatcctgccctgcggcggcccggccgctttgaccgggagttcctgttcagcctgcctgacaaggaggccaggaaggagatcctgaagatccacacccgggactggaaccccaagcccctggacaccttcctggaggagctggccgagaactgtgtgggctactgtggggctgacatcaagagcatctgtgccgaggccgccctgtgtgccctgcggcggcgctacccccagatctacaccaccagcgagaagctgcagctggacctgagcagcatcaacatcagcgccaaggactttgaggtggccatgcagaagatgatcccagccagccagagagctgtgaccagccctggccaggccctgagcacagtggtgaagcccctgctgcagaacacagtggacaagatcctggaggccctgcagagggtcttcccccatgctgagttccgcaccaacaagaccctggacagcgacatcagctgccccctgctggagagtgacctggcctacagtgatgatgatgtgcccagcgtgtatgaaaatggcctgagccagaagagcagccacaaggccaaggacaacttcaacttcctgcacctgaacagaaatgcctgctaccagcccatgtccttccggccccgcatcctgattgtgggggagcccggcttcggccagggcagccacctggccccagctgtgattcatgccctggagaagttcaccgtgtacaccctggacatccctgtgctgtttggagtgtccaccaccagccctgaggagacctgtgcccaggtgatccgggaggccaagaggacagcccccagcatcgtgtatgtgccccacatccacgtgtggtgggagatcgtgggccccaccctgaaggccaccttcaccaccctgctgcagaacatccccagctttgcccctgtgctgctgctggccaccagtgacaagccccacagcgccctgcctgaggaggtgcaggagctgttcatccgggactatggagagatcttcaacgtgcagctgcctgacaaggaggagaggaccaagttctttgaggacctgatcctgaagcaggccgccaagccacccatcagcaagaagaaggctgtgctgcaggccctggaggtgctgcctgtggcccctcctcctgagcccaggagcctgacagctgaggaggtgaagaggctggaggagcaggaggaggacaccttccgggagctgcgcatcttcctgagaaatgtgacccaccggctggccatcgacaagcgcttccgggtcttcaccaagcctgtggaccctgatgaggtgcctgactatgtgaccgtcatcaagcagcccatggacctgagcagcgtcatcagcaagattgacctgcacaagtacctgactgtgaaggactacctgcgggacatcgacctgatctgcagcaatgccctggagtacaacccagaccgggaccccggggacaggctcatccgccaccgggcctgtgccctgcgggacacagcctatgccatcatcaaggaggagctggatgaagattttgagcagctgtgtgaggagatccaggagagcaggaagaagaggggctgcagcagcagcaaatatgcccccagctactaccacgtgatgcccaagcagaacagcaccctggtgggggacaagagaagtgaccctgagcagaatgagaagctgaagacccccagcacccctgtggcctgcagcaccccagcccagctgaagaggaagatcaggaagaagagcaactggtacctgggcaccatcaagaagaggaggaagatcagccaggccaaggatgacagccagaatgccatcgaccacaagattgaaagtgacacagaggagacccaggacacctctgtggaccacaatgaaacaggcaacacaggagagagctctgtggaggagaatgagaagcagcagaatgccagcgagagcaagctggagctgaggaacaacagcaacacctgcaacattgaaaatgagctggaggacagcaggaagaccacagcctgcacagagctgcgggacaagatcgcctgcaatggagatgccagcagcagccagatcatccacatcagtgatgaaaatgaaggcaaggagatgtgtgtgctgaggatgacccgggcccggcgcagccaggtggagcagcagcagctgatcaccgtggagaaggccctggccatcctgagccagcccacccccagcctggtggtggaccacgagcggctgaagaacctgctgaagacagtggtgaagaagagccagaactacaacatcttccagctggagaacctgtatgctgtgatcagccagtgcatctaccgccacaggaaggaccatgacaagaccagcctcatccagaagatggagcaggaggtggagaacttcagctgcagcaggtag

SEQ ID NO: 178106 - DNA, 4173 bp, Artificial Sequence
  derived and/or modified sequence
atggtggtgctgcggagcagcctggagctgcacaaccacagcgccgctagtgcaacaggatcacttgatctgagctccgacttcctctccttggagcatatcggtaggagacgtctgcgttccgctggcgctgctcagaagaaacccgcggccaccacagccaaggcaggagacgggtcttccgtcaaggaggtggagacttatcaccggactcgggctctgaggtccctccgaaaggatgctcagaactcctctgactcaagtttcgagaaaaacgttgagattactgaacagctggctaacggacggcattttactaggcagctcgcacgtcagcaggccgacaagaaaaaggaagagcatcgggaggataaagtgattcccgtgacacggagccttagggcacgaaacattgttcaaagtacagagcacctccatgaggataacggcgatgtggaggtgcgtcgcagctgcagaatccgatcccggtatagcggggtaaatcagagcatgctctttgacaagcttataacaaacaccgcggaggccgtactgcagaagatggacgacatgaagaagatgaggcggcaaagaatgagggagctcgaagatttaggggtgttcaacgaaacagaagagagcaatcttaatatgtatacacgcgggaagcaaaaagacattcagcggacggatgaagaaactactgataaccaggagggctccgtcgagagctcagaagagggcgaggaccaagagcacgaagatgacggagaggacgaagatgatgaggacgatgatgatgacgacgatgatgacgacgacgacgatgatgaagatgatgaggacgaggaagatggcgaggaggaaaatcagaaaagatactacctcaggcagcgcaaggctaccgtgtattatcaggcccctcttgagaagcccagacaccagcgaaagccgaacatattctactctggaccggctagcccagccagacctaggtacaggttgtcaagtgccggccctcgttctccatattgcaagcgaatgaaccgcaggcgccacgccatacatagttccgacagtacttcctcaagtagctccgaagacgaacagcacttcgagcgacggaggaagagaagcaggaacagagcaatcaaccgctgtctcccgttaaattttcggaaggacgaactcaagggcatatacaaggatcgcatgaagattggggcttctctggctgacgtggaccccatgcaactggatagctctgtccggtttgacagcgtggggggcctgtcgaatcacattgccgcgttaaaggaaatggttgtgttcccattgctgtatccagaagtctttgagaaatttaagatacaaccccctcgcggatgcctgttttacggacctcccggtactgggaagacccttgttgcaagagccctggcaaacgaatgctctcagggagacaaaagggttgcttttttcatgagaaaaggcgcggattgtctgtccaagtgggtaggagaatccgagcggcaactgcgcctgttgttcgaccaggcttaccagatgcggccgagcatcatctttttcgatgaaatcgacgggctcgccccagtgcgctcatctcgccaggatcagatccatagcagcattgtgtcaaccttgttggcacttatggatggtttagatagcaggggtgaaatcgtagtaatcggcgctaccaatagactggatagcattgatccagccctcaggagaccgggccgattcgaccgggagttccttttctcacttcccgacaaagaagctagaaaggaaatactgaagattcacacaagagattggaacccgaagcctcttgatacttttctggaggagctggccgagaattgcgtagggtactgtggcgcagacatcaaatcgatctgtgccgaggccgcactatgcgccttgcgcagacgctatccccagatttacacaacctctgagaaacttcagctagatctgagctcgataaatatttccgccaaggatttcgaggttgccatgcagaaaatgattccagccagccagagggccgtcaccagtcctgggcaggcccttagtacggtggtgaagcccctactgcaaaataccgtcgataagattctcgaggcgcttcagcgggttttcccccatgccgaatttaggaccaataaaacccttgattcggatatctcctgtccgctgttggaaagcgatcttgcgtacagcgacgacgacgttcctagcgtttacgagaatgggctgtcacagaagtccagtcacaaagctaaagacaatttcaacttcctccatctgaaccggaatgcctgctaccagccaatgagcttccgacctaggattttaatcgttggggaacctgggttcggacaagggtctcacctagccccggccgtgatccacgcccttgagaagttcactgtgtacaccctcgatatccctgttctctttggggttagtactacgtcacccgaagagacatgcgcccaggtcatccgcgaagccaaacggactgcaccgagcatcgtatacgtgcctcatatacacgtgtggtgggaaattgtggggcctaccctgaaagctactttcacgaccctcctccagaatattccctcttttgcaccggtgttgctcctggcgacgtcagataagcctcacagtgcactccccgaggaagtccaggagctatttatcagagattatggcgagattttcaatgtgcagctgcccgataaggaggagaggacgaaattttttgaggacttgatacttaagcaggccgcaaaacccccaattagcaaaaagaaggcagtcctgcaagcgcttgaggtgctccctgtagctccccctccggaaccaagatcactaaccgctgaggaagtaaagagacttgaagaacaggaagaagacacatttcgggagctccgaatctttctgagaaatgtgactcaccgcctcgcaattgacaagcgcttcagagtctttaccaaacccgtggaccccgatgaggtccctgactatgttaccgtgataaaacaaccaatggatctgagctcagtcatcagcaagattgacctccataaataccttactgtcaaagattacctgagggatatcgacctcatctgcagcaatgcgcttgaatacaaccctgaccgagatcctggagatagactcattcgccatcgcgcctgcgccctccgggacaccgcctacgcaattatcaaagaggagctggatgaagacttcgagcaattatgtgaggaaatccaggagtcaaggaaaaagcgcggctgtagttcctcaaaatacgccccgtcttattaccacgttatgcccaaacagaactccacattagtcggcgataaacggtctgaccctgagcagaatgagaagcttaagacgccttccacgcctgtcgcttgttccaccccagcccagctcaaacgcaaaatccgtaagaaaagcaactggtacctgggaaccatcaaaaagaggcgtaagatctcccaggctaaagatgacagccagaacgccatcgaccataagattgagtccgacaccgaggaaactcaggatacctccgtggaccacaatgagactgggaacaccggagagtccagtgttgaggagaacgaaaaacagcagaacgcctctgaatcaaagttggaactacgcaataacagcaatacttgcaatattgagaacgaattggaagacagtcgtaaaaccactgcatgcactgagctgagagataaaatcgcctgcaatggcgatgcctctagttcccagataatccacattagcgatgagaacgagggtaaggaaatgtgcgttttgcgtatgacaagagcacgccggtctcaagtggagcagcaacagttgatcactgtggagaaggcgctagctatactgagtcaacctaccccaagcttagtggtagaccacgagagattgaagaaccttctgaagactgtagtgaagaagagccagaattacaacatcttccagctcgagaacctctacgccgtgatttcccagtgtatttatagacaccgaaaggaccacgacaagacaagtctgatccaaaagatggaacaggaagtcgagaacttcagttgctcacggtag

SEQ ID NO: 178107 - DNA, 4173 bp, Artificial Sequence
  derived and/or modified sequence
atggtggttctgcgctcttccctcgagctccacaaccatagcgcagctagcgctactgggtctctcgatttgtcgtctgactttctctctcttgagcatattggtaggagacgcttacggagtgcaggggctgctcagaagaaaccagccgctaccacagccaaagcaggcgatggaagttcagttaaggaagttgaaacttaccacagaaccagagccctgcggagcttgagaaaggatgcacagaatagcagcgactcctccttcgaaaaaaatgtcgagattaccgagcaattggcgaatgggaggcacttcacgaggcagctggcaagacagcaagctgataagaagaaagaggagcacagggaggacaaggtgatccccgtcacaaggtcattgcgagcaaggaacattgtccaaagcacggagcatctgcacgaggacaacggagatgtagaagttagacgttcttgtcgaataagatcccgctactccggcgtcaatcagtccatgctctttgataagttgatcactaatacagctgaagcagtgcttcagaagatggacgacatgaagaagatgaggaggcagaggatgcgggaactcgaggacttgggcgtctttaacgaaaccgaggagtctaacctgaacatgtatacgaggggtaaacagaaggacattcagcgcaccgacgaggaaaccaccgacaatcaggaaggtagcgtggaatcatctgaggagggggaagatcaagagcatgaagacgatggagaagacgaggatgacgaagatgacgatgacgacgacgatgatgacgatgatgacgatgacgaggatgatgaggatgaggaagatggagaggaggagaaccagaagagatactacttaagacagagaaaggcaactgtctactatcaggcgcctctcgagaaaccccgacaccagaggaaacccaatatcttctattcggggcctgccagtcctgctcgaccgcgatatagattatcctctgcgggtcccaggtcaccttattgcaaaaggatgaacagacgcagacatgcaatccacagttctgattctacatcttcatcctccagcgaggacgagcagcatttcgaaaggcgcaggaagcggagccgaaaccgagccatcaatcggtgccttcccctgaactttcgcaaggacgaactgaagggaatctacaaggatcgcatgaaaattggcgcaagcctcgccgacgttgaccctatgcagcttgatagcagcgttagattcgattctgttggaggcttaagcaaccatatcgccgcacttaaggaaatggtggtgttcccattgctctatccggaggtttttgagaaatttaagatccagcccccacgaggttgcctgttctacggccctcccggtactggaaagacgctggtggctcgggctcttgccaacgagtgcagccagggggataagagggtggcattctttatgaggaagggggcagattgtctttctaaatgggtaggcgagagcgaacggcagctcaggttgcttttcgaccaggcctaccagatgcgaccgtctatcatcttttttgacgagattgatggactcgccccagtcagatccagtagacaagaccagatccactcatcaatcgtctctacgctgctggcattgatggatgggctggatagtcgaggggagattgtggtgatcggcgcaacaaatcggttggatagcattgaccctgccctaagacggcctggacgctttgacagggagttcctgttctctctgcccgacaaggaggccaggaaggagatcttgaaaatccacacaagggactggaaccctaaaccccttgacacattcctggaggagctggccgaaaattgcgttggatactgcggggcagacatcaaaagcatctgtgctgaggctgcactctgtgctttacggaggcgctatcctcagatctacaccacttccgagaagctgcaactcgatctaagttctataaacatctcagccaaagacttcgaggtcgcaatgcaaaagatgattcccgcttctcagcgcgcagttacatcccccggtcaggcactgtccaccgtggttaaacccctcctccagaatacagtggataaaatcctggaggccctccagagagtgttcccgcacgcagagttccgaacaaataaaacactcgactctgatatatcctgcccgctcctagagagcgatctggcttactctgacgatgatgtgccctctgtctatgaaaatggtctcagccagaaatcctctcacaaagccaaagacaatttcaacttcctgcatctgaacagaaacgcatgttatcagcctatgagtttcaggccaagaatactgattgtgggtgagccagggttcggacaggggagtcacttggcacccgctgttatacatgccctcgagaagttcacggtgtacacccttgacattccagttcttttcggagtcagcaccaccagccccgaggaaacgtgtgcgcaggtgatccgcgaggccaaacggaccgcaccctccattgtgtatgtgccgcatatccatgtgtggtgggaaatcgtgggacctactctgaaagcgacctttacaaccttactacagaacattcccagctttgcgcctgttctgctgcttgccaccagcgacaaacctcacagcgcactgcccgaggaagtgcaagagctgttcataagggactacggggaaatctttaatgttcagctccccgataaagaagaacggacaaaattcttcgaggacttaattctcaagcaagcagcaaagccccctattagcaaaaaaaaggctgtgctgcaggctttggaggtgctgccggttgctcctcctcctgagccacggagcctgaccgcagaggaggtgaagagacttgaggaacaggaggaggacaccttccgagaattacgcatctttctgcgtaacgtgacccatcgcttagcaatcgacaagcgcttcagagtgtttaccaaaccagtggaccccgatgaggtacccgactatgtgaccgttataaaacaacctatggacctcagttcagtgatatcgaaaattgatctacacaaatacctgacagtaaaggattatctcagggacattgacctaatctgctcaaacgccctggaatacaaccccgatcgagaccctggggatcgcctgatacgccatagagcctgcgctctaagagacacagcgtacgcaattatcaaagaggaactcgacgaagacttcgagcagctgtgcgaggaaattcaggagtctcggaaaaagaggggttgttcttccagcaagtatgcccctagctactaccacgtgatgcccaaacaaaatagtactctggtgggcgacaagagatccgacccggagcaaaacgagaaactcaagacaccaagcaccccagtggcctgctcaacgccagcccagctgaaaagaaagatccgtaagaaatccaactggtatctgggaacaataaaaaaaaggagaaagatttcgcaagccaaagacgactcgcagaatgctattgaccataaaattgaatcggacaccgaggagactcaagacactagtgtagaccacaatgagactggcaataccggtgagtcatctgtcgaagagaacgagaagcagcagaacgcatccgagtctaaactggagctgagaaacaatagtaacacatgcaacattgagaatgagctggaagatagcaggaagacaaccgcttgcaccgagttgagagacaagattgcatgcaatggggacgcttcttcctcgcagattattcatattagcgacgagaatgaaggcaaagagatgtgcgtgctgaggatgacaagggcccgaaggtcacaggtcgagcagcaacagttgatcaccgtggagaaggctcttgcaatattgagccagccaactccgtcacttgtggtggatcatgagcgcttaaagaacctgctgaagaccgttgtaaagaagtcacagaattacaacatcttccagctggagaatttatatgctgtaattagccagtgtatctaccgacatcgcaaggatcacgacaaaactagcctgatacagaaaatggagcaagaggtggagaatttttcatgctccaggtag

SEQ ID NO: 178108 - DNA, 5565 bp, Artificial Sequence
  derived and/or modified sequence
cgcggagcttgtggcgccagaattcggagcgcggaagagccagagctgcgagcgcctggagctggatctctctccggtcgcgcacgccgaggccagtagggagagaagatggtggttctccgcagcagcttggagctgcacaaccactccgcggcctcggccacgggctccttggacctgtccagtgacttcctcagtctggagcacatcggccggaggcggctccgctcggccggcgcggcgcagaagaaacccgcggcgaccacagccaaagcgggcgatgggtcatcagttaaggaagttgaaacctaccaccggacacgtgctttaagatctttgagaaaagatgcacagaattcttcagattctagttttgagaagaatgtggaaataacggagcaacttgctaatggcaggcattttacaaggcagttggccagacagcaggctgataaaaaaaaagaagagcacagagaagacaaagtgattccagttactcggtcattgagggctagaaacatcgttcaaagtacagaacacttacatgaagataatggtgatgttgaagtgcgtcgaagttgtaggattagaagtcgttatagtggtgtaaaccagtccatgctgtttgacaaacttataactaacactgctgaagctgtacttcaaaaaatggatgacatgaagaagatgcgtagacagcgaatgagagaacttgaagacttgggagtgtttaatgaaacagaagaaagcaatcttaatatgtacacaagaggaaaacagaaagatattcaaagaactgatgaagaaacaactgataatcaagaaggcagtgtggagtcatctgaagagggtgaagaccaagaacatgaagatgatggtgaagatgaagatgatgaagatgatgatgatgatgacgatgatgatgatgatgatgatgatgaagatgatgaagatgaagaagatggagaagaagagaatcagaagcgatattatcttagacagagaaaagctactgtttactatcaggctccattggaaaaacctcgtcaccagagaaagcccaacatattttatagtggcccagcttctcctgcaagaccaagataccgattatcttccgcaggaccaagaagtccttactgtaaacgaatgaacaggcgaaggcatgcaatccacagtagtgactcgacttcatcttcctcctctgaagatgaacagcactttgagaggcggaggaaaaggagtcgtaatagggctatcaataggtgcctcccactaaattttcggaaagatgaattaaaaggcatttataaagatcgaatgaaaattggagcaagccttgccgatgttgatccaatgcaactagattcttcagtacgatttgatagtgttggtggcctgtctaatcatatagcagctctaaaagagatggtggtgtttccattactttatccagaagtctttgaaaaatttaaaattcaacccccaagaggttgtttgttttatgggccacctggaactggaaagactctggttgccagagcacttgccaatgagtgcagtcaaggggataaaagagtagcatttttcatgaggaaaggtgctgattgtctaagtaaatgggtaggagaatctgaaagacagctacgattgctgtttgatcaggcctatcagatgcgcccatcaattattttttttgacgaaattgatggtctggctccagtacggtcaagcaggcaagatcagattcacagttctattgtttccaccctgctagctcttatggatggattggacagcagaggggaaattgtggtcattggtgctacgaacaggctagattctatagatcctgctttacgaaggcctggtcgctttgatagagaattcctctttagcctgcctgataaagaggctcgaaaagagattctaaagattcacaccagggattggaatcccaaaccactggacacatttttagaagagctagcagaaaactgtgttggatactgtggagcagatattaaatcaatatgtgctgaagctgctttatgtgctttacgacgacgctacccacagatctataccactagtgagaaactgcagttggatctctcttcaattaatatctcagctaaggatttcgaggtagctatgcaaaagatgataccagcctcccaaagagctgtgacatcacctgggcaggcactgtccaccgttgtgaaaccactcctgcaaaacactgttgacaagattttagaagccctgcagagagtatttccacatgcagaattcagaacaaataaaacattagactcagatatttcttgtcctctgctagaaagtgacttggcttacagtgatgatgatgttccatcagtttatgaaaatggactttctcagaaatcttctcataaggcaaaagacaattttaattttcttcatttgaatagaaatgcttgttaccaacctatgtcttttcgaccaagaatattgatagtaggagaaccaggatttgggcaaggttctcacttggcaccagctgtcattcatgctttggaaaagtttactgtatatacattagacattcctgttctttttggagttagtactacatcccctgaagaaacatgtgcccaggtgattcgtgaagctaagagaacagcaccaagtatagtgtatgttcctcatatccacgtgtggtgggaaatagttggaccgacacttaaagccacatttaccacattattacagaatattccttcatttgctccagttttactacttgcaacttctgacaaaccccattccgctttgccagaagaggtgcaagaattgtttatccgtgattatggagagatttttaatgtccagttaccggataaagaagaacggacaaaattttttgaagatttaattctaaaacaagctgctaagcctcctatatcaaaaaagaaagcagttttgcaggctttggaggtactcccagtagcaccaccacctgagccaagatcactgacagcagaagaagtgaaacgactagaagaacaagaagaagatacatttagagaactgaggattttcttaagaaatgttacacataggcttgctattgacaagcgattccgagtgtttactaagcctgttgaccctgatgaggttcctgattatgtcactgtaataaagcaaccaatggacctttcatctgtaatcagtaaaattgatctacacaagtatctgactgtgaaagactatttgagagatattgatctaatctgtagtaatgccttagaatacaatccagatagagatcctggagatcgtcttattaggcatagagcctgtgctttaagagatactgcctatgccataattaaagaagaacttgatgaagactttgagcagctctgtgaagaaattcaggaatctagaaagaaaagaggttgtagctcctccaaatatgccccgtcttactaccatgtgatgccaaagcaaaattccactcttgttggtgataaaagatcagacccagagcagaatgaaaagctaaagacaccgagtactcctgtggcttgcagcactcctgctcagttgaagaggaaaattcgcaaaaagtcaaactggtacttaggcaccataaaaaagcgaaggaagatttcacaggcaaaggatgatagccagaatgccatagatcacaaaattgagagtgatacagaggaaactcaagacacaagtgtagatcataatgagaccggaaacacaggagagtcttcggtggaagaaaatgaaaaacagcaaaatgcctctgaaagcaaactggaattgagaaataattcaaatacttgtaatatagagaatgagcttgaagactctaggaagactacagcatgtacagaattgagagacaagattgcttgtaatggagatgcttctagctctcagataatacatatttctgatgaaaatgaaggaaaagaaatgtgtgttctgcgaatgactcgagctagacgttcccaggtagaacagcagcagctcatcactgttgaaaaggctttggcaattctttctcagcctacaccctcacttgttgtggatcatgagcgattaaaaaatcttttgaagactgttgttaaaaaaagtcaaaactacaacatatttcagttggaaaatttgtatgcagtaatcagccaatgtatttatcggcatcgcaaggaccatgataaaacatcacttattcagaaaatggagcaagaggtagaaaacttcagttgttccagatgatgatgtcatggtatcgagtattctttatattcagttcctatttaagtcatttttgtcatgtccgcctaattgatgtagtatgaaaccctgcatctttaaggaaaagattaaaatagtaaaataaaagtatttaaactttcctgatatttatgtacatattaagataaatgtcatgtgtaagataactgataaatattggaactttgctagaacaagaccctgtagtaatagtaataatagttgaagtttggccaactcttaataaagttattttggtaactaatgttttatggcacttaagaataattagcagcgttaaattttgtttgtattaagcacttttaattttatccttcctaaaaatagtttattgtatctgacaagaaacttacttaaccattgtgtccttcccatcttttttgtcatctttgttttcttcaaatgccctcctcccatctgccttgagattccctcgtcttcacttaaaagccagagtgcaagtcatgatttgcgggagggctcttgaaccacttctggctgcaccacaattctgtacttgagtatcacagtcattgtttttgagacaaacatttttataattctaatttgggttaataaagattttaaatatttcttggtttacttttgtaattatatacacaacaaatgtattaataactaccttgttaaacaccttttaatagcacaaggtttttatatttgcaagctgttgatatctttctaaaactgtttaggttatagtctattgatactttttatatacaattttataaatataaatattataattttatattaatggtaccaaaaatacatttcttaaggttaaaagcatgcacttccatgcatacttgcttttggggagagtggggagaagacattctaataatcagtttgtgaaatagcttctgttggaaaccttttgaggggaataaggaatggtcatctaaaatgagagattctggattttaatgcagttcaaagttgagctgtatttttgttgttgatttatctggattttttttaaagccttctaaaacccagtgaattcaataccttaattagtacatactatcttatgtaatgcataaagcaatgccagtcactgagaacatttaaatatatttatattcctggagatacacattctcatttttgttggtttattataaattattcttctagatgcatcttttataactaggatttcattttgtgtgtatagcttatgtaataaattttaaaggtgaaaactctcttaaa

SEQ ID NO: 178109 - DNA, 4173 bp, Artificial Sequence
  derived and/or modified sequence
atggtggtgctgagaagcagcctggagctgcacaaccacagcgccgccagcgccaccggcagcctggacctgagcagcgacttcctgagcctggagcacatcggcagaagaagactgagaagcgccggcgccgcccagaagaagcccgccgccaccaccgccaaggccggcgacggcagcagcgtgaaggaggtggagacctaccacagaaccagagccctgagaagcctgagaaaggacgcccagaacagcagcgacagcagcttcgagaagaacgtggagatcaccgagcagctggccaacggcagacacttcaccagacagctggccagacagcaggccgacaagaagaaggaggagcacagagaggacaaggtgatccccgtgaccagaagcctgagagccagaaacatcgtgcagagcaccgagcacctgcacgaggacaacggcgacgtggaggtgagaagaagctgcagaatcagaagcagatacagcggcgtgaaccagagcatgctgttcgacaagctgatcaccaacaccgccgaggccgtgctgcagaagatggacgacatgaagaagatgagaagacagagaatgagagagctggaggacctgggcgtgttcaacgagaccgaggagagcaacctgaacatgtacaccagaggcaagcagaaggacatccagagaaccgacgaggagaccaccgacaaccaggagggcagcgtggagagcagcgaggagggcgaggaccaggagcacgaggacgacggcgaggacgaggacgacgaggacgacgacgacgacgacgacgacgacgacgacgacgacgacgaggacgacgaggacgaggaggacggcgaggaggagaaccagaagagatactacctgagacagagaaaggccaccgtgtactaccaggcccccctggagaagcccagacaccagagaaagcccaacatcttctacagcggccccgccagccccgccagacccagatacagactgagcagcgccggccccagaagcccctactgcaagagaatgaacagaagaagacacgccatccacagcagcgacagcaccagcagcagcagcagcgaggacgagcagcacttcgagagaagaagaaagagaagcagaaacagagccatcaacagatgcctgcccctgaacttcagaaaggacgagctgaagggcatctacaaggacagaatgaagatcggcgccagcctggccgacgtggaccccatgcagctggacagcagcgtgagattcgacagcgtgggcggcctgagcaaccacatcgccgccctgaaggagatggtggtgttccccctgctgtaccccgaggtgttcgagaagttcaagatccagccccccagaggctgcctgttctacggcccccccggcaccggcaagaccctggtggccagagccctggccaacgagtgcagccagggcgacaagagagtggccttcttcatgagaaagggcgccgactgcctgagcaagtgggtgggcgagagcgagagacagctgagactgctgttcgaccaggcctaccagatgagacccagcatcatcttcttcgacgagatcgacggcctggcccccgtgagaagcagcagacaggaccagatccacagcagcatcgtgagcaccctgctggccctgatggacggcctggacagcagaggcgagatcgtggtgatcggcgccaccaacagactggacagcatcgaccccgccctgagaagacccggcagattcgacagagagttcctgttcagcctgcccgacaaggaggccagaaaggagatcctgaagatccacaccagagactggaaccccaagcccctggacaccttcctggaggagctggccgagaactgcgtgggctactgcggcgccgacatcaagagcatctgcgccgaggccgccctgtgcgccctgagaagaagatacccccagatctacaccaccagcgagaagctgcagctggacctgagcagcatcaacatcagcgccaaggacttcgaggtggccatgcagaagatgatccccgccagccagagagccgtgaccagccccggccaggccctgagcaccgtggtgaagcccctgctgcagaacaccgtggacaagatcctggaggccctgcagagagtgttcccccacgccgagttcagaaccaacaagaccctggacagcgacatcagctgccccctgctggagagcgacctggcctacagcgacgacgacgtgcccagcgtgtacgagaacggcctgagccagaagagcagccacaaggccaaggacaacttcaacttcctgcacctgaacagaaacgcctgctaccagcccatgagcttcagacccagaatcctgatcgtgggcgagcccggcttcggccagggcagccacctggcccccgccgtgatccacgccctggagaagttcaccgtgtacaccctggacatccccgtgctgttcggcgtgagcaccaccagccccgaggagacctgcgcccaggtgatcagagaggccaagagaaccgcccccagcatcgtgtacgtgccccacatccacgtgtggtgggagatcgtgggccccaccctgaaggccaccttcaccaccctgctgcagaacatccccagcttcgcccccgtgctgctgctggccaccagcgacaagccccacagcgccctgcccgaggaggtgcaggagctgttcatcagagactacggcgagatcttcaacgtgcagctgcccgacaaggaggagagaaccaagttcttcgaggacctgatcctgaagcaggccgccaagccccccatcagcaagaagaaggccgtgctgcaggccctggaggtgctgcccgtggcccccccccccgagcccagaagcctgaccgccgaggaggtgaagagactggaggagcaggaggaggacaccttcagagagctgagaatcttcctgagaaacgtgacccacagactggccatcgacaagagattcagagtgttcaccaagcccgtggaccccgacgaggtgcccgactacgtgaccgtgatcaagcagcccatggacctgagcagcgtgatcagcaagatcgacctgcacaagtacctgaccgtgaaggactacctgagagacatcgacctgatctgcagcaacgccctggagtacaaccccgacagagaccccggcgacagactgatcagacacagagcctgcgccctgagagacaccgcctacgccatcatcaaggaggagctggacgaggacttcgagcagctgtgcgaggagatccaggagagcagaaagaagagaggctgcagcagcagcaagtacgcccccagctactaccacgtgatgcccaagcagaacagcaccctggtgggcgacaagagaagcgaccccgagcagaacgagaagctgaagacccccagcacccccgtggcctgcagcacccccgcccagctgaagagaaagatcagaaagaagagcaactggtacctgggcaccatcaagaagagaagaaagatcagccaggccaaggacgacagccagaacgccatcgaccacaagatcgagagcgacaccgaggagacccaggacaccagcgtggaccacaacgagaccggcaacaccggcgagagcagcgtggaggagaacgagaagcagcagaacgccagcgagagcaagctggagctgagaaacaacagcaacacctgcaacatcgagaacgagctggaggacagcagaaagaccaccgcctgcaccgagctgagagacaagatcgcctgcaacggcgacgccagcagcagccagatcatccacatcagcgacgagaacgagggcaaggagatgtgcgtgctgagaatgaccagagccagaagaagccaggtggagcagcagcagctgatcaccgtggagaaggccctggccatcctgagccagcccacccccagcctggtggtggaccacgagagactgaagaacctgctgaagaccgtggtgaagaagagccagaactacaacatcttccagctggagaacctgtacgccgtgatcagccagtgcatctacagacacagaaaggaccacgacaagaccagcctgatccagaagatggagcaggaggtggagaacttcagctgcagcagatag

SEQ ID NO: 178110 - protein, 275 aa, Artificial Sequence
  derived and/or modified sequence
MEERKEEGEAEIQEHGPEHWFSKWERQCLAEAEQDEQLPPELQEEAAAAAQPEHKQQKLWHLFQNSATAVAQLYKDRVCQQPGLSLWVPFQNAATAVTNLYKESVDTHQRSFDIGIQIGYQRRNKDVLAWVKKRRRTIRREDLISFLCGKVPPPRNSRAPPRLTVVSPNRATSTETSSSVETDLQPFREAIALHGLSGAMASISVRSSTPGSPTHVSSGSNASRRRNGLHDVDLNTFISEEMALHLDNGGTRKRTSAQCGDVITDSPTHKRNRMI

SEQ ID NO: 178111 - DNA, 5983 bp, Artificial Sequence
  derived and/or modified sequence
tcggcggtggcgacgacgacgacgttgctcagtcttggggtgggctccgcggtgcaggccgagctgcgcggagggctcggcgatcagcggcggcggcggcagtggggaggccgcagcgccatgggggggcgttagacaggctgcggcggccgaggcgaggggcggcagcggttatctggtccgcggcgaccttcggccgggcccgggggtgggaaggcctggggcgggggtcgtccctggttgcacggggccgcggggcggggctcgccggccgtcggggtgcaggaggcctgggccgctgaaaggagaaggcgccgtcggtcgccaggccctgccgccgggccgcttgacgacgacgctcccgcgggggccccgcctgaggaggacgcggcggcggtggcggcgaggccgcgggaggccgcggaggatggaggagcggaaggaggagggcgaggccgagatccaggagcacgggcccgagcactggttctccaagtgggagcggcagtgcctggccgaggccgaacaggacgagcagctgccccccgagctgcaggaggaggcggcggccgccgcgcagcccgagcacaagcagcagaagctgtggcacctcttccagaactcggccaccgccgtggcccagctctacaaagaccgagtgtgtcagcagccaggactttctctctgggtccccttccaaaacgcagccaccgccgtcaccaatctctacaaagaaagcgtggatacccatcaacgaagttttgatattggaattcagattggctatcagcgacgcaataaggatgtgttggcttgggttaaaaaacgcagaagaactattcgtcgagaagatttgatcagcttcctgtgtggaaaagttcctccaccacgaaactctagagctcccccaagactgactgtagtgtcccctaaccgagctacttcaacggaaactagctcatctgtagagactgatttgcaacccttccgggaagccatagctctgcatggtcttagtggtgcaatggctagtataagcgtgcgttcgagtaccccaggctctcctacacatgtaagcagtggatcgaatgctagtcgaaggagaaatggactccatgatgtcgatttgaacactttcatatcagaagaaatggcactccacttggacaatggtggaactagaaagcgtacctcagcccagtgtggcgatgtcattacagactcaccaacccataaacgcaacagaatgatctaaactgcaaacattttcacacccaccatgctgcttgaaagccacttgatcctcaacatatactataattgcaaaggaaacatgaggccatcttcccttgttcactgtttaagacaagtgaattctatagtggttgccataaaaggaagttctaggtatttatagtagatgcctcttgtaattatggctttcttaaaactataatcctagcagaggacatcagatattgtgtagtcgttagcaagatcatcataggcaaacatatatccgttccaaggctaaaagtgaccttaactgtatttattctcaaagggaaaggaaatatcagatgtttatttggttatagaatgctttttttttttttgggtccatttcctgctgtgttgagtattttgcttcaacagtattgccaggttcctaaaattgtctaaaaacatgatttggcttccatttttgcagctgcactgtaccatgcacctggtttctatatagtaacagtgtgcaattctaattattggactgtgccctgtttttagttttcaaatcaatttctaattctggtgattgtgtgatgtaaagaggtgctatgatggtcatgcaattaatactaaatattgaatcaatgcccagagctttattggattcactttgtgtgtgttagtgctctaaagtagcagtattattattaaactgtccccagagtaaccctgtaggcctaaagtactcagttttaagacaaacactacttcccatgcggggtactttccttatggtaaatgtaaacatgtagactgcattcgaggtgacctaaagtagagaggtcatgaactttgagaatgggcttcctttttggttcagtattagtgagagggagagggagatggatggtggggtaggttttctagtctatcattttacatttttcatggagtccctgcttagtgcagtttccattggaatgggtggaagatgataaagctctcttttttatctactaataatgtgattgcaacttaaaatagcaaaacccaactctccctgtccctccaatccctctcctaaaaagttcagtttggaatctcattctggaaaagatggaatcgcatggagattctctagctgttaggtagacctaaataaaaagttctcaatagattcctcttttgagtaaatataagacctcttgtagctacaatgttttagagcatgtttcatcttcatttttaatatcctgaactgaatgatagtgtttttttagatgaagaactgatgtcagcctgccaggtactgtaatttattctatcatattattatattatatatcaagtaggacagtgaaaaatgtttccttgcaaacttgtagtccagtatcagttacttcctatttttatccttaaaagaccattgcaaatcagtgtaagggtttttccagtaattactcacagcactttgttaaagtttgcaatttcttcagccatttaataatatctttctgtgaagaaactttgctgagttaaccataaatgttcattcattgactgggtgggatgtgaatggaatgttagaaatgttgtgtgaattgaagttctgtattcattatagatgtagcccttatttaaaaaagtgaattccatactaaaactaggaatgaaagtgagagatttctaaacttttgcgaaagtgggtcattttttgtttgactataatagcaggaagaattatagcaatctgtcattttacctgaaacagacaagcctatgtattatgaatactttcaagcttccctttggaatatacaagacatgcgtttggagttacctttgtttttctatcgtaaatttagattctggaattggggtttggtggtgcaatgtgttgctcacaagtggccagaactcctattcctaaaaggattttgagatggaggaacacatatttaattcccctttatgccttggttcttgctcctctttccacgttggataacaattttttggttgttttgtttaagttggtgctctgaagcttaatctcagtaccctttactctgaattgtcaaattttgataaaacgtgccattttctttggtaagagaaagcaggtcttaatgtctgccagaacacaatttatatgccttattggcttcattaaacttttagaaaactttagcatttgttacttttttccattgcgtttactttcaaatgcacctaatgaatttgtcacccagtcgcaacttttcccttctctgtcccattgctttctcctttccccgacgcacagaataaacatgaagctcagcagtagaagcgtaatgatttccctcaggaaaaacttctgacagctaggtttttcaagggtttccctgtgctagctgagatgcaaaacaaatcatggaagattgcatacctgtgtggtattttaaaaacaagttgactttttcagtttcttgaacggttaagggtggatttaaaaactagacagtttagttttggggaacagaagctctcttcgtcttaagccagattctctgattcttttagacgtcatagctccttagttctgctcctgtcgccctaacttggcatgggcaagttgaagttcatccttagactgcagcgttctgagcatggctgaagtattaaaatgtttaatattttttagagcaaaattgttggaaagcatttggctgaatctaaagacctgcagtcagattcttcaatgtggtttacccaactggagtagtgataaacaccttaatcataaaatgaataaaaacaaaaaaaccatggggcttgtctgcagttttgttttggtcatcacatctgaataactttttgatgcaatcaaatgaagtttaggcttttaaaaaagaattagctttctaaatgtttttttctaagggctactggaactcattaaactcgaataattgtggctttgggcctgaagatttccattcaacagtgaaaactggctaacttcctttatagtgagagggatggccaacatccaacccagagggctagtcagcctcagaggccagtgcaagacgccaagagatgattttgaaatggggccataagtttagaaaattatgaacagaatgattgagtttttggcctggctactacctctagtggtgactacgtcagcagattaatctcattgcattttactttatgtagtatgttgtaacctggtgcttcattcattagattggtgactgaggtatttagtcatggtgaggatgggaatcttcagagatacattctggatttgtggaataaagtgactagaaaggttcttccagagcaaccccttgtttaaagttataagtgtttatggtacctgctaccccttctggaaagttgtcggctttgatggtttagatgaccttaccccataaggccagcttctagcctccctttggaatatttgaggtgtgtgatgttttagtgggggcagcatttgagagacgagcaggcccgagcacccaggctggctgtcagaccgtgtgttgtgctgttgggtttgatgggatgagatatccagggttttacttcctataatgggatctgcaggctccttgtgaagttcagttagacagtagcctgtgacgtagcaagtcaagttttcgatggcccctcattttttttttatttagtgcttaaaaaaaagatttaaaacagcaaaaatcaagccacacagcagcttatagtatatacaggtcttttatacattagaagtaatatggtgaaatcttttttttttttttttttttttgtgatggagtttcactctctcacccaggctggagtgcagtggcacgatcttggctcaccacaacctctgcctcctgggttcaagcaattttcatgcctcagcctcccgagtagctggtattacaggtgcctgccaccacacctggctattttttgtatttttgttagatacggggtttcaaatatggtgaaatcttgtgacagaatagtattcccttgtacagataagccttgatgcaggttacagattttttataattagtaatgcagcagtggagtgttttctttttcttgttttttgagatggagtctctgtcgctggagtgcggtggtgcgatcccagctcaccgcaatctctgcctcccgggttcaagcgattctcctgcctataactacaggtgtgcgccaccacgcccagctaatttaattttgaatttttagtagagacgggatttcaccatgttggccaggccagtcttgaattcctgaccttaagtgatctgcccgccttggcctccccaagtgctgggattacaggcatgagacactgcgcctggcctatgttttaagtttctctatgacaaatttctgtagatgaactatctgggtcaaaaaaattcatctataaaatactgatgggtcttgccaaagtaccttctgcaaggtaccagttaatacttccatcagaaagtaagagcgcctgttcccttacatcgtagccagtgttgggtatttatacttcctttggcagaagtgacctttcagttttaatctgttttttacctgctcgtatgaaggaagactttttgcttgatatcacgtgggtttgaatgctgactctactaccaggtctgggaacctaggtaagtttgcctctctgggctgttttctcatctgtgaaataaatagaaaacatagaaaaataaattaaaaaatgtgaatgtta

SEQ ID NO: 178112 - DNA, 828 bp, Artificial Sequence
  derived and/or modified sequence
atggaggagagaaaggaggagggcgaggccgagatccaggagcacggccccgagcactggttcagcaagtgggagagacagtgcctggccgaggccgagcaggacgagcagctgccccccgagctgcaggaggaggccgccgccgccgcccagcccgagcacaagcagcagaagctgtggcacctgttccagaacagcgccaccgccgtggcccagctgtacaaggacagagtgtgccagcagcccggcctgagcctgtgggtgcccttccagaacgccgccaccgccgtgaccaacctgtacaaggagagcgtggacacccaccagagaagcttcgacatcggcatccagatcggctaccagagaagaaacaaggacgtgctggcctgggtgaagaagagaagaagaaccatcagaagagaggacctgatcagcttcctgtgcggcaaggtgcccccccccagaaacagcagagccccccccagactgaccgtggtgagccccaacagagccaccagcaccgagaccagcagcagcgtggagaccgacctgcagcccttcagagaggccatcgccctgcacggcctgagcggcgccatggccagcatcagcgtgagaagcagcacccccggcagccccacccacgtgagcagcggcagcaacgccagcagaagaagaaacggcctgcacgacgtggacctgaacaccttcatcagcgaggagatggccctgcacctggacaacggcggcaccagaaagagaaccagcgcccagtgcggcgacgtgatcaccgacagccccacccacaagagaaacagaatgatctag

SEQ ID NO: 178113 - DNA, 828 bp, Artificial Sequence
  derived and/or modified sequence
atggaagagagaaaagaggagggggaggccgaaattcaggagcacgggcccgagcattggtttagcaaatgggagaggcagtgcctggcagaggccgagcaagacgaacagctgcctccggaactccaagaagaagccgccgccgcagcccagcccgagcataagcaacagaagctgtggcaccttttccagaactccgccaccgccgtcgcccagctgtacaaagatcgagtgtgtcaacagccgggactgtctctctgggtgccattccagaatgctgcgacagccgtgacgaatttatacaaagagtcagttgacacacatcagagatcgtttgacatcggtattcagatcggttaccaaaggaggaacaaggacgttctggcttgggtcaaaaaacgaagacgcacaattaggcgggaggacctcatttcttttctttgcgggaaggtccccccccctagaaattcccgagccccgccacgcctgacggtggtgtcccccaatcgggctaccagcactgaaacctcttcctccgtggagaccgaccttcaaccatttagagaagcgatagcactgcatggtttatcaggggccatggcttcaatctcggtgcgctccagtactccagggagccccacgcacgtatcttccggatccaatgccagtaggcgtagaaatggtttgcatgacgtcgacctgaacacgttcatttccgaagaaatggccctccacctggataacggcggtacgcgcaaacgtacatcagcccagtgcggagacgtgatcaccgactccccaacccacaagcggaacaggatgatatag

SEQ ID NO: 178114 - DNA, 828 bp, Artificial Sequence
  derived and/or modified sequence
atggaggagaggaaggaggagggggaggccgagatccaggagcacggccctgagcactggttcagcaagtgggagcggcagtgcctggccgaggccgagcaggatgagcagctgcccccagagctgcaggaggaggccgctgctgctgcccagcctgagcacaagcagcagaagctgtggcacctgttccagaacagcgccacagctgtggcccagctgtacaaggacagagtgtgccagcagcccggcctgagcctgtgggtgcccttccagaatgctgccacagctgtgaccaacctgtacaaggagagcgtggacacccaccagaggagctttgacatcggcatccagatcggctaccagaggaggaacaaggatgtgctggcctgggtgaagaagagaagaaggaccatcagaagagaagatctcatctccttcctgtgtgggaaggtgcccccaccaagaaacagccgggccccaccccggctgactgtggtgagccccaacagagccaccagcacagagaccagcagctctgtggagacagacctgcagcccttccgggaggccatcgccctgcacggcctgagcggggccatggccagcatctctgtgcgcagcagcaccccaggcagccccacccacgtgagcagcggcagcaatgccagcagaagaagaaatggcctgcatgatgtggacctgaacaccttcatcagcgaggagatggccctgcacctggacaatggaggcaccaggaagaggaccagcgcccagtgtggagatgtgatcacagacagccccacccacaagaggaacaggatgatctag

SEQ ID NO: 178115 - DNA, 828 bp, Artificial Sequence
  derived and/or modified sequence
atggaggagcggaaggaggagggcgaggccgagatccaggagcacgggcccgagcactggtttagtaagtgggagaggcagtgcctcgccgaggcagagcaggacgagcagctcccaccggaactgcaggaagaagcagctgccgcagcccagcctgaacacaaacagcaaaagctgtggcatttgtttcagaatagcgccacggcagttgctcagttgtataaggatagagtctgtcagcagccgggactgagcctgtgggtgccttttcagaatgccgccactgccgtgaccaatctctacaaggaatctgtggatacacaccagaggtctttcgatattggaatacagattggttaccagagaaggaataaagacgtcttggcttgggttaagaagaggcggcgcactatcagacgcgaagacctgatttctttcctgtgtggaaaagttcccccccccagaaacagccgcgcccctccccggctgactgtagtttcgcccaatagggccacttcgacggaaacatcttcatccgtcgaaacagatctgcaacccttcagagaggccatcgcgctgcatggcctgagcggcgcaatggcatcaatctcagttcgaagcagtactcccggcagccccactcacgtgagctcggggtctaatgcatctaggaggcggaatggattgcacgatgtggatctcaacaccttcatcagtgaggagatggcactgcacctggacaacggaggaacacgtaaacgcacttcagctcagtgtggtgacgtgatcaccgattctccgacacacaaaagaaacagaatgatttag

SEQ ID NO: 178116 - DNA, 828 bp, Artificial Sequence
  derived and/or modified sequence
atggaggaacgaaaagaggagggagaagctgagatccaggaacacggcccagaacactggttctctaaatgggaacgccagtgtctggcagaagccgaacaagacgaacaattgccacccgaacttcaggaggaggccgctgcagctgctcagcccgagcataaacagcagaagttgtggcacctgtttcaaaactccgctactgctgtggcgcagctttacaaggacagagtgtgtcagcagccaggcctcagcctctgggtcccgtttcagaacgcggctacggccgtgactaacctttataaagagtcagtagatacccaccagagatcttttgatatcggaatacagatagggtatcagagacgcaataaagatgtgctggcctgggtgaagaagcgcaggcgcacaatacgcagagaggacctgatttctttcttatgcggcaaggtaccgcctccccgtaactctagggcccctcctaggctgactgtcgtctcccccaacagagcaactagtactgagacatcatcttctgtcgagaccgatcttcagcctttccgtgaggccattgccctccatggactgagcggcgcaatggccagcatttccgttcggtcctcaacccccggttcccctacacacgtctccagtggtagcaacgcttctcgacgcagaaacggactgcacgatgtggatttaaacaccttcattagtgaggagatggccctacacctggataacgggggaacacgcaaacgtactagcgcccaatgcggggacgtcataaccgatagtccgactcataaacgcaatagaatgatctag

SEQ ID NO: 178117 - protein, 1331 aa, Artificial Sequence
  derived and/or modified sequence
MQAAPRAGCGAALLLWIVSSCLCRAWTAPSTSQKCDEPLVSGLPHVAFSSSSSISGSYSPGYAKINKRGGAGGWSPSDSDHYQWLQVDFGNRKQISAIATQGRYSSSDWVTQYRMLYSDTGRNWKPYHQDGNIWAFPGNINSDGVVRHELQHPIIARYVRIVPLDWNGEGRIGLRIEVYGCSYWADVINFDGHVVLPYRFRNKKMKTLKDVIALNFKTSESEGVILHGEGQQGDYITLELKKAKLVLSLNLGSNQLGPIYGHTSVMTGSLLDDHHWHSVVIERQGRSINLTLDRSMQHFRTNGEFDYLDLDYEITFGGIPFSGKPSSSSRKNFKGCMESINYNGVNITDLARRKKLEPSNVGNLSFSCVEPYTVPVFFNATSYLEVPGRLNQDLFSVSFQFRTWNPNGLLVFSHFADNLGNVEIDLTESKVGVHINITQTKMSQIDISSGSGLNDGQWHEVRFLAKENFAILTIDGDEASAVRTNSPLQVKTGEKYFFGGFLNQMNNSSHSVLQPSFQGCMQLIQVDDQLVNLYEVAQRKPGSFANVSIDMCAIIDRCVPNHCEHGGKCSQTWDSFKCTCDETGYSGATCHNSIYEPSCEAYKHLGQTSNYYWIDPDGSGPLGPLKVYCNMTEDKVWTIVSHDLQMQTPVVGYNPEKYSVTQLVYSASMDQISAITDSAEYCEQYVSYFCKMSRLLNTPDGSPYTWWVGKANEKHYYWGGSGPGIQKCACGIERNCTDPKYYCNCDADYKQWRKDAGFLSYKDHLPVSQVVVGDTDRQGSEAKLSVGPLRCQGDRNYWNAASFPNPSSYLHFSTFQGETSADISFYFKTLTPWGVFLENMGKEDFIKLELKSATEVSFSFDVGNGPVEIVVRSPTPLNDDQWHRVTAERNVKQASLQVDRLPQQIRKAPTEGHTRLELYSQLFVGGAGGQQGFLGCIRSLRMNGVTLDLEERAKVTSGFISGCSGHCTSYGTNCENGGKCLERYHGYSCDCSNTAYDGTFCNKDVGAFFEEGMWLRYNFQAPATNARDSSSRVDNAPDQQNSHPDLAQEEIRFSFSTTKAPCILLYISSFTTDFLAVLVKPTGSLQIRYNLGGTREPYNIDVDHRNMANGQPHSVNITRHEKTIFLKLDHYPSVSYHLPSSSDTLFNSPKSLFLGKVIETGKIDQEIHKYNTPGFTGCLSRVQFNQIAPLKAALRQTNASAHVHIQGELVESNCGASPLTLSPMSSATDPWHLDHLDSASADFPYNPGQGQAIRNGVNRNSAIIGGVIAVVIFTILCTLVFLIRYMFRHKGTYHTNEAKGAESAESADAAIMNNDPNFTETIDESKKEWLI

SEQ ID NO: 178118 - protein, 390 aa, Artificial Sequence
  derived and/or modified sequence
MNGVTLDLEERAKVTSGFISGCSGHCTSYGTNCENGGKCLERYHGYSCDCSNTAYDGTFCNKDVGAFFEEGMWLRYNFQAPATNARDSSSRVDNAPDQQNSHPDLAQEEIRFSFSTTKAPCILLYISSFTTDFLAVLVKPTGSLQIRYNLGGTREPYNIDVDHRNMANGQPHSVNITRHEKTIFLKLDHYPSVSYHLPSSSDTLFNSPKSLFLGKVIETGKIDQEIHKYNTPGFTGCLSRVQFNQIAPLKAALRQTNASAHVHIQGELVESNCGASPLTLSPMSSATDPWHLDHLDSASADFPYNPGQGQAIRNGVNRNSAIIGGVIAVVIFTILCTLVFLIRYMFRHKGTYHTNEAKGAESAESADAAIMNNDPNFTETIDESKKEWLI

SEQ ID NO: 178119 - DNA, 3996 bp, Artificial Sequence
  derived and/or modified sequence
atgcaggcagcgccaagagcggggtgcggagcagccttactgctgtggattgttagttcctgcctatgccgcgcctggacagccccaagtacatcccaaaaatgcgatgagcctctggtgagcgggctgccacacgtggcattctccagtagttcgtccataagtggatcatattctcccggctatgccaaaatcaacaagcgcgggggtgcaggtggatggtctccatctgactctgatcactaccagtggcttcaggtcgacttcggaaacagaaagcaaatctccgccatcgccacacagggacgctactccagtagcgattgggtaacccagtatagaatgctctattctgacacagggcggaactggaaaccttatcaccaagacggtaacatttgggcctttcccggcaatatcaattccgatggcgttgtgcgccacgagcttcagcaccctattatagctagatatgtgcgcattgttcccctagattggaacggggagggacggataggcctccggatcgaggtctacggttgttcttattgggcggatgttataaattttgacggacatgttgttctcccttatcgctttaggaataagaagatgaaaacccttaaagacgtcatcgctctcaactttaaaacctccgaatctgaaggagttatcctgcacggcgagggacaacaaggcgactacatcacactcgagttaaagaaggcaaagctggtgctcagcctgaaccttggcagcaatcagctcgggccgatctatgggcatacctcagttatgactggctcattgcttgacgatcaccattggcacagcgttgtgatcgaacgccagggacgatcgattaacctgacgcttgaccgctccatgcaacacttcagaactaatggtgaatttgactatttagacttggactacgaaatcacttttggaggcattccattcagcggcaagccttcttcctcatcaaggaagaactttaaggggtgtatggagtctattaactacaacggcgttaatattaccgacctcgcccgcaggaagaagctcgaacccagcaatgtgggtaacctgtccttctcttgcgttgaaccctacactgttccagtattctttaatgccacttcttacctggaggtgccagggagactgaaccaggatctattctccgtgtcatttcaattccgcacatggaaccctaacggcttactggtattttctcatttcgctgacaatctagggaatgtcgaaattgacttgacagaatccaaggtaggcgtccacataaatatcactcagacgaagatgtctcagattgatatttcctcgggatctggtctgaacgacggtcagtggcatgaggtccggttcctggcaaaggagaattttgccatccttaccatcgacggtgacgaggcctccgcagtacgcaccaattcacctctgcaagtcaagacaggtgaaaagtacttctttggagggttcctcaaccagatgaacaacagtagccattctgtcctgcaacctagctttcaaggctgcatgcagttaatccaagtagatgaccaactcgtaaatctgtatgaagtggcgcagagaaagcctgggagctttgctaatgtgtctattgatatgtgtgccattatcgaccggtgcgttcccaaccactgcgaacacggagggaaatgctcccagacatgggacagctttaaatgtacttgtgacgaaacaggctactccggagccacttgtcacaactcaatctacgaaccaagctgcgaggcgtacaagcacctcggacagacatccaactattactggatcgatcctgatgggtccggcccgctgggccccctcaaggtctattgcaatatgaccgaggataaagtgtggaccattgtcagccacgacctgcaaatgcaaacacctgtggtgggctacaaccccgagaagtacagcgtcacacagctcgtgtatagcgcgagtatggatcaaatttccgcaataactgacagtgccgagtactgtgaacagtacgtatcttacttttgtaagatgtcccgcctcttgaacaccccagacggttccccatacacgtggtgggtcggaaaagccaacgaaaagcactactactggggaggatcaggccccggcatacagaagtgcgcctgcggcattgagcgcaactgtactgatcctaagtactattgtaactgcgacgcggattacaaacagtggcggaaagacgcaggctttctctcttataaagaccatctgccagttagtcaagtggtcgtcggtgacaccgacagacaaggtagcgaagccaagctgtctgtggggcccttgaggtgtcaaggcgataggaactactggaatgcggcctcttttcccaacccttcaagctatctgcatttctctacatttcagggggaaaccagcgctgacatttcgttttatttcaagaccctgaccccttggggtgtgttcctggagaacatgggcaaagaagacttcattaagctggaactcaagtccgctacggaagtgtcgttctcgttcgatgtcggaaatgggcctgttgagattgttgtccgcagtcccacgcctttgaacgatgaccagtggcatagagttaccgcagagcggaacgtcaaacaggccagcttgcaggtagaccggctgccccagcagattagaaaagcaccaacagaaggccacaccagactggaactctatagccaactctttgttggcggggccggaggtcagcagggcttcctagggtgtattaggtccctgagaatgaatggggtgacactggacctcgaagaacgggctaaggtcacctctggattcatttcgggatgttccggccactgtacatcttacggcaccaactgtgagaacggtgggaaatgtctggaacggtatcacggctattcttgtgactgcagcaacacagcatacgacggtacgttttgtaataaagacgtcggagcgttttttgaagagggcatgtggttaagatacaattttcaagcccctgccacgaacgcaagggatagctcttcccgtgtcgataacgcccccgaccagcagaatagccaccctgatcttgcccaggaagaaatcagattcagtttcagtaccactaaggccccatgtatcctgttatatatcagctcttttaccactgactttctagcggtgctcgtcaaaccaaccgggtcacttcagattagatataatctgggtggaaccagggagccgtacaacattgatgtagatcacagaaacatggcaaacgggcagccacattcggtgaatatcaccaggcacgagaaaactatttttctgaagctggatcattatccgagcgtgagctatcatctgcccagttcaagcgacactctttttaatagtcccaagtccctcttcctcgggaaggtcatcgaaacaggcaagatcgatcaggaaatccacaaatataatactcccggtttcacagggtgcctttctcgggttcaatttaaccaaattgcaccccttaaggccgcacttcgacagactaatgcctcagctcacgttcacattcagggagagctcgttgagagcaactgtggagccagtccgctcaccttgtcaccgatgagctcagcaaccgacccatggcacctcgatcacttggactccgcaagcgcggactttccttataacccgggccaggggcaggccatccgaaatggcgtgaaccgcaacagtgccatcataggcggtgtgatcgctgtggttattttcaccattctgtgcactctggtgtttctgatacggtacatgtttcgtcacaagggaacctaccatactaacgaagccaagggcgcagagtctgcagagtccgcagacgctgcaatcatgaataacgaccctaatttcaccgagaccatcgatgaaagtaaaaaagagtggctcatctag

SEQ ID NO: 178120 - DNA, 3996 bp, Artificial Sequence
  derived and/or modified sequence
atgcaggccgcccccagggctggctgtggggccgccctgctgctgtggatcgtgagcagctgcctgtgccgggcctggacagcccccagcaccagccagaagtgtgatgagcccctggtgtctggcctgccccacgtggccttcagcagcagcagcagcatcagcggcagctacagccctggctacgccaagatcaacaagagaggaggagctgggggctggagccccagcgacagcgaccactaccagtggctgcaggtggactttggaaacaggaagcagatcagcgccatcgccacccagggccgctacagcagcagtgactgggtgacccagtacaggatgctgtacagcgacaccggcaggaactggaagccctaccaccaggacggcaacatctgggccttccctggcaacatcaacagtgatggagtggtgagacatgagctgcagcaccccatcatcgcccgctacgtgagaattgtgcccctggactggaatggagagggccgcatcggcctgcgcatcgaggtgtatggctgcagctactgggcagatgtgatcaactttgatggccacgtggtgctgccctaccgcttcaggaacaagaagatgaagaccctgaaggatgtgattgccctgaacttcaagaccagcgagagcgagggcgtcatcctgcatggagagggccagcagggcgactacatcaccctggagctgaagaaggccaagctggtgctgagcctgaacctgggcagcaaccagctgggccccatctacggccacacctctgtgatgacaggcagcctgctggatgaccaccactggcacagcgtggtgattgagcggcagggccgcagcatcaacctgaccctggaccgctccatgcagcacttccgcaccaacggggagtttgactacctggacctggactatgagatcaccttcggcggcatccccttcagcggcaagcccagcagcagcagcaggaagaacttcaagggctgcatggagagcatcaactacaatggagtgaacatcacagacctggcccggaggaagaagctggagcccagcaatgtgggcaacctgtccttcagctgtgtggagccctacacagtgcctgtgttcttcaatgccaccagctacctggaggtgcccggccgcctgaaccaggacctcttctctgtgtccttccagttccgcacctggaaccccaacggcctgctggtgttcagccactttgctgacaacctgggcaatgtggagattgacctgacagagagcaaggtgggcgtgcacatcaacatcacccagaccaagatgagccagattgacatcagcagcggcagcggcctgaatgatggccagtggcatgaggtgcgcttcctggccaaggaaaattttgccatcctgaccattgatggagatgaggccagcgctgtgaggaccaacagccccctgcaggtgaagacaggagagaagtacttcttcggcggcttcctgaaccagatgaacaacagcagccacagcgtgctgcagcccagcttccagggctgcatgcagctgatccaggtggatgaccagctggtgaacctgtatgaggtggcccagaggaagccaggcagctttgccaacgtgtccattgacatgtgtgccatcatcgacagatgtgtgcccaaccactgtgaacatggaggcaagtgcagccagacctgggacagcttcaagtgcacctgtgatgaaacaggctacagcggggccacctgccacaacagcatctatgagcccagctgtgaggcctacaagcacctgggccagaccagcaactactactggattgatcctgatggcagcggccccctgggccccctgaaggtgtactgcaacatgacagaggacaaggtgtggaccatcgtgtcccatgacctgcagatgcagacccctgtggtgggctacaaccctgagaagtacagcgtgacccagctggtgtacagcgcctccatggaccagatcagcgccatcacagacagcgctgagtactgtgagcagtatgtgtcctacttctgcaagatgagccggctgctgaacaccccagatggcagcccctacacctggtgggtgggcaaggccaatgagaagcactactactggggcggcagcggccctggcatccagaagtgtgcctgtggcatcgagaggaactgcacagaccccaagtactactgcaactgtgatgctgactacaagcagtggaggaaggatgctggcttcctgagctacaaggaccacctgcctgtgtcccaggtggtggtgggggacacagaccggcagggcagcgaggccaagctgtctgtgggccccctgcgctgccagggcgacaggaactactggaatgctgccagcttccccaaccccagcagctacctgcacttcagcaccttccagggcgagaccagcgctgacatctccttctacttcaagaccctgaccccctggggcgtcttcctggagaacatgggcaaggaggacttcatcaagctggagctgaagagcgccacagaggtgtccttctcctttgatgtgggcaatggacctgtggagatcgtggtgcgcagccccacccccctgaatgatgaccagtggcaccgggtgacagctgagagaaatgtgaagcaggccagcctgcaggtggaccggctgccccagcagatcaggaaggcccccacagagggccacacccggctggagctgtacagccagctgtttgtgggcggggccggcggccagcagggcttcctgggctgcatccgcagcctgaggatgaatggagtgaccctggacctggaggagcgggccaaggtgaccagcggcttcatcagcggctgcagcggccactgcaccagctatggcaccaactgtgaaaatggaggcaagtgcctggagcgctaccacggctacagctgtgactgcagcaacacagcctatgatggcaccttctgcaacaaggatgtgggcgccttctttgaggagggcatgtggctgcgctacaacttccaggccccagccaccaatgcccgggacagcagcagccgggtggacaatgccccagaccagcagaacagccacccagacctggcccaggaggagatccgcttctccttcagcaccaccaaggccccctgcatcctgctgtacatcagcagcttcaccacagacttcctggccgtgctggtgaagcccaccggcagcctgcagatccgctacaacctgggcggcacccgggagccctacaacattgatgtggaccacaggaacatggccaacggccagccccacagcgtgaacatcaccaggcatgagaagaccatcttcctgaagctggaccactaccccagcgtgtcctaccacctgcccagcagcagtgacaccctcttcaacagccccaagagcctcttcctgggcaaggtgattgagaccgggaagattgaccaggagatccacaagtacaacaccccaggcttcaccggctgcctgagccgggtgcagttcaaccagatcgcccccctgaaggccgccctgcggcagaccaatgccagcgcccacgtgcacatccagggcgagctggtggagagcaactgtggggccagccccctgaccctgagccccatgagcagcgccacagacccctggcacctggaccacctggacagcgccagcgctgacttcccctacaaccctggccagggccaggccatcagaaatggagtgaacagaaattctgccatcatcggcggcgtgattgctgtggtgatcttcaccatcctgtgcaccctggtgttcctgatccgctacatgttccgccacaagggcacctaccacaccaatgaggccaagggagctgagagcgctgagagcgcagatgctgccatcatgaacaatgaccccaacttcacagagaccattgatgagagcaagaaggagtggctgatctag

SEQ ID NO: 178121 - DNA, 3996 bp, Artificial Sequence
  derived and/or modified sequence
atgcaggccgccccccgggccggctgcggcgccgccctgctgctgtggatcgtctcaagttgtctgtgcagagcctggacggcgccttccacgtctcagaaatgtgacgagccgcttgtaagcggcttaccacacgtcgcgttcagcagcagcagtagtatcagtggaagctattcccccgggtatgccaaaatcaacaagaggggcggggcgggggggtggtctccttcagacagcgaccactatcagtggctccaggtagactttggaaataggaagcagatcagcgccattgccactcagggaaggtactcttcctccgactgggttacccaatataggatgctctacagtgacacgggccgaaattggaagccttatcaccaggacggaaatatctgggcctttccaggcaacatcaattccgatggagttgttcggcatgagctgcagcaccccatcatagcccgctatgtgaggattgtgcccctcgactggaacggcgagggcagaataggtctgagaatcgaggtctatggttgcagctactgggcagatgtaattaatttcgatggccatgtcgtgctcccgtaccgattccgcaacaaaaagatgaagactttaaaagacgtgattgccttgaatttcaaaacttcggagagtgagggcgttattcttcacggagagggacagcaaggtgattatatcactctcgagctgaagaaggctaagctcgtgctctctcttaaccttgggtccaatcagctgggacccatttacggccacacctcagtgatgactgggtcgctcctggacgaccaccactggcattcagtggtgattgaaaggcagggtaggtccatcaaccttacactcgaccgctctatgcagcatttccggaccaatggcgaattcgactatctggacctcgattatgagatcacttttggtggtatacctttctctggaaagccttcatcctcttcaagaaaaaattttaaaggctgcatggaatcaataaactataacggtgtgaacatcactgaccttgccaggcgcaagaagcttgaaccttctaatgtgggcaatttgtcattttcatgcgtggagccttacactgtaccagtcttcttcaatgctactagctatctggaagtccccggaagattaaaccaggacctgttctccgtgtcctttcagttccgcacttggaatcccaatgggttgcttgtgttttcccacttcgccgataacctggggaatgtggagattgacctcacagagtccaaggtgggtgttcacattaatatcactcaaactaaaatgagccagattgacatcagttccggaagcgggctgaacgacggacagtggcacgaagtgaggtttcttgcaaaggagaacttcgctatcctgactatcgatggtgatgaggcttcagcagttcggacaaattccccactccaggtaaaaaccggggaaaaatactttttcggcggattcctcaatcagatgaacaactcctcccactcagttctgcaaccaagctttcagggctgcatgcagctcatccaggtggacgatcagcttgtgaatctctatgaggtcgcccagcggaaacccggaagctttgccaacgtgtccatcgatatgtgtgcgattattgatagatgtgtgcccaaccactgtgaacacggcggtaagtgctcacagacatgggattccttcaaatgtacttgtgatgagaccggctactcgggtgcgacgtgtcataacagcatctacgagccgtcttgcgaagcctacaagcacttggggcagactagtaactattattggatcgatcccgatggaagtggtccactggggcctctgaaggtctactgcaacatgaccgaagataaagtgtggacaatcgtgagtcacgatttacagatgcagacccccgtggttggctacaatccggaaaagtactccgtcactcagctcgtgtatagcgcctctatggaccagattagcgctatcactgattctgcagagtattgcgaacagtacgtgtcctacttctgcaaaatgtctcggctgctgaatacccccgatgggtccccctacacctggtgggtagggaaagcaaatgagaaacattattactggggtggctctggccccggaatccagaagtgcgcctgtggcattgaacgcaactgtaccgatccaaagtattattgcaactgcgatgccgactataagcaatggcggaaagatgcgggtttcctaagctataaagaccacctccccgtgtcacaggtggttgtaggagacacagaccgtcaggggtctgaagccaaactctctgtcgggcctcttcgatgtcaaggcgatcggaattattggaatgccgctagttttccgaatccatccagctatctgcatttcagcactttccagggggagacgagcgctgatattagtttctacttcaagaccctcactccctggggtgtattcctcgagaacatgggcaaagaggacttcatcaaactggagttgaaaagcgctacagaagtcagcttctctttcgacgtcggcaacggtcctgtcgaaatcgtggtccgcagcccaaccccgttgaatgatgatcagtggcatcgggtgactgctgagagaaacgtaaaacaggctagccttcaggtggatcgcctgccacagcaaattaggaaagcccccactgagggacacacccggctggagctgtattctcaactgttcgttggaggagcagggggccagcagggctttctaggctgcattagatctctgaggatgaatggagtgactcttgatctcgaggagcgagctaaggtgacttctggcttcatcagtggctgttcggggcactgcacatcttacggaactaactgtgaaaacggtggcaagtgcctggaacgctaccacggctacagctgtgactgttcgaatacagcctacgatggaacattctgtaataaggacgtgggcgctttttttgaagaggggatgtggttgcggtacaactttcaagctcctgcgaccaatgctagagatagttccagccgcgtggacaacgcccctgaccagcagaattcccatcctgacttagctcaggaggagatccgcttctccttctcaaccacaaaagctccatgtattttactctacatatccagcttcactaccgatttcctggctgtgctggttaaaccgacggggtccctgcagattcgctacaacctcggagggacccgggaaccatacaacatcgacgtcgatcataggaacatggcaaacggacagcctcacagtgtgaatattacccgacacgagaagacaatattcctcaagctggaccactaccccagcgtatcgtaccaccttccgtctagctctgacacactttttaactccccgaaaagcttgtttctaggtaaagtcatcgaaacaggtaagatcgaccaggaaattcacaaatacaacactcctggattcacggggtgcctgtcccgggtgcaatttaaccagatcgcacctctcaaggcagctctcaggcaaactaacgcctctgcccacgtccacatacagggtgagttagtggagtcaaattgtggggcatcacccctcactctcagccctatgtcttccgccacagacccatggcacttagatcacctggacagtgcctccgctgatttcccctataatcctggccaaggtcaggctatacgcaacggtgtgaacaggaatagcgcgatcattggcggagtcatcgcggttgttatctttaccatactgtgcacactggtcttcctgatcaggtacatgtttcgccacaagggtacatatcatactaacgaagctaagggagctgaatcagccgaaagcgcagacgccgccattatgaataatgatccgaatttcactgagaccattgacgaatctaagaaagagtggctgatatag

SEQ ID NO: 178122 - DNA, 3996 bp, Artificial Sequence
  derived and/or modified sequence
atgcaggccgctccacgggctggctgtggcgctgcgctgctgttgtggatcgtgtcgagctgcctgtgccgcgcatggaccgcgccatctacctcccagaagtgtgacgagccgctcgtgtctggactccctcatgtcgcattcagctccagttctagtatctccggatcctattcgcccggttatgccaaaattaataagcggggtggcgcaggaggctggtccccatctgattctgatcattaccaatggcttcaggtggacttcggaaacagaaaacaaatttctgcaatcgctacccagggcagatattcatcctctgattgggtgacccaatatcggatgttatactctgacactgggagaaactggaaaccgtaccatcaggatggcaacatctgggcgttccctggaaatattaactctgacggagttgtcaggcacgaattgcagcatcccattatcgcacgatatgtgcgaattgtgcccttggactggaatggtgaaggtaggatcggcctgcgcatagaggtgtatgggtgctcttactgggcagacgtgattaactttgacggccacgtggttttgccatatcggttcaggaacaagaaaatgaagacactgaaagatgtaattgcgctcaactttaagacttctgagtcagagggcgtgatcctgcatggcgaggggcagcagggggattatattacactggagctgaaaaaagccaaactagtgctgtctcttaacctgggatccaaccaactgggacccatctacggtcacactagcgtaatgaccggaagcttactcgacgaccaccattggcacagtgtagtgattgagaggcaaggcaggtcaatcaatctgacattagacagatctatgcagcacttcagaaccaacggtgagttcgattacctagatctcgattatgaaatcactttcggcggtatccctttctctggtaaaccgtcaagtagctcacgcaagaatttcaaaggctgcatggaatccatcaactataatggcgtcaacattaccgatctagctcgacgaaagaagctggaaccaagtaatgttggaaacctgagtttttcatgcgtggagccctacacggtgccagtcttctttaatgctacctcatatttagaggtcccaggacggctaaatcaagacctgttcagcgtgagcttccagtttcgcacttggaacccgaatggactcctggtgtttagccacttcgccgataatcttggcaacgtggaaatcgatcttaccgagtccaaggttggcgtccacatcaatattacccaaactaaaatgagccaaatcgacatctcgtcaggcagcggtttaaacgatggccaatggcatgaggtcagatttcttgccaaagagaattttgcaatcctcacaatcgatggggatgaagcgtccgccgtcaggaccaactccccgctgcaagtcaaaaccggcgagaaatactttttcggaggtttcctcaatcagatgaataatagctcccactcggttcttcagcccagtttccaggggtgtatgcaactcatccaggtggacgatcaactggtcaacctgtacgaggtcgcccagcgaaaacccggatcatttgctaacgtaagcatcgacatgtgcgctatcatcgatagatgtgtcccaaatcattgcgaacacggcggaaagtgtagtcaaacatgggacagtttcaaatgtacctgtgacgagactggatattccggggctacgtgccacaattccatttacgagccttcttgtgaagcatacaagcatctgggacagacttccaactactattggatcgatcctgatggcagcgggcctctgggaccactcaaggtatattgtaatatgaccgaagataaggtttggaccatcgtgagtcacgacctgcagatgcaaacacctgtggtcggctacaatccggaaaagtacagcgtcacccagctcgtgtacagcgcgtcaatggatcagatttccgcgattaccgatagtgctgagtactgtgagcaatatgtctcctacttttgtaagatgtctagactgcttaataccccagatgggagcccttatacttggtgggtgggcaaggctaatgagaaacactattactggggaggctcagggccaggtatccaaaagtgcgcttgcggaattgagaggaattgtaccgacccaaagtactactgtaactgtgacgcagattataaacagtggcgcaaagacgccggattcctgagttataaagaccacctgcctgtatctcaagttgtcgtaggcgacactgatcgacagggttcagaggccaagcttagtgtagggcctttgaggtgccagggagataggaattactggaatgccgcaagctttcccaacccttcttcataccttcacttttccactttccagggggagacaagcgcagacatttcattctacttcaagacattaacgccgtggggtgtgttcctggagaacatgggcaaggaagacttcataaaactggagctgaaaagcgcaacggaagtgagtttttcatttgacgttggtaacgggcctgtggaaatcgtggtgcggagtcctacccccttaaatgacgaccagtggcaccgtgtgaccgcagaaagaaatgtcaagcaagcatctctgcaggtggacagactaccccagcagatccgaaaggcccctaccgagggccatacccggttggagctgtatagccagctgtttgtggggggtgccggtgggcagcaaggatttcttgggtgcatcagatctttgagaatgaacggagtgacacttgacctggaagaaagagccaaggtcaccagtggatttatttctgggtgctcaggccattgcacatcgtacgggaccaattgcgagaatggcggaaaatgcctggaacggtatcacgggtattcctgcgactgtagcaatacagcctacgatggaacattctgcaataaggatgtcggggcattctttgaagagggtatgtggctgcgttacaacttccaggcacccgctaccaatgccagggatagcagctccagggtcgacaatgccccagaccagcagaactcacacccagatctggctcaggaggagatcagattctccttcagcacaactaaggctccatgtatcctgctttacatttccagctttactaccgatttccttgccgtgctcgttaaacctaccggttccctgcagattagatataacctcggcggtaccagggaaccgtataatatcgatgtggaccatcgtaacatggcgaacgggcagcctcattctgttaatatcacgcgtcacgaaaagacaattttcctaaaattagaccactatccatctgtctcctaccacctcccctcaagctccgacacattgtttaattcccctaaatccctcttcctcggcaaggttatagagaccggcaagatcgatcaggagatccataaatacaatactccaggattcaccggttgcttgtctagagtgcaattcaatcagatcgcacctctgaaggccgcactgcgacaaacaaatgccagtgctcatgtacacatccagggtgagctggttgaaagtaactgcggcgcaagccctctcaccctgtcacccatgtcaagtgccactgatccttggcatcttgatcatctggattcagcctcggccgattttccatacaatcctggccaggggcaggcaatacgcaacggcgtgaacaggaattctgctattatcggtggcgtgatagcagtggtgatattcactattctttgtactctcgttttcctaattcgctatatgttccgacataaggggacctatcacactaacgaggccaagggtgctgaatcggcagagtcagccgacgccgctataatgaacaacgatcccaatttcaccgaaactatcgacgagtccaaaaaggagtggctgatatag

SEQ ID NO: 178123 - DNA, 9894 bp, Artificial Sequence
  derived and/or modified sequence
acaagctctccatgtgagctgacaggcgagtggaaacccctcgagtcacgctgcccggcggcggagggagcgctcgcccgcagtggcaacagctgcaccaccgtccccgtcgctctgccttcctcttctgcagcctctgctcttctgattacctccctcccccgtcctttggtgatttttttttttcaagaaggagagggcggggtaggtgtccgttccctcccctcttccccctcctttgccttcttggtttgaatttcctcccccggcgttgcactggcacacagtgcaagaggcaatacccgcacggagggagaacgaaggctgagactcccctgccgctccaagcccggaagaactggagcctggaggggggtgaggggagaagaggaagcgggaggggcttggcttcctcgcgtatttgaggacagcccatctcccttcaagaaccctacggagagtcggactgcatctccgcagcgagctcttggagcgccgccggccgggaggcgaaggatgcaggcggctccgcgcgccggctgcggggcagcgctcctgctgtggattgtcagcagctgcctctgcagagcctggacggctccctccacgtcccaaaaatgtgatgagccacttgtctctggactcccccatgtggctttcagcagctcctcctccatctctggtagctattctcccggctatgccaagataaacaagagaggaggtgctgggggatggtctccatcagacagcgaccattatcaatggcttcaggttgactttggcaatcggaagcagatcagtgccattgcaacccaaggaaggtatagcagctcagattgggtgacccaataccggatgctctacagcgacacagggagaaactggaaaccctatcatcaagatgggaatatctgggcatttcccggaaacattaactctgacggtgtggtccggcacgaattacagcatccgattattgcccgctatgtgcgcatagtgcctctggattggaatggagaaggtcgcattggactcagaattgaagtttatggctgttcttactgggctgatgttatcaactttgatggccatgttgtattaccatatagattcagaaacaagaagatgaaaacactgaaagatgtcattgccttgaactttaagacgtctgaaagtgaaggagtaatcctgcacggagaaggacagcaaggagattacattaccttggaactgaaaaaagccaagctggtcctcagtttaaacttaggaagcaaccagcttggccccatatatggccacacatcagtgatgacaggaagtttgctggatgaccaccactggcactctgtggtcattgagcgccaggggcggagcattaacctcactctggacaggagcatgcagcacttccgtaccaatggagagtttgactacctggacttggactatgagataacctttggaggcatccctttctctggcaagcccagctccagcagtagaaagaatttcaaaggctgcatggaaagcatcaactacaatggcgtcaacattactgatcttgccagaaggaagaaattagagccctcaaatgtgggaaatttgagcttttcttgtgtggaaccctatacggtgcctgtctttttcaacgctacaagttacctggaggtgcccggacggcttaaccaggacctgttctcagtcagtttccagtttaggacatggaaccccaatggtctcctggtcttcagtcactttgcggataatttgggcaatgtggagattgacctcactgaaagcaaagtgggtgttcacatcaacatcacacagaccaagatgagccaaatcgatatttcctcaggttctgggttgaatgatggacagtggcacgaggttcgcttcctagccaaggaaaattttgctattctcaccatcgatggagatgaagcatcagcagttcgaactaatagtccccttcaagttaaaactggcgagaagtacttttttggaggttttctgaaccagatgaataactcaagtcactctgtccttcagccttcattccaaggatgcatgcagctcattcaagtggacgatcaacttgtaaatttatacgaagtggcacaaaggaagccgggaagtttcgcgaatgtcagcattgacatgtgtgcgatcatagacagatgtgtgcccaatcactgtgagcatggtggaaagtgctcgcaaacatgggacagcttcaaatgcacttgtgatgagacaggatacagtggggccacctgccacaactctatctacgagccttcctgtgaagcctacaaacacctaggacagacatcaaattattactggatagatcctgatggcagcggacctctggggcctctgaaagtttactgcaacatgacagaggacaaagtgtggaccatagtgtctcatgacttgcagatgcagacgcctgtggtcggctacaacccagaaaaatactcagtgacacagctcgtttacagcgcctccatggaccagataagtgccatcactgacagtgccgagtactgcgagcagtatgtctcctatttctgcaagatgtcaagattgttgaacaccccagatggaagcccttacacttggtgggttggcaaagccaacgagaagcactactactggggaggctctgggcctggaatccagaaatgtgcctgcggcatcgaacgcaactgcacagatcccaagtactactgtaactgcgacgcggactacaagcaatggaggaaggatgctggtttcttatcatacaaagatcacctgccagtgagccaagtggtggttggagatactgaccgtcaaggctcagaagccaaattgagcgtaggtcctctgcgctgccaaggagacaggaattattggaatgccgcctctttcccaaacccatcctcctacctgcacttctctactttccaaggggaaactagcgctgacatttctttctacttcaaaacattaaccccctggggagtgtttcttgaaaatatgggaaaggaagatttcatcaagctggagctgaagtctgccacagaagtgtccttttcatttgatgtgggaaatgggccagtagagattgtagtgaggtcaccaacccctctcaacgatgaccagtggcaccgggtcactgcagagaggaatgtcaagcaggccagcctacaggtggaccggctaccgcagcagatccgcaaggccccaacagaaggccacacccgcctggagctctacagccagttatttgtgggtggtgctgggggccagcagggcttcctgggctgcatccgctccttgaggatgaatggggtgacacttgacctggaggaaagagcaaaggtcacatctgggttcatatccggatgctcgggccattgcaccagctatggaacaaactgtgaaaatggaggcaaatgcctagagagataccacggttactcctgcgattgctctaatactgcatatgatggaacattttgcaacaaagatgttggtgcattttttgaagaagggatgtggctacgatataactttcaggcaccagcaacaaatgccagagactccagcagcagagtagacaacgctcccgaccagcagaactcccacccggacctggcacaggaggagatccgcttcagcttcagcaccaccaaggcgccctgcattctcctctacatcagctccttcaccacagacttcttggcagtcctcgtcaaacccactggaagcttacagattcgatacaacctgggtggcacccgagagccatacaatattgacgtagaccacaggaacatggccaatggacagccccacagtgtcaacatcacccgccacgagaagaccatctttctcaagctcgatcattatccttctgtgagttaccatctgccaagttcatccgacaccctcttcaattctcccaagtcgctctttctgggaaaagttatagaaacagggaaaattgaccaagagattcacaaatacaacaccccaggattcactggttgcctctccagagtccagttcaaccagatcgcccctctcaaggccgccttgaggcagacaaacgcctcggctcacgtccacatccagggcgagctggtggagtccaactgcggggcctcgccgctgaccctctcccccatgtcgtccgccaccgacccctggcacctggatcacctggattcagccagtgcggattttccatataatccaggacaaggccaagctataagaaatggagtcaacagaaactcggctatcattggaggcgtcattgctgtggtgattttcaccatcctgtgcaccctggtcttcctgatccggtacatgttccgccacaagggcacctaccataccaacgaagcaaagggggcggagtcggcagagagcgcggacgccgccatcatgaacaacgaccccaacttcacagagaccattgatgaaagcaaaaaggaatggctcatttgaggggtggctacttggctatgggatagggaggagggaattactagggaggagagaaagggacaaaagcaccctgcttcatactcttgagcacatccttaaaatatcagcacaagttgggggaggcaggcaatggaatataatggaatattcttgagactgatcacaaaaaaaaaaacctttttaatatttctttatagctgagttttcccttctgtatcaaaacaaaataatacaaaaaatgcttttagagtttaagcaatggttgaaatttgtaggtactatctgtcttattttgtgtgtgtttagaggtgttctaaagacccgtggtaacagggcaagttttctacgtttttaagagcccttagaacgtgggtattttttttcttgagaaaagctaatgcacctacagatggcccccaacattctcttccttttgcttctagtcaaccttaatgggctgttacagaaactagttcgtgtttatatactatttcctttgatgtcctataagtcggaaaagaaaggggcaaagagaacctattatttgccagtttttaagcagagctcaatctatgccagctctctggcatctggggttcctgactgataccagcagttgaaggaagagagtgcatggcacctggtgtgtaacgacacaatcagcacaactggagagaggcattaaagaaccagggaaggtagtttgatttttcattgaattctacaagctaatattgttccacgtatgtagtcttagaccaatagctgtaactatcagctgcaataccatggtgaccagctgttacaaaagattttttcctgttttatctgaaacatactggatttatatatgtataagcgcctcaatggggaattagagccagatgttatgatttgtttgctctttttcttttatagtttagttatagcaaaaatatggataatttctagtgaatgcataaattaggttgcgtttcttattttgctttaaatctctggtagtttttccacccctgtgacacaatcctaatagacagtgtcctgtaaatggacacaacacaataaagtcaagttattattgctgttactctggatgatatggaaaacactgccatattttaaatcaactactccacgtgtttttccatccaatcacactgctgtgattcagggatctttcttctaagacggacacatttgaacctcaggttcatcacaaacctggtacctgttgcttcccagaggatggagaagtgtagttaatcacacctcttagtttaatctgaaatcttgacccagttatttaacaaataaatacctcattgattatatttaaaagtaatacacttcctgtaaacaaatggggacaatgcatccaaaaaatctttttaaacagattacacaaaaattatttccagaaaggctaccatttatcatcattatatttcaagcctcttatacttaataagcactttctaaaaagtcttgagatcccaccattctgaggaattcaatatgatcactttttccttctttgcctgggagaggttaagaggaggtttcgaaggtatagatgctattgttctgatggcccggctgaataaaatggaaattctagtttgttagaattatgcattctttttcaagattctcagtgtgcctaacttattggagcacatcagtttcttgggtaatggaaaacattacctagagttgccagtggcacattacaccagtacagagcacattccaaaggagacattggaccagttaattcccatacaagtcaaggtaacagaacaaaagggaatcctgatgcccttttaccattgctggttgagctcaggcactgtcatggacacccttaattttaaaaggttttaatcattcttctataaaatacatttaaaatggaaaaatacttaatatcactaaatatcagaacaatgtaacatttacaaatgacatattgaaagcaaaggctgttttatttagccaagatgattaccattaggagttactttatgtattgttgaaagcaaattttaaacatgatgttttagaagtgtttctgatttttaaacctggtttacaggtattacttctgcacttaccaaataatgccagatggaaatttattatttcttgcaattcccatgatagctctgttctttatgcattgtctcaacactttcccttttttcccaaaatgagtagagaattaaagccacccaaaacagcttctgctactaaaatgttctcatcctttctcctccctctccttttcctgccacaaaaggtgaaaaatgagatccaatcctctcaccaaaatttcaaacctaggacactggaatgactgcagggatcagtggttctcccatatcaccatcaattaagacatataggacactgtcttccttcaagagggttacaatgtggccatcagacaggaaaccaaacggtggataaagtattaagtaactaagtgccaaataaatgctggaaatcttgacctctccttgggattatgggtgtaacaaaaatccctacatctgtttatgaaggccatattcagtacattttaaatggtaaataatctgtttatgtgaagaaaaagaattaagtctttcttccaactctctccttggatagcctagcacagtgcagcctccataaccatgacattcccgcccaagctctcagtgcctaatcctgctttgtcattcacatctcacaaaatcttgacatcttacattccaatacattatcaagcaagcacaagtatgctggtagtagcctctttaaataatatgtatagacaacaacaacgacaaaaaatagactgttttaaagtttcagggaaagttggtggctgatttaaagttgtgcaggaaacatcttctgtgtatgaagcaaatgtcgatgttttgaaaaaagctaggagatgactttgaatgaatgcaaggttagtgagatcctaagctctcaaaatagcatattccctagagctcaagaaagctggtccaggaggttgaaaaagctattttgttgttaaattattttctggcccttcttaatatttaaaaatgtatttccccttgtggctttcaaccacctgctcaaaaaaagagacttgttacatgaaagttttcattaaagagctgaaaacaagaatttagagagccattcctagaaaatgtcctactgccctgcatttgacaaacaagcatcctttactaacaagagcaggaattcagaggcacaagaaaaagcattggcatgagccaaagagtctgtcttaatgttacttttgaaaatctgctgagcggccaccatatgcaggctgagagctgggcacaggcgaagccattggaagcacttcaggaacaagcacacagctgtgggacttgaacatgcaagtgttcaggttgtgtcaagaagcttttctttccttctatgatggaatctgttcttttctatcctacttttttctctcttcctctcctcaccacattataccctgctcttacgcagtaaacgttttaatggcccgtttatgtctcatgcctccaaacaacactgaatttgaaaccccccattttttcttttcaccaccctgttgagcaattttcccaaaaaaagggcagcaattattaaattgaattcaagtaagccagccaaagataggtcctaaattgctagtcccagtagaaccacctgatcctaaaccagtgcgaaacaaacagtaacaatgtccccagctgacttcagctaagaaccaatggctcctacccccgccccgcttttttttgttgttttttgttttgttttgagacggagtcttgctctgtcccccaggctggagtgcactggcgcaatctcgggctcactgcaacctcctcctcctcccacattgaggcgattctcctgcctcagcctcccaagtagctgggattacaggcacccgccatcacacccagctaatttttttttttttttgtattattagtagaagccaggtttcaccatgttggccagggtggtctcgaactcctgacctcaagtgatccgtccacctcggccttgcaaattgctgggattacaggtgtgagccaccgtgccgagccagccccattttttaaatgatgttttggttaagagtggaccatgagaattagctgacagcatcccctttctctctccctgccttggtgggaccctccctgtgtgaccttggtcaagtcctcgaacttttgtcccgtatttaagatggagctgttttacctacttcataagacagttgcgaggtgccattgattcttgactgcaaaataccttgaaacccttatataaagactgaagtcaacggagcctagtgaaagacttactttgtggcttgtggttgaaagtcacatcaaaagacaaatgtggccacgttcaggaattggagacttactggcatggctctacagctgctcagttattaatcatgcagactaacctgtcaacactgggagatgcaacatagcaaaaggacagagaaattagaattttttgtgcagaaagccctaaattcccacctgaatgtaacttacagctcccttacctactctcacacatgccctcaaacatgctagattggcttatacataggccaacacaaaatacaaacgtgacgtgttcatgtagcctagtggctatatgcctattctccatgtaccctgcatggtagtgctgcaaactttaaagtacatttctttcacagcagtattttttttcataagtggcatataaatgtcattcaatgaaatggggaaatcacgttgagaagttggtctgtcatctcccattgagcaaagactggcaggagataataaaaataaatatgggcacacatgtattaatatacagcacgcatttacaagtttattttccagataaaattgtgctataagaacagctctaccaagacagtctgcaccatttccaagtctcagttaatttacagcaactgctgctttcggagatggctgtgaaaatatggaagttcctctcaagtaggccaagaaacagttctagattttactaagttttattttgtcaggttttttaaattttttcagtgagcgtggtgactgcagaggttagtgctgtgaaaagctgggctaaatattctttctgtaaagtcaaacaggattccatcccctgtgaaataacacaaaatttcactctctaaaagcaacagcatgtaaactagaatgaaagaaggaaattatgtacgtatgcctaatattctttgtgaatgtctttcatttaactaaaattatattagaaaccagattgataaataaaaaattcaaagtagttttaattatcctaaaa

SEQ ID NO: 178124 - DNA, 1944 bp, Artificial Sequence
  derived and/or modified sequence
taagagctagtcacatgtctccacctggatgcacagggaccaggaaggcagttactggctgggtagcagctttgcgggagtgatgatgaaaaggggaaagaaaccttctgtgaatggttagtggtctcttttacaggtactatgacaccaaaaaggagtaaactttaaagacaccaagctgccacagaagtgtccttttcatttgatgtgggaaatgggccagtagagattgtagtgaggtcaccaacccctctcaacgatgaccagtggcaccgggtcactgcagagaggaatgtcaagcaggccagcctacaggtggaccggctaccgcagcagatccgcaaggccccaacagaaggccacacccgcctggagctctacagccagttatttgtgggtggtgctgggggccagcagggcttcctgggctgcatccgctccttgaggatgaatggggtgacacttgacctggaggaaagagcaaaggtcacatctgggttcatatccggatgctcgggccattgcaccagctatggaacaaactgtgaaaatggaggcaaatgcctagagagataccacggttactcctgcgattgctctaatactgcatatgatggaacattttgcaacaaagatgttggtgcattttttgaagaagggatgtggctacgatataactttcaggcaccagcaacaaatgccagagactccagcagcagagtagacaacgctcccgaccagcagaactcccacccggacctggcacaggaggagatccgcttcagcttcagcaccaccaaggcgccctgcattctcctctacatcagctccttcaccacagacttcttggcagtcctcgtcaaacccactggaagcttacagattcgatacaacctgggtggcacccgagagccatacaatattgacgtagaccacaggaacatggccaatggacagccccacagtgtcaacatcacccgccacgagaagaccatctttctcaagctcgatcattatccttctgtgagttaccatctgccaagttcatccgacaccctcttcaattctcccaagtcgctctttctgggaaaagttatagaaacagggaaaattgaccaagagattcacaaatacaacaccccaggattcactggttgcctctccagagtccagttcaaccagatcgcccctctcaaggccgccttgaggcagacaaacgcctcggctcacgtccacatccagggcgagctggtggagtccaactgcggggcctcgccgctgaccctctcccccatgtcgtccgccaccgacccctggcacctggatcacctggattcagccagtgcggattttccatataatccaggacaaggccaagctataagaaatggagtcaacagaaactcggctatcattggaggcgtcattgctgtggtgattttcaccatcctgtgcaccctggtcttcctgatccggtacatgttccgccacaagggcacctaccataccaacgaagcaaagggggcggagtcggcagagagcgcggacgccgccatcatgaacaacgaccccaacttcacagagaccattgatgaaagcaaaaaggaatggctcatttgaggggtggctacttggctatgggatagggaggagggaattactagggaggagagaaagggacaaaagcaccctgcttcatactcttgagcacatccttaaaatatcagcacaagttgggggaggcaggcaatggaatataatggaatattcttgagactgatcacaaaaaaaaaaacctttttaatatttctttatagctgagttttcccttctgtatcaaaacaaaataatacaaaaaatgcttttagagtttaagcaatggttgaaatttgtaggtactatctgtcttattttgtgtgtgtttagaggtgttctaaagacccg

SEQ ID NO: 178125 - DNA, 3996 bp, Artificial Sequence
  derived and/or modified sequence
atgcaggccgcccccagagccggctgcggcgccgccctgctgctgtggatcgtgagcagctgcctgtgcagagcctggaccgcccccagcaccagccagaagtgcgacgagcccctggtgagcggcctgccccacgtggccttcagcagcagcagcagcatcagcggcagctacagccccggctacgccaagatcaacaagagaggcggcgccggcggctggagccccagcgacagcgaccactaccagtggctgcaggtggacttcggcaacagaaagcagatcagcgccatcgccacccagggcagatacagcagcagcgactgggtgacccagtacagaatgctgtacagcgacaccggcagaaactggaagccctaccaccaggacggcaacatctgggccttccccggcaacatcaacagcgacggcgtggtgagacacgagctgcagcaccccatcatcgccagatacgtgagaatcgtgcccctggactggaacggcgagggcagaatcggcctgagaatcgaggtgtacggctgcagctactgggccgacgtgatcaacttcgacggccacgtggtgctgccctacagattcagaaacaagaagatgaagaccctgaaggacgtgatcgccctgaacttcaagaccagcgagagcgagggcgtgatcctgcacggcgagggccagcagggcgactacatcaccctggagctgaagaaggccaagctggtgctgagcctgaacctgggcagcaaccagctgggccccatctacggccacaccagcgtgatgaccggcagcctgctggacgaccaccactggcacagcgtggtgatcgagagacagggcagaagcatcaacctgaccctggacagaagcatgcagcacttcagaaccaacggcgagttcgactacctggacctggactacgagatcaccttcggcggcatccccttcagcggcaagcccagcagcagcagcagaaagaacttcaagggctgcatggagagcatcaactacaacggcgtgaacatcaccgacctggccagaagaaagaagctggagcccagcaacgtgggcaacctgagcttcagctgcgtggagccctacaccgtgcccgtgttcttcaacgccaccagctacctggaggtgcccggcagactgaaccaggacctgttcagcgtgagcttccagttcagaacctggaaccccaacggcctgctggtgttcagccacttcgccgacaacctgggcaacgtggagatcgacctgaccgagagcaaggtgggcgtgcacatcaacatcacccagaccaagatgagccagatcgacatcagcagcggcagcggcctgaacgacggccagtggcacgaggtgagattcctggccaaggagaacttcgccatcctgaccatcgacggcgacgaggccagcgccgtgagaaccaacagccccctgcaggtgaagaccggcgagaagtacttcttcggcggcttcctgaaccagatgaacaacagcagccacagcgtgctgcagcccagcttccagggctgcatgcagctgatccaggtggacgaccagctggtgaacctgtacgaggtggcccagagaaagcccggcagcttcgccaacgtgagcatcgacatgtgcgccatcatcgacagatgcgtgcccaaccactgcgagcacggcggcaagtgcagccagacctgggacagcttcaagtgcacctgcgacgagaccggctacagcggcgccacctgccacaacagcatctacgagcccagctgcgaggcctacaagcacctgggccagaccagcaactactactggatcgaccccgacggcagcggccccctgggccccctgaaggtgtactgcaacatgaccgaggacaaggtgtggaccatcgtgagccacgacctgcagatgcagacccccgtggtgggctacaaccccgagaagtacagcgtgacccagctggtgtacagcgccagcatggaccagatcagcgccatcaccgacagcgccgagtactgcgagcagtacgtgagctacttctgcaagatgagcagactgctgaacacccccgacggcagcccctacacctggtgggtgggcaaggccaacgagaagcactactactggggcggcagcggccccggcatccagaagtgcgcctgcggcatcgagagaaactgcaccgaccccaagtactactgcaactgcgacgccgactacaagcagtggagaaaggacgccggcttcctgagctacaaggaccacctgcccgtgagccaggtggtggtgggcgacaccgacagacagggcagcgaggccaagctgagcgtgggccccctgagatgccagggcgacagaaactactggaacgccgccagcttccccaaccccagcagctacctgcacttcagcaccttccagggcgagaccagcgccgacatcagcttctacttcaagaccctgaccccctggggcgtgttcctggagaacatgggcaaggaggacttcatcaagctggagctgaagagcgccaccgaggtgagcttcagcttcgacgtgggcaacggccccgtggagatcgtggtgagaagccccacccccctgaacgacgaccagtggcacagagtgaccgccgagagaaacgtgaagcaggccagcctgcaggtggacagactgccccagcagatcagaaaggcccccaccgagggccacaccagactggagctgtacagccagctgttcgtgggcggcgccggcggccagcagggcttcctgggctgcatcagaagcctgagaatgaacggcgtgaccctggacctggaggagagagccaaggtgaccagcggcttcatcagcggctgcagcggccactgcaccagctacggcaccaactgcgagaacggcggcaagtgcctggagagataccacggctacagctgcgactgcagcaacaccgcctacgacggcaccttctgcaacaaggacgtgggcgccttcttcgaggagggcatgtggctgagatacaacttccaggcccccgccaccaacgccagagacagcagcagcagagtggacaacgcccccgaccagcagaacagccaccccgacctggcccaggaggagatcagattcagcttcagcaccaccaaggccccctgcatcctgctgtacatcagcagcttcaccaccgacttcctggccgtgctggtgaagcccaccggcagcctgcagatcagatacaacctgggcggcaccagagagccctacaacatcgacgtggaccacagaaacatggccaacggccagccccacagcgtgaacatcaccagacacgagaagaccatcttcctgaagctggaccactaccccagcgtgagctaccacctgcccagcagcagcgacaccctgttcaacagccccaagagcctgttcctgggcaaggtgatcgagaccggcaagatcgaccaggagatccacaagtacaacacccccggcttcaccggctgcctgagcagagtgcagttcaaccagatcgcccccctgaaggccgccctgagacagaccaacgccagcgcccacgtgcacatccagggcgagctggtggagagcaactgcggcgccagccccctgaccctgagccccatgagcagcgccaccgacccctggcacctggaccacctggacagcgccagcgccgacttcccctacaaccccggccagggccaggccatcagaaacggcgtgaacagaaacagcgccatcatcggcggcgtgatcgccgtggtgatcttcaccatcctgtgcaccctggtgttcctgatcagatacatgttcagacacaagggcacctaccacaccaacgaggccaagggcgccgagagcgccgagagcgccgacgccgccatcatgaacaacgaccccaacttcaccgagaccatcgacgagagcaagaaggagtggctgatctag

SEQ ID NO: 178126 - protein, 290 aa, Artificial Sequence
  derived and/or modified sequence
MRIFAVFIFMTYWHLLNAFTVTVPKDLYVVEYGSNMTIECKFPVEKQLDLAALIVYWEMEDKNIIQFVHGEEDLKVQHSSYRQRARLLKDQLSLGNAALQITDVKLQDAGVYRCMISYGGADYKRITVKVNAPYNKINQRILVVDPVTSEHELTCQAEGYPKAEVIWTSSDHQVLSGKTTTTNSKREEKLFNVTSTLRINTTTNEIFYCTFRRLDPEENHTAELVIPELPLAHPPNERTHLVILGAILLCLGVALTFIFRLRKGRMMDVKKCGIQDTNSKKQSDTHLEET

SEQ ID NO: 178127 - DNA, 873 bp, Artificial Sequence
  derived and/or modified sequence
atgagaatcttcgccgtgttcatcttcatgacctactggcacctgctgaacgccttcaccgtgaccgtgcccaaggacctgtacgtggtggagtacggcagcaacatgaccatcgagtgcaagttccccgtggagaagcagctggacctggccgccctgatcgtgtactgggagatggaggacaagaacatcatccagttcgtgcacggcgaggaggacctgaaggtgcagcacagcagctacagacagagagccagactgctgaaggaccagctgagcctgggcaacgccgccctgcagatcaccgacgtgaagctgcaggacgccggcgtgtacagatgcatgatcagctacggcggcgccgactacaagagaatcaccgtgaaggtgaacgccccctacaacaagatcaaccagagaatcctggtggtggaccccgtgaccagcgagcacgagctgacctgccaggccgagggctaccccaaggccgaggtgatctggaccagcagcgaccaccaggtgctgagcggcaagaccaccaccaccaacagcaagagagaggagaagctgttcaacgtgaccagcaccctgagaatcaacaccaccaccaacgagatcttctactgcaccttcagaagactggaccccgaggagaaccacaccgccgagctggtgatccccgagctgcccctggcccacccccccaacgagagaacccacctggtgatcctgggcgccatcctgctgtgcctgggcgtggccctgaccttcatcttcagactgagaaagggcagaatgatggacgtgaagaagtgcggcatccaggacaccaacagcaagaagcagagcgacacccacctggaggagacctag

SEQ ID NO: 178128 - DNA, 873 bp, Artificial Sequence
  derived and/or modified sequence
atgaggatctttgcggtgttcatattcatgacctactggcacctgctgaatgcattcacagtcaccgtacccaaagacctatacgtggttgagtatggctccaacatgaccattgaatgtaagtttcctgttgagaaacagctcgatctggccgccctgattgtttattgggagatggaggacaaaaatatcattcaattcgtgcacggcgaggaggatttaaaagttcaacactccagttatcgtcaaagggcccgtctcctcaaggatcaattatccctgggaaacgcggccctccagattacggatgtcaaactacaagacgccggggtttacagatgcatgatatcatatggtggggccgactacaaacggatcactgtgaaggtcaatgctccatacaacaaaatcaatcaacgtatcctggtggtggacccagtcacatctgagcatgaactgacttgccaggctgagggatatcctaaagccgaggtaatttggaccagttcagaccaccaagtcctgtctggcaagacaacgaccacaaattctaaacgtgaagagaagcttttcaatgtcacaagtacattgcgtatcaatactactaccaatgagatcttctattgtacctttcgccgactggatccagaggaaaatcacaccgcagagttagtgatccccgaactgccacttgcacatccacctaacgagagaacccacctcgtcattctaggtgctattctcctgtgcctcggggtcgcattgacattcatcttcagattgaggaaagggaggatgatggacgtcaagaaatgtgggatccaggacacaaactcgaaaaaacaatccgacactcaccttgaagaaacttag

SEQ ID NO: 178129 - DNA, 873 bp, Artificial Sequence
  derived and/or modified sequence
atgaggatctttgctgtgttcatcttcatgacctactggcacctgctgaatgccttcaccgtgacagtgcccaaggacctgtatgtggtggagtatggcagcaacatgaccatcgagtgcaagtttcctgtggagaagcagctggacctggccgccctgattgtgtactgggagatggaggacaagaacatcatccagtttgtgcatggagaggaggacctgaaggtgcagcacagcagctaccggcagagggcccggctgctgaaggaccagctgagcctgggcaatgctgccctgcagatcacagatgtgaagctgcaggatgctggggtgtaccgctgcatgatctcctatggaggagctgactacaagaggatcaccgtgaaggtgaatgccccctacaacaagatcaaccagaggatcctggtggtggaccctgtgaccagcgagcacgagctgacctgccaggccgagggctaccccaaggccgaggtgatctggaccagcagtgaccaccaggtgctgagcggcaagaccaccaccaccaacagcaagcgggaggagaagctgttcaacgtgaccagcaccctgcgcatcaacaccaccaccaatgagatcttctactgcaccttccggcggctggaccctgaggagaaccacacagctgagctggtgattcctgagctgcccctggcccaccccccaaatgaaagaacccacctggtgatcctgggcgccatcctgctgtgcctgggcgtggccctgaccttcatcttccggctgaggaaaggaaggatgatggatgtgaagaagtgtggcatccaggacaccaacagcaagaagcagagcgacacccacctggaggagacctag

SEQ ID NO: 178130 - DNA, 873 bp, Artificial Sequence
  derived and/or modified sequence
atgcggatcttcgccgtgttcatcttcatgacctactggcacctgctgaacgccttcactgtgactgtgcccaaggacctctacgtggtggagtatggttctaatatgactattgagtgcaagttcccagtcgagaaacaactcgatctcgccgccctcattgtgtattgggagatggaagacaagaacattattcagtttgtacacggagaagaggatctcaaggtgcagcacagcagctacagacaacgagcgagactgctgaaagatcagttgtcccttgggaacgccgcgctccagatcacagatgtaaagctgcaggatgccggggtctaccggtgtatgatttcttacggcggtgctgactacaagcggattactgtcaaggttaacgctccatacaacaaaatcaaccaacgcatccttgtggtggatcccgtaactagcgagcacgaactgacctgtcaggctgagggatatccaaaagctgaggtaatctggaccagctcagaccatcaagtgttgtcaggaaagacaactacaactaacagtaaacgggaggagaaacttttcaatgtaacttcaaccctccggataaacactacaacaaacgagatcttctattgcacctttaggcgtctcgaccctgaggagaaccatacagctgagctggttatcccggaattgccactagcccatccaccaaatgaaaggacccacctggtgatcttaggtgctattctgttgtgtctcggcgtagctctgacattcattttcagactgagaaaaggaagaatgatggacgtgaagaaatgtggcattcaggacactaattctaagaagcagagcgacactcatttggaagaaacatag

SEQ ID NO: 178131 - DNA, 873 bp, Artificial Sequence
  derived and/or modified sequence
atgcggatcttcgccgtgttcatcttcatgacctattggcacttactgaacgcctttaccgttactgtgccaaaggatctttacgtcgtggaatacgggtcaaatatgactatcgaatgcaagttccccgtcgagaaacagctggacctggctgccctaatagtatattgggaaatggaagataagaatattattcagttcgtccacggagaggaagacttgaaagtccaacacagtagctacaggcagagggctagactgctcaaggatcaattatcacttggaaacgctgcgctgcagataaccgatgtgaagctccaggatgccggagtgtacaggtgcatgattagctacggaggcgcagattataaaagaatcaccgttaaggttaacgccccatacaataaaatcaatcagcgcattcttgtggtggatccagtgacaagcgaacacgagctcacctgtcaggccgagggatatccaaaggctgaggtgatctggactagcagcgatcaccaggttctgagcggtaaaacaaccaccacaaattcaaaacgcgaggaaaaactttttaacgtgactagcacattgcggattaatacgaccaccaacgagatattttattgcacatttagacggctcgatcccgaggaaaatcatactgctgagcttgtcatcccagagctgcccctcgctcacccgcctaacgaacgaacgcatctggtcatcctgggtgctattctgctctgcctcggtgtggcactcaccttcattttcagattaaggaagggtaggatgatggatgttaaaaagtgtggcatccaggacacaaacagcaagaaacaatcagacacccacttggaggaaacctag

SEQ ID NO: 178132 - DNA, 3644 bp, Artificial Sequence
  derived and/or modified sequence
gcgtcccgcgcggccccagttctgcgcagcttcccgaggctccgcaccagccgcgcttctgtccgcctgcagggcattccagaaagatgaggatatttgctgtctttatattcatgacctactggcatttgctgaacgcatttactgtcacggttcccaaggacctatatgtggtagagtatggtagcaatatgacaattgaatgcaaattcccagtagaaaaacaattagacctggctgcactaattgtctattgggaaatggaggataagaacattattcaatttgtgcatggagaggaagacctgaaggttcagcatagtagctacagacagagggcccggctgttgaaggaccagctctccctgggaaatgctgcacttcagatcacagatgtgaaattgcaggatgcaggggtgtaccgctgcatgatcagctatggtggtgccgactacaagcgaattactgtgaaagtcaatgccccatacaacaaaatcaaccaaagaattttggttgtggatccagtcacctctgaacatgaactgacatgtcaggctgagggctaccccaaggccgaagtcatctggacaagcagtgaccatcaagtcctgagtggtaagaccaccaccaccaattccaagagagaggagaagcttttcaatgtgaccagcacactgagaatcaacacaacaactaatgagattttctactgcacttttaggagattagatcctgaggaaaaccatacagctgaattggtcatcccagaactacctctggcacatcctccaaatgaaaggactcacttggtaattctgggagccatcttattatgccttggtgtagcactgacattcatcttccgtttaagaaaagggagaatgatggatgtgaaaaaatgtggcatccaagatacaaactcaaagaagcaaagtgatacacatttggaggagacgtaatccagcattggaacttctgatcttcaagcagggattctcaacctgtggtttaggggttcatcggggctgagcgtgacaagaggaaggaatgggcccgtgggatgcaggcaatgtgggacttaaaaggcccaagcactgaaaatggaacctggcgaaagcagaggaggagaatgaagaaagatggagtcaaacagggagcctggagggagaccttgatactttcaaatgcctgaggggctcatcgacgcctgtgacagggagaaaggatacttctgaacaaggagcctccaagcaaatcatccattgctcatcctaggaagacgggttgagaatccctaatttgagggtcagttcctgcagaagtgccctttgcctccactcaatgcctcaatttgttttctgcatgactgagagtctcagtgttggaacgggacagtatttatgtatgagtttttcctatttattttgagtctgtgaggtcttcttgtcatgtgagtgtggttgtgaatgatttcttttgaagatatattgtagtagatgttacaattttgtcgccaaactaaacttgctgcttaatgatttgctcacatctagtaaaacatggagtatttgtaaggtgcttggtctcctctataactacaagtatacattggaagcataaagatcaaaccgttggttgcataggatgtcacctttatttaacccattaatactctggttgacctaatcttattctcagacctcaagtgtctgtgcagtatctgttccatttaaatatcagctttacaattatgtggtagcctacacacataatctcatttcatcgctgtaaccaccctgttgtgataaccactattattttacccatcgtacagctgaggaagcaaacagattaagtaacttgcccaaaccagtaaatagcagacctcagactgccacccactgtccttttataatacaatttacagctatattttactttaagcaattcttttattcaaaaaccatttattaagtgcccttgcaatatcaatcgctgtgccaggcattgaatctacagatgtgagcaagacaaagtacctgtcctcaaggagctcatagtataatgaggagattaacaagaaaatgtattattacaatttagtccagtgtcatagcataaggatgatgcgaggggaaaacccgagcagtgttgccaagaggaggaaataggccaatgtggtctgggacggttggatatacttaaacatcttaataatcagagtaattttcatttacaaagagaggtcggtacttaaaataaccctgaaaaataacactggaattccttttctagcattatatttattcctgatttgcctttgccatataatctaatgcttgtttatatagtgtctggtattgtttaacagttctgtcttttctatttaaatgccactaaattttaaattcatacctttccatgattcaaaattcaaaagatcccatgggagatggttggaaaatctccacttcatcctccaagccattcaagtttcctttccagaagcaactgctactgcctttcattcatatgttcttctaaagatagtctacatttggaaatgtatgttaaaagcacgtatttttaaaatttttttcctaaatagtaacacattgtatgtctgctgtgtactttgctatttttatttattttagtgtttcttatatagcagatggaatgaatttgaagttcccagggctgaggatccatgccttctttgtttctaagttatctttcccatagcttttcattatctttcatatgatccagtatatgttaaatatgtcctacatatacatttagacaaccaccatttgttaagtatttgctctaggacagagtttggatttgtttatgtttgctcaaaaggagacccatgggctctccagggtgcactgagtcaatctagtcctaaaaagcaatcttattattaactctgtatgacagaatcatgtctggaacttttgttttctgctttctgtcaagtataaacttcactttgatgctgtacttgcaaaatcacattttctttctggaaattccggcagtgtaccttgactgctagctaccctgtgccagaaaagcctcattcgttgtgcttgaacccttgaatgccaccagctgtcatcactacacagccctcctaagaggcttcctggaggtttcgagattcagatgccctgggagatcccagagtttcctttccctcttggccatattctggtgtcaatgacaaggagtaccttggctttgccacatgtcaaggctgaagaaacagtgtctccaacagagctccttgtgttatctgtttgtacatgtgcatttgtacagtaattggtgtgacagtgttctttgtgtgaattacaggcaagaattgtggctgagcaaggcacatagtctactcagtctattcctaagtcctaactcctccttgtggtgttggatttgtaaggcactttatcccttttgtctcatgtttcatcgtaaatggcataggcagagatgatacctaattctgcatttgattgtcactttttgtacctgcattaatttaataaaatattcttatttattttgttacttggtacaccagcatgtccattttcttgtttattttgtgtttaataaaatgttcagtttaa

SEQ ID NO: 178133 - protein, 971 aa, Artificial Sequence
  derived and/or modified sequence
MSNVSEERRKRQQNIKEGLQFIQSPLSYPGTQEQYAVYLRALVRNLFNEGNDVYREHDWNNSISQYTEALNIADYAKSEEILIPKEIIEKLYINRIACYSNMGFHDKVLEDCNIVLSLNASNCKALYRKSKALSDLGRYKKAYDAVAKCSLAVPQDEHVIKLTQELAQKLGFKIRKAYVRAELSLKSVPGDGATKALNHSVEDIEPDLLTPRQEAVPVVSLPAPSFSHEVGSELASVPVMPLTSILPLQVEESALPSAVLANGGKMPFTMPEAFLDDGDMVLGDELDDLLDSAPETNETVMPSALVRGPLQTASVSPSMPFSASLLGTLPIGARYAPPPSFSEFYPPLTSSLEDFCSSLNSFSMSESKRDLSTSTSREGTPLNNSNSSLLLMNGPGSLFASENFLGISSQPRNDFGNFFGSAVTKPSSSVTPRHPLEGTHELRQACQICFVKSGPKLMDFTYHANIDHKCKKDILIGRIKNVEDKSWKKIRPRPTKTNYEGPYYICKDVAAEEECRYSGHCTFAYCQEEIDVWTLERKGAFSREAFFGGNGKINLTVFKLLQEHLGEFIFLCEKCFDHKPRMISKRNKDNSTACSHPVTKHEFEDNKCLVHILRETTVKYSKIRSFHGQCQLDLCRHEVRYGCLREDECFYAHSLVELKVWIMQNETGISHDAIAQESKRYWQNLEANVPGAQVLGNQIMPGFLNMKIKFVCAQCLRNGQVIEPDKNRKYCSAKARHSWTKDRRAMRVMSIERKKWMNIRPLPTKKQMPLQFDLCNHIASGKKCQYVGNCSFAHSPEEREVWTYMKENGIQDMEQFYELWLKSQKNEKSEDIASQSNKENGKQIHMPTDYAEVTVDFHCWMCGKNCNSEKQWQGHISSEKHKEKVFHTEDDQYCWQHRFPTGYFSICDRYMNGTCPEGNSCKFAHGNAELHEWEERRDALKMKLNKARKDHLIGPNDNDFGKYSFLFKDLN

SEQ ID NO: 178134 - DNA, 2916 bp, Artificial Sequence
  derived and/or modified sequence
atgagcaacgtgagcgaggagagaagaaagagacagcagaacatcaaggagggcctgcagttcatccagagccccctgagctaccccggcacccaggagcagtacgccgtgtacctgagagccctggtgagaaacctgttcaacgagggcaacgacgtgtacagagagcacgactggaacaacagcatcagccagtacaccgaggccctgaacatcgccgactacgccaagagcgaggagatcctgatccccaaggagatcatcgagaagctgtacatcaacagaatcgcctgctacagcaacatgggcttccacgacaaggtgctggaggactgcaacatcgtgctgagcctgaacgccagcaactgcaaggccctgtacagaaagagcaaggccctgagcgacctgggcagatacaagaaggcctacgacgccgtggccaagtgcagcctggccgtgccccaggacgagcacgtgatcaagctgacccaggagctggcccagaagctgggcttcaagatcagaaaggcctacgtgagagccgagctgagcctgaagagcgtgcccggcgacggcgccaccaaggccctgaaccacagcgtggaggacatcgagcccgacctgctgacccccagacaggaggccgtgcccgtggtgagcctgcccgcccccagcttcagccacgaggtgggcagcgagctggccagcgtgcccgtgatgcccctgaccagcatcctgcccctgcaggtggaggagagcgccctgcccagcgccgtgctggccaacggcggcaagatgcccttcaccatgcccgaggccttcctggacgacggcgacatggtgctgggcgacgagctggacgacctgctggacagcgcccccgagaccaacgagaccgtgatgcccagcgccctggtgagaggccccctgcagaccgccagcgtgagccccagcatgcccttcagcgccagcctgctgggcaccctgcccatcggcgccagatacgcccccccccccagcttcagcgagttctacccccccctgaccagcagcctggaggacttctgcagcagcctgaacagcttcagcatgagcgagagcaagagagacctgagcaccagcaccagcagagagggcacccccctgaacaacagcaacagcagcctgctgctgatgaacggccccggcagcctgttcgccagcgagaacttcctgggcatcagcagccagcccagaaacgacttcggcaacttcttcggcagcgccgtgaccaagcccagcagcagcgtgacccccagacaccccctggagggcacccacgagctgagacaggcctgccagatctgcttcgtgaagagcggccccaagctgatggacttcacctaccacgccaacatcgaccacaagtgcaagaaggacatcctgatcggcagaatcaagaacgtggaggacaagagctggaagaagatcagacccagacccaccaagaccaactacgagggcccctactacatctgcaaggacgtggccgccgaggaggagtgcagatacagcggccactgcaccttcgcctactgccaggaggagatcgacgtgtggaccctggagagaaagggcgccttcagcagagaggccttcttcggcggcaacggcaagatcaacctgaccgtgttcaagctgctgcaggagcacctgggcgagttcatcttcctgtgcgagaagtgcttcgaccacaagcccagaatgatcagcaagagaaacaaggacaacagcaccgcctgcagccaccccgtgaccaagcacgagttcgaggacaacaagtgcctggtgcacatcctgagagagaccaccgtgaagtacagcaagatcagaagcttccacggccagtgccagctggacctgtgcagacacgaggtgagatacggctgcctgagagaggacgagtgcttctacgcccacagcctggtggagctgaaggtgtggatcatgcagaacgagaccggcatcagccacgacgccatcgcccaggagagcaagagatactggcagaacctggaggccaacgtgcccggcgcccaggtgctgggcaaccagatcatgcccggcttcctgaacatgaagatcaagttcgtgtgcgcccagtgcctgagaaacggccaggtgatcgagcccgacaagaacagaaagtactgcagcgccaaggccagacacagctggaccaaggacagaagagccatgagagtgatgagcatcgagagaaagaagtggatgaacatcagacccctgcccaccaagaagcagatgcccctgcagttcgacctgtgcaaccacatcgccagcggcaagaagtgccagtacgtgggcaactgcagcttcgcccacagccccgaggagagagaggtgtggacctacatgaaggagaacggcatccaggacatggagcagttctacgagctgtggctgaagagccagaagaacgagaagagcgaggacatcgccagccagagcaacaaggagaacggcaagcagatccacatgcccaccgactacgccgaggtgaccgtggacttccactgctggatgtgcggcaagaactgcaacagcgagaagcagtggcagggccacatcagcagcgagaagcacaaggagaaggtgttccacaccgaggacgaccagtactgctggcagcacagattccccaccggctacttcagcatctgcgacagatacatgaacggcacctgccccgagggcaacagctgcaagttcgcccacggcaacgccgagctgcacgagtgggaggagagaagagacgccctgaagatgaagctgaacaaggccagaaaggaccacctgatcggccccaacgacaacgacttcggcaagtacagcttcctgttcaaggacctgaactag

SEQ ID NO: 178135 - DNA, 2916 bp, Artificial Sequence
  derived and/or modified sequence
atgagtaacgtctctgaagagcgtcgaaaacgccagcagaacattaaggagggcctccagttcatccagtcccctctcagctacccagggacccaggagcaatatgccgtctacttgcgagcgcttgttagaaacctgtttaacgagggtaacgacgtttaccgagaacatgactggaacaatagcatcagtcagtataccgaggctctgaatattgccgattatgctaaatcggaggagatcttgattccgaaagagatcatcgagaagttgtacattaatcgtatcgcttgctactccaacatggggtttcacgataaggtcttggaagattgcaatatcgtactgtctctcaacgcttcgaattgcaaagctctgtaccggaagtccaaagctttatcggacctgggcagatacaaaaaagcatatgatgctgtggctaagtgcagtcttgccgtgccgcaagatgaacatgtgattaaactgactcaggaactggcacagaagctcgggttcaagatcaggaaggcttacgtccgtgcagagctcagcctgaagagcgtgccgggtgacggggccaccaaggctttgaatcactcggtggaagatatcgaaccagacttactgactccgagacaagaagccgtgcccgtggtgtctttgcctgcaccaagtttttcccatgaggtggggtcagaactggcctcagtgcccgtcatgcctctgacatcaattctgcccctccaagtggaggaatcggccctcccatcagcggtgctggccaacggaggcaaaatgccgttcactatgcctgaggcattcctggatgacggcgacatggttctgggcgatgaattggatgatttgctggatagcgcccctgaaactaacgagacagtgatgccatctgctcttgttcgagggccactgcagaccgcctccgtctctccttccatgcccttcagcgcctctctgctgggcacacttcccattggggcacgttacgcacccccgccctccttctcggagttctatccacccctcacttcgtccttggaggatttctgtagttcacttaacagcttttctatgtctgagtccaagcgagaccttagtacaagcacctcccgtgaaggtacccctctgaacaattccaacagttccttgctgctaatgaacggtcccggctccctgtttgctagtgaaaactttctggggatttctagccagccccggaatgactttggaaatttttttgggtccgccgtgacgaaacctagctcaagcgtgacacccagacatcccctcgaggggacccatgaactccgtcaggcatgccagatctgttttgtgaagagcgggcctaaattgatggatttcacctaccatgccaacatcgatcataaatgtaagaaggacattcttatcggccgcattaaaaacgtggaggataaatcatggaaaaagatccgccccaggccaaccaaaaccaactacgagggcccatactacatctgtaaagacgtcgccgccgaagaggagtgccgctactccggccattgcacatttgcatactgccaggaggagatcgatgtgtggacattggagcgaaagggagctttttctagagaagcattcttcggggggaatggcaaaatcaatcttacagtgtttaagctcctgcaggagcacctcggcgagtttatcttcttgtgtgaaaaatgctttgaccacaagcctaggatgatttctaaacggaacaaagacaattctacggcctgcagccaccccgtaacaaagcacgagttcgaagacaacaagtgcttggttcacattcttagagagaccactgtcaaatacagcaagatcaggtcatttcatggacagtgccaacttgacttgtgccgccacgaagtgagatatgggtgtctccgcgaagacgaatgcttttacgcacactcactggtggagctgaaggtctggattatgcagaatgagacggggataagtcacgacgccatcgcacaggaatcgaagcgctactggcagaatcttgaggctaatgttcccggcgcgcaggtcctgggcaaccagatcatgcccgggttcctgaacatgaagattaagttcgtgtgtgctcagtgcctgaggaacggccaggtgattgagccggataagaaccggaaatattgtagcgctaaggctagacattcatggacaaaggaccgccgtgcaatgcgggtgatgtccatagagaggaagaaatggatgaacattagacctctcccaaccaagaagcagatgccgctgcagttcgacctgtgtaaccacatagcttctgggaagaagtgccagtatgtcggcaactgcagctttgcacattcccccgaggaaagggaggtgtggacatacatgaaagagaatggcattcaggatatggagcagttttatgaattgtggcttaagtcacagaaaaacgagaaatctgaagatatcgcaagccagtcaaataaggaaaacggcaagcagatccatatgccaacagactatgcagaggtgacagtagatttccactgttggatgtgcggaaagaactgtaattcagaaaaacagtggcaggggcacatttcttccgagaaacataaagagaaggtattccatacggaagacgaccaatattgctggcagcatcggtttccaactggctacttcagcatttgtgaccgctacatgaacggtacctgcccagaaggtaatagttgcaagttcgcgcatgggaatgcggagttgcatgagtgggaggagcgtcgcgatgcgctgaaaatgaagctgaataaagctagaaaagaccacctgatcggacccaacgacaatgattttggtaagtactctttcctgtttaaagatctgaattag

SEQ ID NO: 178136 - DNA, 2916 bp, Artificial Sequence
  derived and/or modified sequence
atgagcaacgtgagtgaggagcgccggaagcgtcagcagaacatcaaggaaggtttgcagtttatccagagccccctttcatatcctggcactcaggagcagtacgcagtatatttaagggccttggtgagaaacttattcaatgaggggaatgatgtctaccgtgagcatgactggaacaattctataagccagtataccgaagccttgaatattgccgactatgcaaaatccgaggagattttaatccccaaggagattatcgagaaactctatattaaccggatcgcctgttactctaacatggggtttcatgataaagttcttgaagattgcaatattgtgctgtctttaaatgcctcaaattgcaaagcactgtaccggaagagcaaggctttgagcgatctgggacgttacaagaaagcgtatgacgcagtcgctaaatgtagcctcgcagtccctcaggatgagcatgtgattaagctgacacaagaactggcacagaaactcggctttaaaataaggaaagcatatgtccgagccgagctcagtctgaaatcagtgcctggggatggggcaactaaggctcttaaccattcagtggaagacatcgaaccagatctgctgactccccggcaggaagctgtgcctgtagtgtccctcccggcaccgagtttttctcacgaggttgggtccgaactggctagcgtgcctgtcatgccactcacatccattctgcccttgcaggtagaggagagtgctctgccaagcgcagtcctggccaacggtggaaagatgccttttactatgccagaagcattcctggatgacggggatatggtgctgggcgacgagctggacgacctcctggacagcgcccccgagacaaacgaaacggtaatgccttctgctcttgttaggggtcccttgcaaactgcatccgtcagcccctctatgccattctccgccagtctgctcggtaccctgcctatcggagccaggtacgctccacctccgtcattttcagagttctacccacctctgacttcctccttggaggatttctgtagctcattaaatagttttagtatgagtgagtcaaaaagagacctctctacatccacgagtcgcgagggtacacctctgaataattccaatagttccttgctcctgatgaacggccccggatcccttttcgcaagcgagaatttcctaggaatttcctcccaacctcgaaatgatttcggcaatttctttggttccgcagtcaccaagcccagcagtagcgtcacaccccggcatccactggaggggactcatgaactacgccaagcctgtcaaatctgttttgtcaaatctggacccaagctcatggacttcacatatcacgcgaacatcgatcataagtgtaagaaagacatcctgataggccgaatcaagaatgtggaggacaagagctggaaaaagatacgccctaggccaaccaagacgaattatgagggcccgtactatatttgcaaggacgttgctgcagaagaggagtgccggtatagcggccattgtacattcgcctattgtcaggaagaaattgacgtttggacattagagcggaaaggcgctttctcccgcgaggccttcttcggtggtaacggaaagatcaatctgaccgtgttcaagcttctacaggagcacttgggtgagtttatcttcctgtgcgaaaagtgttttgaccataaacctagaatgatctctaaaaggaacaaggataattcaacagcctgtagccatcccgtcactaaacacgagttcgaggacaacaaatgcctggtccatatactaagggagacaacggtgaagtacagcaagataaggtccttccatgggcaatgtcagcttgacctgtgccgccacgaggtgcggtatggttgtctgagagaagatgagtgcttctacgcccactccctcgtggaactgaaagtgtggattatgcaaaacgagacaggaatttcccatgacgcaatcgcacaggagagcaaacggtattggcagaaccttgaagccaatgtgcctggcgctcaggtgctgggaaatcagatcatgccgggcttcctgaacatgaagatcaaattcgtctgtgcgcagtgcctgaggaacggccaggtgatagagccagataagaacaggaagtactgcagtgcgaaggccagacactcttggacaaaagacagaagggccatgcgcgttatgtcgatcgagagaaagaaatggatgaatattcggccactccctaccaagaagcagatgcccctccagttcgacctttgcaatcacatcgcctctgggaagaaatgtcaatacgttgggaactgcagctttgctcactcccctgaggaacgcgaagtctggacttacatgaaggaaaatggtatccaagacatggaacagttctacgagctatggctcaagagccaaaagaacgaaaaaagtgaggacatcgcatcacagagcaacaaggaaaacggtaagcagattcatatgccaacagactatgcagaagtgaccgtggatttccattgctggatgtgcggaaaaaactgtaacagcgaaaaacagtggcagggacacatttcatcggaaaagcacaaagaaaaggtgttccacacagaagacgaccagtactgctggcagcatcgtttcccaacggggtactttagtatttgcgacagatatatgaacggaacatgcccagagggcaactcttgcaaatttgctcacggaaatgccgagctgcatgagtgggaggagaggagggatgctttgaaaatgaaattaaataaggctcgaaaggatcatcttattggaccaaatgataatgactttggcaagtactcttttctgtttaaggatctgaactag

SEQ ID NO: 178137 - DNA, 2916 bp, Artificial Sequence
  derived and/or modified sequence
atgagcaatgtgtctgaggagaggaggaagaggcagcagaacatcaaggagggcctgcagttcatccagagccccctgagctacccaggcacccaggagcagtatgctgtgtacctgcgggccctggtgaggaacctcttcaatgaaggaaatgatgtgtaccgggagcatgactggaacaacagcatcagccagtacacagaggccctgaacattgctgactatgccaagtctgaggagatcctgatccccaaggagatcatcgagaagctgtacatcaaccgcatcgcctgctacagcaacatgggcttccatgacaaggtgctggaggactgcaacatcgtgctgagcctgaatgccagcaactgcaaggccctgtacaggaagagcaaggccctgagtgacctgggccgctacaagaaggcctatgatgctgtggccaagtgcagcctggccgtgccccaggatgagcacgtgatcaagctgacccaggagctggcccagaagctgggcttcaagatcaggaaggcctacgtgcgggcagagctgagcctgaagtctgtgcctggagatggagccaccaaggccctgaaccacagcgtggaggacatcgagccagacctgctgaccccccggcaggaggccgtgcctgtggtgtccctgcctgcccccagcttcagccatgaggtgggcagcgagctggcctctgtgcctgtgatgcccctgaccagcatcctgcccctgcaggtggaggagagcgccctgcccagcgctgtgctggccaacggcggcaagatgcccttcaccatgcctgaggccttcctggatgatggagacatggtgctgggagatgagctggatgacctgctggacagcgcccctgagaccaatgaaacagtgatgcccagcgccctggtgcggggccccctgcagacagcctctgtgagccccagcatgcccttcagcgccagcctgctgggcaccctgcccatcggggcccgctatgcccccccacccagcttcagcgagttctacccacccctgaccagcagcctggaggacttctgcagcagcctgaacagcttctccatgtctgagagcaagagggacctgagcaccagcaccagccgggagggcacccccctgaacaacagcaacagcagcctgctgctgatgaatggacctggcagcctgtttgccagcgagaacttcctgggcatcagcagccagcccagaaatgactttggaaacttctttggatctgctgtgaccaagcccagcagctctgtgacccccaggcaccccctggagggcacccatgagctgcggcaggcctgccagatctgctttgtgaagagcggccccaagctgatggacttcacctaccacgccaacatcgaccacaagtgcaagaaggacatcctgattggccgcatcaagaatgtggaggacaagtcctggaagaagatccggccccggcccaccaagaccaactatgagggcccctactacatctgcaaggatgtggccgctgaggaggagtgccgctacagcggccactgcacctttgcctactgccaggaggagattgatgtgtggaccctggagaggaagggggccttcagccgggaggccttctttggaggaaatggcaagatcaacctgaccgtcttcaagctgctgcaggagcacctgggggagttcatcttcctgtgtgagaagtgctttgaccacaagcccaggatgatcagcaagaggaacaaggacaacagcacagcctgcagccaccctgtgaccaagcatgaatttgaggacaacaagtgcctggtgcacatcctgcgggagaccaccgtgaagtacagcaagatccgctccttccacggccagtgccagctggacctgtgcagacatgaggtgcgctatggctgcctgcgggaggatgagtgcttctacgcccacagcctggtggagctgaaggtgtggatcatgcagaatgaaacaggcatcagccatgatgccatcgcccaggagagcaagcgctactggcagaacctggaggccaacgtgcctggggcccaggtgctgggcaaccagatcatgcctggcttcctgaacatgaagatcaagtttgtgtgtgcccagtgcctgagaaatggccaggtgattgaaccagacaagaacaggaagtactgcagcgccaaggcccggcacagctggaccaaggacagaagagccatgagggtgatgagcattgaaaggaagaagtggatgaacatccggcccctgcccaccaagaagcagatgcccctgcagtttgacctgtgcaaccacatcgccagcggcaagaagtgccagtatgtgggcaactgcagctttgcccacagccctgaggagcgggaggtgtggacctacatgaaggaaaatggcatccaggacatggagcagttctatgagctgtggctgaagagccagaagaatgagaagtctgaggacatcgccagccagagcaacaaggaaaatggcaagcagatccacatgcccacagattatgcagaggtgacagtggacttccactgctggatgtgtgggaagaactgcaacagcgagaagcagtggcagggccacatcagcagcgagaagcacaaggagaaggtgttccacacagaagatgaccagtactgctggcagcaccgcttccccaccggctacttcagcatctgtgaccgctacatgaatggcacctgcccagagggcaacagctgcaagtttgcccatggaaatgctgagctgcacgagtgggaggagaggagagatgccctgaagatgaagctgaacaaggccaggaaggaccacctgattggccccaatgacaatgactttgggaagtacagcttcctgttcaaggacctgaactag

SEQ ID NO: 178138 - DNA, 2916 bp, Artificial Sequence
  derived and/or modified sequence
atgagcaacgtgagcgaggagcggcggaagcggcagcagaacatcaaagagggtctccagtttatccagtcacccctgagttatccggggactcaggaacaatacgcagtgtaccttcgtgctttggtcaggaatctcttcaacgagggcaacgacgtgtatcgagaacacgactggaataattcgattagtcaatatactgaggcactcaatatcgccgattacgcgaagtctgaggaaatcttgatacctaaggagataatcgaaaaactgtacattaatcgcatagcctgctacagcaacatgggattccacgacaaagtacttgaagactgcaacatcgtcctgtcactcaatgcctctaactgtaaggccttgtaccggaaaagcaaagcactgtccgatctcgggcgctataagaaggcctacgatgccgttgctaagtgttccttggctgtgcctcaggatgagcatgtgattaaattaacacaggagctggcccagaagcttggattcaagatccgcaaggcttacgtaagagcagagctgtctctcaagtccgtgcccggagatggggcaacaaaagcacttaaccactccgtagaggacatagagcctgacctgctgacacccagacaggaggccgtgcccgttgttagcttaccagccccgtcattttcccatgaagtgggaagcgagctcgcctctgtgcctgtcatgcccctaacatctatcctgcccctccaggttgaagagtccgctttgcccagtgcggtattagccaatggtggaaaaatgccttttacaatgcccgaggcgtttctcgacgatggggacatggttcttggcgacgagctggatgatctgcttgactcagcacctgaaaccaacgagactgtgatgccttcggcactggtccggggacctcttcagactgcttccgtatcaccaagcatgccttttagcgcctccctcctcggcacccttccaattggagctaggtacgctcctcccccctccttctcagagttctacccgccattaacgtcttccttggaagacttctgcagctccctcaattccttctccatgagtgagtccaagagggacttgtccacatctacttctagggagggtacaccccttaataattccaattcctcattattactcatgaatggcccggggagtctgtttgcatccgagaactttcttggtatctctagtcaaccgcgaaatgattttggaaacttctttggtagcgctgtcaccaagccttcctcttccgtaacacctcgtcatcccctggaaggcacacacgagctaaggcaggcctgtcagatctgcttcgtgaagtctggccctaaactcatggacttcacctaccacgcgaatatcgatcataagtgcaaaaaggacatcctgatcggccggattaagaatgtggaagacaagtcttggaagaagatccgcccacgtcccaccaaaaccaactacgaggggccctattacatctgtaaggatgtggcagctgaggaggagtgcaggtatagcggacactgcaccttcgcctattgccaggaggaaattgacgtatggactctggagagaaagggcgccttcagcagggaggcattcttcggcggcaatgggaagatcaatctcaccgtgtttaagctgcttcaagagcatctaggggagtttatctttctctgcgaaaaatgttttgatcataaacctcggatgatctcaaaacgaaataaggacaatagtacagcgtgcagccatcccgtaacaaagcacgagtttgaggacaataagtgtctggttcacatcctgagggagacgactgtaaagtattcgaagatccgttccttccatggccagtgccagcttgatctttgtaggcacgaagttaggtatgggtgccttagggaagacgagtgcttctacgcccattcgctggtggagctcaaggtatggattatgcagaatgagacagggatatctcatgacgccatcgcgcaggaaagtaagaggtactggcagaatctggaggcaaacgtgccaggcgcacaggtcctcggcaatcaaatcatgccgggattcttaaatatgaagatcaagtttgtttgcgcccagtgtctgcgcaatggccaagtgattgaacctgataaaaacagaaagtactgctctgcaaaggctaggcatagctggaccaaagataggcgggccatgcgggtgatgagcattgagaggaaaaagtggatgaacattcggccactgccaaccaaaaagcaaatgcccctgcagtttgacctgtgcaaccacatcgcatccggaaaaaagtgtcaatacgttgggaactgctccttcgcacatagtccagaagagcgcgaagtctggacctatatgaaagagaacggcatccaagatatggagcagttttatgagctgtggctgaagtcccagaagaatgaaaagagtgaggacatcgcgagccagagcaacaaagagaacgggaaacagatccacatgccaaccgattacgcagaagtgaccgtcgattttcactgctggatgtgcggaaaaaactgcaattccgaaaagcagtggcagggccacatatccagtgaaaagcacaaggaaaaggtattccataccgaagatgaccagtactgctggcagcatcggtttccaactggctacttcagtatatgtgatcggtacatgaatggcacctgccctgaggggaacagttgtaagttcgcccacggcaacgccgaattgcatgagtgggaggaacggcgcgatgctctgaaaatgaagctcaataaagcccggaaggaccacctaattggccctaacgacaacgacttcggcaagtatagttttttatttaaggacctcaactag

SEQ ID NO: 178139 - DNA, 2916 bp, Artificial Sequence
  derived and/or modified sequence
atgagcaacgtgagcgaggagcggcggaagcggcagcagaacatcaaggagggcttgcagtttatccagagcccactgagttatcccggaacccaggagcagtatgcagtttacctgagggcacttgtcagaaaccttttcaatgaaggcaatgacgtgtaccgagagcacgattggaataattcaatctctcaatatacagaggcgttaaacattgccgattatgcaaaatccgaagaaattttgattccaaaggagatcattgagaaattgtacatcaataggattgcctgctattcgaacatgggctttcatgataaagtgcttgaagactgtaatatagtgctgagcctgaatgcgagcaactgcaaggcactgtacagaaaatctaaggctctcagcgacttggggaggtataagaaagcatacgacgctgtagcgaaatgcagccttgctgtgccccaggacgagcatgttatcaagctgacacaagagctggcccagaagctggggttcaaaatcaggaaggcctatgtccgcgcggagttaagcctgaagtccgtgcctggcgatggagctactaaggcactgaaccactccgttgaggatatagagccagacctgcttacacctagacaggaggctgtgcctgttgtgtctttgccagctccgagcttcagccacgaagtgggttccgaactagcctccgtgccagtgatgcctctaactagtattctgccccttcaggtggaggagtccgccctgcccagtgcagtcttggctaatggcggcaagatgccttttactatgcctgaggccttcctggatgatggggacatggtcctgggagacgagctggatgatctgctggattcggcacctgagacaaatgagacggtgatgccaagcgcgctcgtgcgcggaccgttgcagaccgcttccgtttccccttcaatgcccttctccgcaagtctgctcggaaccctccccatcggcgcccggtacgccccaccccctagcttctctgaattctatccacctttgaccagctccctggaagatttttgctcctccctcaactcgttctcgatgtcagaatccaagcgggacctgtccacgtcgaccagccgggagggcacgccattaaataattcaaacagctcactactactaatgaacggaccggggtctctgttcgcctcagagaattttctggggatatcctctcagcccaggaatgactttgggaatttttttggcagtgctgtgactaaacccagctcatccgtgactcctagacaccccctcgaggggacccatgagctgagacaggcatgccagatctgttttgtgaaatcagggcctaagctgatggactttacctatcatgccaatatcgaccacaaatgtaaaaaagacatcctaattggacgaatcaaaaatgtggaggacaagtcatggaagaagattaggccgagaccgactaagacaaactacgaggggccgtactacatctgtaaggacgtggcagccgaggaggagtgcaggtacagtgggcattgcacgttcgcctattgccaggaagaaatcgacgtgtggaccttagaacgaaaaggggcctttagccgcgaggccttttttggggggaacggcaagatcaacctgaccgtcttcaaattgctgcaggagcacttgggggagtttatctttctctgtgaaaagtgcttcgaccacaagccccgcatgattagcaagcggaacaaggacaattcgaccgcgtgttcccatccagtcacaaaacatgaatttgaggacaacaagtgccttgtgcatatattgcgagaaactaccgttaagtactctaaaattcgatcctttcacggtcagtgccagttggacctctgcagacacgaagtacggtacggctgtttgagggaggacgaatgtttctatgctcatagcctcgtcgagctaaaggtgtggattatgcagaatgagacaggaatctcccatgacgcaatcgcccaggagagcaaacgttattggcagaacctcgaggctaatgtgcctggggctcaggtcctcggaaatcagattatgccagggtttctaaatatgaagattaagtttgtgtgcgcccagtgtctgagaaatgggcaagtgatcgaaccagataagaataggaaatattgttctgccaaggcccgtcatagctggactaaggacagacgagcaatgcgggtaatgtccatcgagcggaagaagtggatgaacatccgtccactcccgacaaaaaagcagatgcccttgcagtttgacctgtgcaatcacatagcatcaggcaaaaagtgccaatatgtgggaaattgctcatttgcccacagtcccgaggagcgcgaagtctggacctatatgaaagaaaatggcatccaggacatggaacaattttacgagctttggctaaaaagtcagaagaacgagaagtcggaggatatagcatcgcagtcaaataaagagaatggtaagcagatccacatgcctactgactatgcagaggttactgtagactttcactgctggatgtgtggtaaaaactgcaatagcgaaaagcagtggcagggccacataagcagtgaaaaacacaaggaaaaagtgtttcacacggaagacgaccagtattgctggcagcaccgattccctaccggttacttcagcatctgcgatcggtacatgaatggaacctgccctgaaggaaactcatgtaaattcgcccatgggaacgcggagctgcatgaatgggaagagcgaagggatgccctgaagatgaaacttaacaaggctagaaaggatcacttgatcgggcctaacgataacgatttcggcaagtatagttttctcttcaaagatctaaactag

SEQ ID NO: 178140 - DNA, 2916 bp, Artificial Sequence
  derived and/or modified sequence
atgagcaatgtgagcgaggaacgcaggaagcgccagcagaatataaaggaggggctccagttcattcagagtccgctatcatatcccggtacacaggaacagtatgccgtgtatctgcgagctctggtccgtaacctgtttaatgagggtaacgacgtgtatcgcgagcatgattggaataatagcatttcccagtataccgaggccctcaacatcgcagactatgctaaatctgaagaaatcctcatccctaaagagatcatcgaaaagttatatatcaacaggattgcatgttatagcaatatggggtttcacgataaagtcctggaggattgcaatatcgtgctgtctctgaatgcctctaattgtaaagcgctttatcggaagtcaaaagccctgtccgatctcggccgatataaaaaagcctatgatgccgtggccaagtgtagcctcgcagtcccacaggatgaacatgtgattaagctcactcaggaactcgcccagaaactgggattcaaaattaggaaagcttatgtgagggccgaactcagcctgaaatcagttccgggagacggggctacaaaggcgctcaaccattctgtggaggatatcgagccagatctgctcactccccgacaagaggcagtccctgtcgtaagtctaccagctccctcattttcgcacgaagtgggaagcgaacttgcctccgtcccagtaatgccacttacaagcatcctgcccttgcaagtggaggagtctgctctcccctccgccgtcttagcgaacggtggaaagatgccctttacaatgccagaggccttcctggacgacggcgacatggtgctgggcgacgagctggacgatttgttagattctgccccagagacgaacgaaacagtgatgccaagtgcgctggtccgaggccctctccagacggcctcagtgagcccctcaatgccattctcagctagcctattgggcaccctgcccatcggtgctcgctatgcccctccgccttcatttagtgagttttatccaccacttacatctagcctggaggacttttgtagtagtcttaattcatttagcatgtccgaaagcaagcgcgatctatcgacgagtacctcgagagaagggactcccctcaacaattccaactccagtctgctgttgatgaatgggccaggctccctgtttgcttctgagaactttcttggaatttcatctcagcccagaaacgactttgggaatttcttcggctcggcagtgacgaagcctagctcctctgtgacacctaggcaccccctagaaggaacccacgagctgcgtcaggcctgtcagatttgttttgtgaagtcaggaccaaaacttatggacttcacataccatgccaacatcgatcataagtgcaaaaaggatatcttaatagggaggatcaaaaatgtggaggataaaagctggaagaagatcaggccccgaccaactaagactaactacgagggtccctattatatctgcaaggacgtggctgccgaagaagaatgtagatactccgggcattgcacattcgcctattgccaggaggaaattgacgtatggacattagagaggaagggagcttttagcagggaagcattctttggcggtaatgggaaaataaacttaacggtgttcaagctgctgcaggaacatctgggtgaatttatcttcctatgcgagaaatgcttcgaccacaagcctcgcatgatctccaagcgcaacaaagataatagcacagcctgttctcatcctgtgactaagcatgagttcgaagataacaagtgtctggttcacattcttcgggaaactactgttaaatacagtaagatacgctcatttcatggacagtgtcagctagacttatgccgacacgaagttagatacgggtgtctcagagaagatgaatgtttctacgctcacagcctagtggagcttaaagtctggatcatgcagaacgagaccgggatttcccacgatgcgatcgcccaggagtccaagcggtattggcaaaaccttgaggctaacgtgcctggcgcacaggtgctgggtaaccagatcatgcccggatttctcaacatgaagattaaattcgtgtgcgcacagtgtttacgcaatggccaagtgatcgagcctgataaaaacaggaagtattgtagcgcaaaggcgcgtcattcatggacaaaagacagaagggctatgagagttatgtcaatcgagcgcaagaaatggatgaacatccgccctctgcctactaagaaacagatgccactgcagtttgatctgtgcaaccatattgccagtggaaagaaatgtcagtatgtgggaaattgctcttttgcacatagtcccgaagagcgcgaagtttggacctatatgaaggaaaatggtatccaggacatggaacaattctacgagctctggctcaagagccaaaagaacgagaaaagcgaagacatcgcttctcaatcgaataaagagaacggcaagcaaatacatatgccaactgattatgccgaggtgaccgtagattttcactgctggatgtgcggcaagaattgtaatagtgaaaagcagtggcaggggcatattagtagcgaaaagcataaggaaaaggtcttccatacagaggatgatcagtattgttggcagcaccgcttccccacgggctactttagtatttgtgatcgctatatgaacggcacttgcccggaaggcaattcatgcaaattcgcccacggaaatgccgaactgcacgaatgggaggaaagacgagacgccctgaagatgaagctcaacaaggctcggaaagaccaccttatagggccaaatgacaacgattttgggaagtactcatttttatttaaggatctgaattag

SEQ ID NO: 178141 - DNA, 2916 bp, Artificial Sequence
  derived and/or modified sequence
atgagcaatgtctccgaagaacggaggaagaggcagcagaacattaaagagggattgcagtttatccagtcccccctgtcttacccaggaacccaggagcagtacgccgtgtacctgcgagcccttgtgagaaatctgttcaatgaaggaaatgatgtataccgcgagcacgattggaataactccatatcccagtacactgaggctctgaacatcgcagactacgctaagagcgaggagatattgatcccgaaggagatcatcgaaaagctctacatcaataggattgcgtgctattctaacatggggtttcacgataaggtcctcgaggactgtaacatagtgctaagtctgaatgcatctaattgcaaggctctctacagaaagtctaaggccctgtccgatctgggaagatacaaaaaggcttatgatgcggtcgccaaatgtagcctggccgtcccccaggacgagcatgtgatcaagctgacacaggagctggcacagaagctgggatttaagatccgcaaggcctacgtcagagcggagctgagtcttaagagtgttcccggagatggggctactaaggccctcaatcactctgtcgaggatattgaaccggatctcctgacccctcggcaggaagctgttcccgtggtgtccctgcctgcaccatcattcagtcatgaggtcgggtcggaactggcttctgtgccagtcatgcccctgacctctatcttgcccctccaggtggaggagtccgcactgccttcagccgtgctggctaacgggggtaaaatgccctttactatgccggaggctttcctggatgatggcgacatggtgttgggcgacgagcttgacgatctcttagattctgcgccagaaacaaacgagaccgtgatgccgtctgctctggtgaggggaccgctccaaaccgccagcgtctcaccgtcaatgcctttctccgcgtcactcctaggaaccctacctatcggtgccaggtatgctcccccaccttctttctctgagttttaccctccactgacttcgagcctcgaagatttttgttcatctctgaactctttttcaatgtctgagagcaaaagggacctgtccacttctacttcgcgtgagggaacaccactaaacaattccaattcaagccttctccttatgaatgggccaggtagtctgttcgcctcagaaaacttccttggaatctcaagccagcccaggaacgatttcggtaacttcttcggctctgcggtgaccaagccctcaagctcagttacccccagacacccgctagagggcactcatgagctgcgacaggcctgtcagatctgctttgtgaagtccggtccaaaattgatggacttcacttatcatgccaacatcgatcataagtgcaagaaggatattctgatcggacgaataaagaatgtggaggacaagtcttggaaaaaaatcagacccaggccaacaaaaaccaattatgagggaccttattatatctgtaaagatgtagcggcagaggaggagtgtcgctattctggacactgcacttttgcttactgtcaggaggaaatcgatgtctggactctggagcgtaaaggcgctttctctagagaagcattctttggagggaatgggaaaatcaacctgacagtgtttaagctgttgcaggagcatttaggtgaatttatctttttatgcgaaaagtgtttcgaccataagcccaggatgatttccaaacgtaacaaagacaattccacagcgtgctcccatcccgtaaccaagcatgaatttgaggataataaatgcctggtacatatcttgcgcgagacgaccgttaagtatagtaaaatccgcagcttccatggccagtgccagcttgacctgtgtaggcatgaagttaggtatggctgtttacgggaggatgagtgcttctacgcacattccctggtggagctgaaggtctggattatgcagaacgaaacgggaatctcacacgacgccatagctcaggagagtaagaggtattggcagaacctggaggccaacgttcccggagcccaagtccttggtaaccagatcatgcccggattcctgaatatgaaaatcaagttcgtgtgtgctcagtgtctgagaaatggtcaagtgatcgagcccgataagaatagaaagtattgttccgctaaggctaggcattcatggactaaggacaggcgtgcaatgagagtcatgtctatcgagagaaaaaagtggatgaatattcggccattacccacgaagaagcagatgccacttcagttcgatctgtgcaatcatattgcaagtggcaagaagtgtcaatacgtgggcaactgttctttcgcccattcacctgaggaacgggaggtgtggacctatatgaaagaaaacggaatccaggatatggagcagttctacgaactgtggctaaagtcccaaaagaatgaaaaaagcgaggatattgctagtcagagcaataaggagaatggaaaacagatccacatgcctaccgactacgccgaggtgactgtggatttccattgttggatgtgtgggaaaaactgcaattccgagaagcagtggcagggacacataagctccgaaaaacacaaggagaaggtttttcacacagaagacgatcagtactgctggcagcatcgcttccctacgggctatttctctatctgtgaccgctacatgaatgggacgtgccctgagggcaacagctgtaagtttgcgcatggaaacgccgaactgcacgagtgggaggagaggcgggatgcactgaagatgaaactcaacaaggctcgaaaagaccacctgatcggtccaaacgacaatgacttcggtaagtattctttcctgtttaaagatctgaattag

SEQ ID NO: 178142 - DNA, 3801 bp, Artificial Sequence
  derived and/or modified sequence
aaccgagggagagctgcgagcgagcacccaggccccgccgccgccgccgccaccgctgcccgcctgccgccgcccgcctccgcctgccttctgccgccggccggcgcgtcgtccccacagattgctcatttagaaagtggatgtgtgggataacatgtccaatgtgtccgaggagagaagaaaaaggcagcagaacattaaggaaggactgcagtttatacagtcaccgctgtcatatccaggaacacaggagcaatatgcggtatatttgcgtgctctcgtgagaaatctttttaatgaaggaaatgacgtttatcgggaacatgattggaacaactcgataagccagtacacggaagccttgaatatagctgattatgcaaaatctgaagaaattttaatccccaaagaaataattgaaaaactatatataaatcgtattgcctgctattctaatatgggtttccatgataaagttttggaggactgcaatatagtcctcagtttaaatgccagtaactgcaaagctctgtatcggaaatctaaggctttaagtgatttaggaagatacaaaaaggcttacgatgctgtagcaaagtgctccttagcagtgcctcaggatgagcatgtaataaaactaactcaagaactagctcagaaattgggatttaaaataagaaaagcgtatgtcagagctgagctctcattaaaatcagttcctggggatggggctaccaaggctttgaaccattctgtggaagatattgagccagatttattaactccaaggcaagaagcagttcctgttgtctctttaccggcacccagtttttctcatgaagttggaagtgagctggcctcagttcctgttatgcccttaacttctattttgccactacaagtggaagagagcgctctgccatctgcagtgctggcaaatggaggaaagatgcccttcactatgccagaagcttttctagatgatggagatatggtccttggagatgaactagatgacctgcttgattctgcacctgaaactaatgaaactgttatgccgtcagctttagtcagaggaccccttcagacagccagtgtctctcctagcatgcccttttcggcatcgctgttaggaaccttacccattggtgcgaggtatgctcctccaccctccttctcagaattttatccacctttgacttcatccttagaagatttttgttcttctttaaattcattttcaatgagtgaatccaaacgagatctgtccacctcaacttctagagagggaacaccgcttaacaacagtaattcttcccttttacttatgaatggaccaggtagtttgtttgcttcagagaatttcctgggaatttcaagtcagcctagaaatgactttggaaacttttttggaagtgcagttaccaaaccatcttcatcagtgactccaagacatcccctcgaaggaacccatgaattgagacaagcttgccagatctgttttgtaaaatcaggccctaagttaatggatttcacttaccatgctaacatagatcataagtgtaagaaagatattttaatcggtaggataaagaatgttgaagataaatcatggaaaaaaatacgtccaagaccaacaaaaacaaattatgaaggaccatattatatatgtaaagatgttgctgctgaggaggaatgtagatattcaggccactgcacgtttgcttattgccaagaggagatagatgtgtggacactggagcggaaaggagcattcagccgggaggctttctttggcggcaatggaaagattaaccttactgtgttcaaacttctccaggagcatcttggggaatttatattcctttgtgagaaatgttttgatcataagcctagaatgataagtaaaagaaataaagataattctactgcttgttctcacccggttacaaagcatgagtttgaagacaataagtgccttgtccacattttgcgagagacaacagtaaaatactccaaaatacgttcttttcatggtcagtgtcagcttgatttatgtcgacatgaagttcggtatggctgtttaagggaagatgagtgcttttatgcccatagtcttgtggaactgaaagtctggataatgcaaaatgaaacaggtatctcacatgatgctattgctcaagagtctaaacgatattggcagaatttggaagcaaatgtacctggagcgcaggtacttggtaatcaaataatgcctggatttcttaatatgaagataaagtttgtgtgcgcccagtgtctgagaaacggtcaagtcattgaaccagacaaaaacagaaaatattgtagtgcaaaagcaaggcattcgtggaccaaagaccggcgtgcgatgagagtgatgtctattgaacgtaagaagtggatgaacatccgtcctctccccacaaagaaacaaatgcctttacagtttgatctgtgcaaccatattgcttctgggaaaaaatgtcaatatgttggaaactgttcctttgctcatagtcctgaggaaagagaagtttggacttacatgaaggagaatgggatacaagatatggagcaattttacgaactatggctcaagagtcaaaaaaatgaaaaaagtgaagacatagccagtcagtcaaacaaggaaaatggaaaacaaattcacatgccaacagattatgctgaagttacagtggactttcactgctggatgtgtgggaaaaactgcaacagtgagaagcagtggcagggccacatctcctccgagaagcacaaagagaaggttttccacaccgaggacgaccagtactgctggcagcaccgcttcccaacaggctatttcagtatttgtgataggtatatgaatggcacctgcccagaaggaaacagctgtaaatttgcacatggaaatgccgaacttcatgaatgggaagaaagaagagatgccctaaagatgaagctcaacaaagcacgaaaagatcacttaattggcccaaatgataatgactttggaaaatatagttttttgtttaaagatttaaactaatatgctggcttttatgtatgatacctaatcagagcattgaccagaaaaattgaaagtgttctgaggcacatagcagaggagctgcagatttcctgcttgtattggcgtatatcgttcctcctgagcagcaacccacagtaggtaggaaaatgggctgtttcacaggcctggccacgctctcacggaaccactggcatcagatggtgaagtgactgctacccggttgccatctgttgaacagacttttggatgaagtgtgttggggaagaggataaggttatatctaggacaactctttgagttggtccttcatataagaatcgtgacggtaagagaataaacacttgtactgggatcagaatacatgatggatgaaattctttacatgttttagcagaatgaatttgtttaatataataaagtttgctacttatctgtatgtaggttgctaaaaaggattttcttaactcagattttaagccaaataaccatttaacactagtatttgttaaatggggtatttttctgtatttgtatgtttcactataataagggaattaaggataatgtgcattgagaatattttgaaaaataattgactcaaattttatttcttggtcttttgctgtttaaatgatgattttgaaagattaaacctgtactgttggtattgtgttagtgtatggaccaatactgcctgtaataaagattttatatatagatgcctttca

SEQ ID NO: 178143 - DNA, 3844 bp, Artificial Sequence
  derived and/or modified sequence
aaagatgactcctgtacggtccctgccgtccaggaccctggagtcaagtcagaaatggatgtgtccacagctgattgtgtgacaaggtctggatttgtgggtgttttcattggagtccagggaccctggtaccttatgtgcttttttgccttgtttctttccagattgctcatttagaaagtggatgtgtgggataacatgtccaatgtgtccgaggagagaagaaaaaggcagcagaacattaaggaaggactgcagtttatacagtcaccgctgtcatatccaggaacacaggagcaatatgcggtatatttgcgtgctctcgtgagaaatctttttaatgaaggaaatgacgtttatcgggaacatgattggaacaactcgataagccagtacacggaagccttgaatatagctgattatgcaaaatctgaagaaattttaatccccaaagaaataattgaaaaactatatataaatcgtattgcctgctattctaatatgggtttccatgataaagttttggaggactgcaatatagtcctcagtttaaatgccagtaactgcaaagctctgtatcggaaatctaaggctttaagtgatttaggaagatacaaaaaggcttacgatgctgtagcaaagtgctccttagcagtgcctcaggatgagcatgtaataaaactaactcaagaactagctcagaaattgggatttaaaataagaaaagcgtatgtcagagctgagctctcattaaaatcagttcctggggatggggctaccaaggctttgaaccattctgtggaagatattgagccagatttattaactccaaggcaagaagcagttcctgttgtctctttaccggcacccagtttttctcatgaagttggaagtgagctggcctcagttcctgttatgcccttaacttctattttgccactacaagtggaagagagcgctctgccatctgcagtgctggcaaatggaggaaagatgcccttcactatgccagaagcttttctagatgatggagatatggtccttggagatgaactagatgacctgcttgattctgcacctgaaactaatgaaactgttatgccgtcagctttagtcagaggaccccttcagacagccagtgtctctcctagcatgcccttttcggcatcgctgttaggaaccttacccattggtgcgaggtatgctcctccaccctccttctcagaattttatccacctttgacttcatccttagaagatttttgttcttctttaaattcattttcaatgagtgaatccaaacgagatctgtccacctcaacttctagagagggaacaccgcttaacaacagtaattcttcccttttacttatgaatggaccaggtagtttgtttgcttcagagaatttcctgggaatttcaagtcagcctagaaatgactttggaaacttttttggaagtgcagttaccaaaccatcttcatcagtgactccaagacatcccctcgaaggaacccatgaattgagacaagcttgccagatctgttttgtaaaatcaggccctaagttaatggatttcacttaccatgctaacatagatcataagtgtaagaaagatattttaatcggtaggataaagaatgttgaagataaatcatggaaaaaaatacgtccaagaccaacaaaaacaaattatgaaggaccatattatatatgtaaagatgttgctgctgaggaggaatgtagatattcaggccactgcacgtttgcttattgccaagaggagatagatgtgtggacactggagcggaaaggagcattcagccgggaggctttctttggcggcaatggaaagattaaccttactgtgttcaaacttctccaggagcatcttggggaatttatattcctttgtgagaaatgttttgatcataagcctagaatgataagtaaaagaaataaagataattctactgcttgttctcacccggttacaaagcatgagtttgaagacaataagtgccttgtccacattttgcgagagacaacagtaaaatactccaaaatacgttcttttcatggtcagtgtcagcttgatttatgtcgacatgaagttcggtatggctgtttaagggaagatgagtgcttttatgcccatagtcttgtggaactgaaagtctggataatgcaaaatgaaacaggtatctcacatgatgctattgctcaagagtctaaacgatattggcagaatttggaagcaaatgtacctggagcgcaggtacttggtaatcaaataatgcctggatttcttaatatgaagataaagtttgtgtgcgcccagtgtctgagaaacggtcaagtcattgaaccagacaaaaacagaaaatattgtagtgcaaaagcaaggcattcgtggaccaaagaccggcgtgcgatgagagtgatgtctattgaacgtaagaagtggatgaacatccgtcctctccccacaaagaaacaaatgcctttacagtttgatctgtgcaaccatattgcttctgggaaaaaatgtcaatatgttggaaactgttcctttgctcatagtcctgaggaaagagaagtttggacttacatgaaggagaatgggatacaagatatggagcaattttacgaactatggctcaagagtcaaaaaaatgaaaaaagtgaagacatagccagtcagtcaaacaaggaaaatggaaaacaaattcacatgccaacagattatgctgaagttacagtggactttcactgctggatgtgtgggaaaaactgcaacagtgagaagcagtggcagggccacatctcctccgagaagcacaaagagaaggttttccacaccgaggacgaccagtactgctggcagcaccgcttcccaacaggctatttcagtatttgtgataggtatatgaatggcacctgcccagaaggaaacagctgtaaatttgcacatggaaatgccgaacttcatgaatgggaagaaagaagagatgccctaaagatgaagctcaacaaagcacgaaaagatcacttaattggcccaaatgataatgactttggaaaatatagttttttgtttaaagatttaaactaatatgctggcttttatgtatgatacctaatcagagcattgaccagaaaaattgaaagtgttctgaggcacatagcagaggagctgcagatttcctgcttgtattggcgtatatcgttcctcctgagcagcaacccacagtaggtaggaaaatgggctgtttcacaggcctggccacgctctcacggaaccactggcatcagatggtgaagtgactgctacccggttgccatctgttgaacagacttttggatgaagtgtgttggggaagaggataaggttatatctaggacaactctttgagttggtccttcatataagaatcgtgacggtaagagaataaacacttgtactgggatcagaatacatgatggatgaaattctttacatgttttagcagaatgaatttgtttaatataataaagtttgctacttatctgtatgtaggttgctaaaaaggattttcttaactcagattttaagccaaataaccatttaacactagtatttgttaaatggggtatttttctgtatttgtatgtttcactataataagggaattaaggataatgtgcattgagaatattttgaaaaataattgactcaaattttatttcttggtcttttgctgtttaaatgatgattttgaaagattaaacctgtactgttggtattgtgttagtgtatggaccaatactgcctgtaataaagattttatatatagatgcctttc

SEQ ID NO: 178144 - protein, 385 aa, Artificial Sequence
  derived and/or modified sequence
MEVTASSRHYVDRLFDPDPQKVLQGVIDMKNAVIGNNKQKANLIVLGAVPRLLYLLQQETSSTELKTECAVVLGSLAMGTENNVKSLLDCHIIPALLQGLLSPDLKFIEACLRCLRTIFTSPVTPEELLYTDATVIPHLMALLSRSRYTQEYICQIFSHCCKGPDHQTILFNHGAVQNIAHLLTSLSYKVRMQALKCFSVLAFENPQVSMTLVNVLVDGELLPQIFVKMLQRDKPIEMQLTSAKCLTYMCRAGAIRTDDNCIVLKTLPCLVRMCSKERLLEERVEGAETLAYLIEPDVELQRIASITDHLIAMLADYFKYPSSVSAITDIKRLDHDLKHAHELRQAAFKLYASLGANDEDIRKKVSLGEGRPPVLTASRQGVTST

SEQ ID NO: 178145 - DNA, 1158 bp, Artificial Sequence
  derived and/or modified sequence
atggaggtgaccgccagcagcagacactacgtggacagactgttcgaccccgacccccagaaggtgctgcagggcgtgatcgacatgaagaacgccgtgatcggcaacaacaagcagaaggccaacctgatcgtgctgggcgccgtgcccagactgctgtacctgctgcagcaggagaccagcagcaccgagctgaagaccgagtgcgccgtggtgctgggcagcctggccatgggcaccgagaacaacgtgaagagcctgctggactgccacatcatccccgccctgctgcagggcctgctgagccccgacctgaagttcatcgaggcctgcctgagatgcctgagaaccatcttcaccagccccgtgacccccgaggagctgctgtacaccgacgccaccgtgatcccccacctgatggccctgctgagcagaagcagatacacccaggagtacatctgccagatcttcagccactgctgcaagggccccgaccaccagaccatcctgttcaaccacggcgccgtgcagaacatcgcccacctgctgaccagcctgagctacaaggtgagaatgcaggccctgaagtgcttcagcgtgctggccttcgagaacccccaggtgagcatgaccctggtgaacgtgctggtggacggcgagctgctgccccagatcttcgtgaagatgctgcagagagacaagcccatcgagatgcagctgaccagcgccaagtgcctgacctacatgtgcagagccggcgccatcagaaccgacgacaactgcatcgtgctgaagaccctgccctgcctggtgagaatgtgcagcaaggagagactgctggaggagagagtggagggcgccgagaccctggcctacctgatcgagcccgacgtggagctgcagagaatcgccagcatcaccgaccacctgatcgccatgctggccgactacttcaagtaccccagcagcgtgagcgccatcaccgacatcaagagactggaccacgacctgaagcacgcccacgagctgagacaggccgccttcaagctgtacgccagcctgggcgccaacgacgaggacatcagaaagaaggtgagcctgggcgagggcagaccccccgtgctgaccgccagcagacagggcgtgaccagcacctag

SEQ ID NO: 178146 - DNA, 393 bp, Artificial Sequence
  derived and/or modified sequence
atgaagaacgccgtgatcggcaacaacaagcagaaggccaacctgatcgtgctgggcgccgtgcccagactgctgtacctgctgcagcaggagaccagcagcaccgagctgaagaccgagtgcgccgtggtgctgggcagcctggccatgggcaccgagaacaacgtgaagagcctgctggactgccacatcatccccgccctgctgcagggcctgctgagccccgacctgaagttcatcgaggcctgcctgagatgcctgagaaccatcttcaccagccccgtgacccccgaggagctgctgtacaccgacgccaccgtgatcccccacctgatggccctgctgagcagaagcagatacacccaggagtacatctgccagatcttcagctag

SEQ ID NO: 178147 - DNA, 1158 bp, Artificial Sequence
  derived and/or modified sequence
atggaagtgactgccagtagccggcactacgtcgatcggctgttcgatccggatccgcagaaagtgctccagggagtgatagacatgaaaaatgctgtcatcggcaacaacaagcagaaagccaacctgatcgttttgggcgccgtgccccggctactctacctgttgcagcaggagacttcaagtacggaactgaagacggagtgcgcagttgttctcggaagtcttgctatgggtacagagaacaacgtgaagagtctcttagactgccacattattcccgcactgctacagggtttgctctctccagatctaaagttcattgaggcttgccttcgctgtcttaggacgatctttactagtccggtgacccccgaagagcttctgtataccgacgctaccgtgatcccgcacctcatggcactactttcaaggtctcgctacactcaggagtatatctgtcagattttttcccattgctgcaagggtcccgaccaccagacgattctgttcaaccatggcgcggtccagaacattgcacacctgctgacgagcctgtcctataaggtgagaatgcaggcgctaaaatgtttctctgtgctggcgttcgaaaacccccaggtgagtatgacgctcgttaacgtcctggtggatggtgagttactgccgcagatctttgtgaagatgctacaaagagataagccaattgaaatgcagctgacatcagccaagtgcttgacatacatgtgccgggcgggggctattagaacagacgacaactgcattgtccttaagactctcccttgtcttgtgcgcatgtgttctaaagagcgcctgctggaggagcgtgtggaaggcgctgagacgcttgcctacttgatagagcccgatgtagaactccaacggatagcaagcatcaccgaccaccttattgcaatgttagccgactattttaagtacccaagttcagtttccgctatcaccgacataaaacgcttggatcatgacttgaaacacgctcacgaactgcggcaggctgccttcaagctttatgcgagcttgggagccaatgacgaagatatcagaaaaaaagttagcctgggcgagggtcgaccacctgtgcttacagcttcccgccaaggggtgacatccacctag

SEQ ID NO: 178148 - DNA, 393 bp, Artificial Sequence
  derived and/or modified sequence
atgaaaaacgccgtcatagggaataataaacagaaggcgaatctgatcgtgctaggtgccgtacctcgtctgctgtacttgcttcagcaagagacaagctctactgaacttaagaccgaatgtgcagtggttttggggtctctcgccatgggcacagagaataatgtcaagagcttgttggattgccacatcatcccagcactgttgcagggcctgctgagtccggacttgaagtttattgaagcttgcctccggtgtctgcggactattttcacgtcgcccgtgacccctgaagagctgctttacactgatgccaccgtcattccacatttgatggccctcctatctcggtctcgatacacccaggagtacatctgtcagattttttcttag

SEQ ID NO: 178149 - DNA, 1158 bp, Artificial Sequence
  derived and/or modified sequence
atggaggtgactgcttcctcccgccactacgttgataggttatttgatcccgaccctcaaaaagtactgcagggggtaatcgatatgaagaatgccgtgatcggtaataacaaacagaaagcgaatctgatagtcctcggcgcagtgcctcgtctgctgtatcttcttcaacaggagacctcttccaccgagctcaaaacagagtgtgccgttgtgttggggagcctggccatgggcacagaaaacaatgttaagtcactcctggattgccacataatccctgctctcttgcagggcctactcagccctgacctaaagttcattgaagcttgtctgcgctgtctgcggaccatcttcacgagcccggtcacccctgaggagttactgtacacagatgcaacagtcataccacatctgatggcgctcttgagtaggagcaggtacacccaggaatatatctgccagatattctcacactgttgcaaagggcccgaccaccagacgattctgtttaatcacggggcagtgcagaacattgcccaccttctgaccagtctttcttataaagtaaggatgcaggctctgaaatgcttttccgtgctggcattcgagaatccacaagtgtccatgaccttagtgaacgtgctggttgatggcgaactgttgccacagatttttgtgaaaatgctgcaacgcgataagccgatcgagatgcagcttacctctgcgaaatgtttaacctatatgtgccgcgccggagcaataaggaccgatgataactgtatcgtcctcaaaaccctgccatgcctcgtcagaatgtgctcgaaggagcgccttctggaggaaagggttgagggcgccgagaccctggcttatctgattgagcctgacgtggagctgcaaagaatcgccagcatcacggatcatttaatagcaatgttggcggattactttaaataccccagcagcgtgtcagccataactgacattaagaggcttgatcatgatctgaagcacgcacacgagctcaggcaggccgcattcaaactgtacgccagcctgggagccaacgacgaagacatccgcaagaaggtgtcactaggcgaggggcggccccccgttcttactgcttcaagacaaggggtcacctccacttag

SEQ ID NO: 178150 - DNA, 1158 bp, Artificial Sequence
  derived and/or modified sequence
atggaggtgacagccagcagccgccactacgtggaccggctgtttgatcctgacccccagaaggtgctgcagggcgtgattgacatgaagaatgctgtgattggcaacaacaagcagaaggccaacctgattgtgctgggcgctgtgccccggctgctgtacctgctgcagcaggagaccagcagcacagagctgaagacagaatgtgctgtggtgctgggcagcctggccatgggcacagaaaataatgtgaagagcctgctggactgccacatcatcccagccctgctgcagggcctgctgagcccagacctgaagttcatcgaggcctgcctgcgctgcctgcggaccatcttcaccagccctgtgaccccagaggagctgctgtacacagatgccaccgtcatcccccacctgatggccctgctgagccgcagccgctacacccaggagtacatctgccagatcttcagccactgctgcaagggccctgaccaccagaccatcctcttcaaccacggggctgtgcagaacatcgcccacctgctgaccagcctgagctacaaggtgaggatgcaggccctgaagtgcttctctgtgctggcctttgagaacccccaggtgtccatgaccctggtgaatgtgctggtggatggagagctgctgccccagatctttgtgaagatgctgcagagggacaagcccatcgagatgcagctgaccagcgccaagtgcctgacctacatgtgccgggccggggccatcagaacagatgacaactgcatcgtgctgaagaccctgccctgcctggtgaggatgtgcagcaaggagcggctgctggaggagcgggtggagggcgctgagaccctggcctacctgattgaaccagatgtggagctgcagagaattgccagcatcacagaccacctgattgccatgctggccgactacttcaagtaccccagctctgtgtctgccatcacagacatcaagaggctggaccatgacctgaagcacgcccacgagctgcggcaggccgccttcaagctgtatgccagcctgggcgccaatgatgaggacatcaggaagaaggtgtccctgggggagggccggccccctgtgctgacagccagccggcagggcgtgaccagcacctag

SEQ ID NO: 178151 - DNA, 393 bp, Artificial Sequence
  derived and/or modified sequence
atgaagaatgctgtgattggcaacaacaagcagaaggccaacctgattgtgctgggcgctgtgccccggctgctgtacctgctgcagcaggagaccagcagcacagagctgaagacagaatgtgctgtggtgctgggcagcctggccatgggcacagaaaataatgtgaagagcctgctggactgccacatcatcccagccctgctgcagggcctgctgagcccagacctgaagttcatcgaggcctgcctgcgctgcctgcggaccatcttcaccagccctgtgaccccagaggagctgctgtacacagatgccaccgtcatcccccacctgatggccctgctgagccgcagccgctacacccaggagtacatctgccagatcttctcctag

SEQ ID NO: 178152 - DNA, 1158 bp, Artificial Sequence
  derived and/or modified sequence
atggaggtgaccgccagcagccggcactacgtggaccggctgttcgaccctgatcctcagaaggtcctgcagggggtcattgacatgaagaatgccgtgatcggaaacaataaacaaaaggccaatctcattgtgcttggagccgtcccccggctcctatacctcttacagcaggagacttctagcactgagctgaagactgaatgcgcagtggtcctcggctccctggctatgggcaccgagaataatgtcaagagcctgttggattgtcatattataccagctttattacaggggctactgagcccagacctgaaattcatcgaagcatgtctgagatgtctccggaccatcttcacaagccccgttacccctgaagaactgctttataccgatgccacggttataccccacctaatggcccttctgtcgcggtccagatacactcaggaatatatatgccagatcttttctcactgttgcaagggacccgatcaccaaaccatcctgttcaatcacggggcagttcagaatattgcgcacctcctgacgtctctcagctacaaagtcaggatgcaagctttaaaatgcttcagcgtgctggcatttgagaatcctcaggtcagtatgaccctggtcaacgtgctggtggatggcgaactgttgccccagatctttgtgaagatgctgcagagggataaacctattgaaatgcaattaaccagcgccaagtgtctaacctatatgtgccgggcgggggctatcagaacagacgacaattgtatagtgcttaagacgctgccctgtttagtacgtatgtgcagcaaggagaggctgctggaggagcgggttgagggtgccgaaaccctggcatacctaatcgagcctgacgtggaactgcagcgaatcgccagcataaccgaccacttgatcgctatgcttgcggattactttaagtatccgtcctcagtgagtgcaatcaccgacataaagagattggatcatgatcttaagcacgcacacgagttgaggcaagccgcctttaagctctacgccagccttggggccaatgatgaggacattaggaaaaaggtgagtctgggagagggcaggccaccagttcttaccgcctccagacagggagttaccagtacatag

SEQ ID NO: 178153 - DNA, 393 bp, Artificial Sequence
  derived and/or modified sequence
atgaagaacgccgtgatcggcaacaacaagcagaaggccaacctgattgtgttgggggctgtgccacgccttctttatctgttacagcaggagaccagttcaactgaactgaagaccgagtgcgcagttgtcctgggctccctggcaatgggaaccgaaaacaacgtaaaaagccttctggattgccacattatccccgccctgctccagggcctgctctctcctgatctgaaatttattgaggcatgcctgagatgtctccgcacaatttttacctcgccagtgactccggaggaactgttgtataccgacgccactgtgatcccccacctgatggccctgcttagtagaagtaggtacacccaagagtatatatgccagattttttcttag

SEQ ID NO: 178154 - DNA, 1158 bp, Artificial Sequence
  derived and/or modified sequence
atggaggtgaccgccagcagccggcactacgtggaccggctgttcgacccagatccgcagaaggtcctgcagggtgtgatcgatatgaaaaatgccgtgatcgggaataataaacagaaggccaacctgattgttttaggagcagtacctcggctgctttacctactccaacaggaaacatcgagcaccgaactgaagactgagtgcgctgtcgttctcggaagcctggccatgggcaccgagaacaacgtcaagtcgctactggattgtcacattatcccggcattgctacaggggctcttatcgccagacctgaaatttattgaggcttgcttgcgttgtctgcgcacgattttcacaagcccagtcactcctgaggagctactgtatacggatgccacggtgatacctcacctcatggctctgctatcaagatctagatatactcaggagtacatctgccagatttttagccattgctgtaaggggcccgatcaccagactatcctgttcaatcacggtgccgttcaaaatatcgcccatctgctcacaagcctctcctacaaggtcaggatgcaggcactgaagtgctttagcgtcttggctttcgaaaatccacaagtgagtatgacactagttaacgtgttggtggacggagaattgttaccccagatttttgtcaagatgctgcagagggacaagccgattgagatgcagctgacctctgctaagtgcctcacctatatgtgcagagctggagccatcagaactgatgataactgcattgtcctgaaaacgttaccttgcttagtgcgaatgtgctccaaggaaaggttgctagaagaacgagttgaaggagccgagaccctcgcatatcttatcgaacctgacgttgaattgcagcgaatcgcctccatcacggaccacctgatcgccatgctagccgactacttcaaatacccatctagtgtctccgccatcaccgacattaagcgcttggatcacgatctgaaacatgcgcatgagcttaggcaagccgcttttaaactttacgcctctcttggggcgaacgacgaggacatcagaaagaaggtgagccttggagaaggcaggccacccgtcctgaccgcgtctaggcagggggtcacatcgacttag

SEQ ID NO: 178155 - DNA, 1158 bp, Artificial Sequence
  derived and/or modified sequence
atggaagtgactgcatcctcacggcattatgtggacagactgttcgaccccgatccacagaaagtgctccagggcgtaatcgacatgaaaaatgcagtgattggcaacaataaacaaaaggcaaacctgattgtcctgggcgctgttccccgacttctctatttgctgcagcaggagacgtcctcaaccgaactgaaaactgaatgcgccgttgtgctgggatcccttgccatgggaactgagaataacgtcaaatctctgctcgattgtcatatcataccggcactgctgcaaggcctcctgtcacccgacctcaagtttattgaggcttgcctgagatgtctaaggacaatcttcacttcacccgtcacccctgaagagttgctgtataccgatgctactgtcattccccatttaatggccctgctgtcccgctctcggtacacgcaagagtatatctgccaaatttttagtcactgctgtaagggaccggatcatcagaccatcctcttcaatcacggcgctgtgcaaaacatcgctcatctcctgacttctctaagctacaaagtgagaatgcaggcgctgaaatgtttcagtgtcttggcattcgagaacccccaggtgtccatgacactggtcaacgtactcgtagatggtgagctcctcccgcagatattcgtcaagatgcttcagagagataagcccatcgagatgcaattgaccagcgccaagtgtttgacttatatgtgcagagcaggggcaatccgcacagacgataattgtattgtcttgaaaactctcccctgcctcgtccggatgtgctctaaggagagactgctggaagagcgcgtagagggagccgagaccctcgcctatctgatcgaaccagatgttgagctccagagaattgctagcataaccgaccacctcattgccatgctggccgattattttaagtaccctagctcagtctcagctataacagatatcaagcgactggaccacgacctgaaacacgcccacgagctgcggcaagctgcgttcaaactgtacgcaagtctgggcgctaatgacgaggatattcggaagaaggtaagtctgggcgagggacggccacctgtcctgacagcctccagacaaggagtgactagcacctag

SEQ ID NO: 178156 - DNA, 393 bp, Artificial Sequence
  derived and/or modified sequence
atgaagaacgcggttatcggaaacaataagcagaaggctaatttgatcgtgctgggggctgtgcctaggctgttatacctcttacagcaggaaacctcaagtaccgaattaaaaactgaatgcgccgtcgtgctgggtagcctcgcaatgggtacagagaacaacgtgaaatcactgttagattgccacattatacctgccttgttgcaaggcttgctcagcccagatctgaaatttatcgaagcgtgccttagatgcctgagaaccatatttacctctccagttaccccagaggaactgttatacacagatgcgacagtcattcctcacctcatggcactgcttagccggtctcggtacactcaagagtatatctgtcaaattttcagctag

SEQ ID NO: 178157 - DNA, 1158 bp, Artificial Sequence
  derived and/or modified sequence
atggaagttacagcaagttcgcgccattatgtggatagactgttcgatcctgatcctcaaaaagtgcttcaaggagtaatcgatatgaagaatgctgtgataggcaataataagcagaaggccaacctgatcgtcttgggagcagtgcctaggcttctgtacttgctccagcaggaaacctcttccaccgaactcaagaccgaatgcgcagtcgttctaggctctttggccatgggcacagagaataacgttaaaagcctgctcgattgtcacattataccagcgctcttgcagggcctcctctcacctgaccttaaattcatcgaagcttgtcttagatgcctaagaaccatcttcacttccccagtcactcctgaggagctgctgtatactgacgccacagtgattccgcacttgatggcgctgttatcaagaagccggtatacacaagagtatatttgccagatcttctcacattgttgcaagggcccagatcaccaaacaattctgttcaaccacggcgcagtgcaaaatattgcgcatctcttgactagccttagctacaaggtgcgcatgcaagctttaaagtgctttagcgttctagcgttcgagaatcctcaggtgtcgatgacactggtcaacgttctggtcgatggggaattactaccgcagatctttgtcaaaatgctccagcgcgacaagcctatagagatgcagctgacgtctgccaaatgccttacgtatatgtgtcgggcaggagctattaggactgatgataattgcatcgtgctaaagaccctcccctgtctggtgcgcatgtgttccaaggagaggctcctggaggaacgggtggaaggggcagagacgcttgcatacctgattgagcccgatgttgaattacagcggatcgcaagtattacagatcacctgatcgccatgctagcagactattttaagtacccttcgagtgtttcggccattactgacattaaacgactggaccatgatcttaagcatgcccacgagcttaggcaggcagccttcaagctttacgcctccctcggtgctaatgacgaagacatcagaaaaaaagtcagtctgggcgagggaaggccccctgtcctgaccgctagccgccaaggggttacttccacatag

SEQ ID NO: 178158 - DNA, 3181 bp, Artificial Sequence
  derived and/or modified sequence
gagagaacgattcgtaggacagcccctgacgccattcccttttgcccttctttctgcgggcctttccggtacttgagcggtgtccagagcgtggccagttctcgtctatctggctgcctttagggagcggtgcctagcgttggccaatagttggctgtcgaaagtgccggcccccgcgccggcgcctgcagcagccgggtgggaaggctcaagatggcgtgcttgttggagaccccaatccgcatgagcgtcctttcgtttttttaaagaaaaagacgactttcacctttcactatgttgctcttgaaccaggaccaggaatgaaagttactgggagataacttcgaaggattttgcaacaaattcgagctgtccgactctgagaatggaagtaacagctagcagtcgccactatgttgacaggctatttgaccctgatccccagaaagttctacaaggtgtcatagacatgaaaaatgctgtaattggaaacaacaagcagaaagccaatctcattgttttaggagctgttccaagattgttgtacttgcttcagcaagaaacctcaagcacagagctgaaaactgaatgtgcagtggtgttgggaagtcttgctatgggtactgaaaacaatgtcaagtctctactggactgccatattatccctgccttattgcaaggactactgtccccagacctgaagtttattgaagcttgcctccgatgcctgcgtaccatcttcaccagtcctgtcactccagaggagctactgtatacagatgccacagtgataccacacctcatggcactgcttagcaggtcccgctatacccaggagtacatctgtcagatcttctcacactgctgtaaagggccagatcatcaaacaattttatttaaccacggtgcagttcagaatattgctcacctactaacctcactgtcctacaaagttcgaatgcaagcactgaaatgtttctcagttttagcttttgaaaacccccaggtatcgatgaccctggtaaatgttttggttgatggagaattgttaccacagatttttgtgaagatgttacagagggataagcctattgagatgcagctcacatcagcaaaatgtttaacttacatgtgtagagctggagcaattcggacagatgataactgtattgtattaaagacattaccttgtttggttcgaatgtgcagtaaggagagattactagaggagagagttgaaggagctgagacacttgcctatctgattgaaccagatgttgagctacagagaatcgctagcataactgatcacctcattgccatgcttgctgattatttcaagtatcccagctcagtgagtgccatcactgatattaaaaggcttgatcatgatttaaaacatgctcacgaactccgccaggctgcattcaagctctatgcctctcttggagcaaatgatgaagacatccggaagaaggtgagtctgggagaggggcgtcccccagtcctgacagccagcaggcagggagtgacgtcaacctgaaagtcgtggtgaagagcactaacagtgactgtttgaatataataaagcagagtgactaaaggcataattgaagaatgaatgggacccggatttggggggttgtttgtttgtttttagaacatagagtggcatggccgtgctggaatgacaaataactggcgtgctttttttttgtgtcattaatatgaattattatgttgcacatttttgcatgtgttctgataaaaatcaattctagcactgtgaagcttcagacaccttgaaagtcctaacattagaattgtaaatgttatttatggaaataccttccaatgctattgagaaattcaaatctctattgtatattgttctttgatatgtggcttagttttatgttttgattttttttgctactgtgcaagtttaatgtgaataaaatctttgtggaatgatgattttatgtttagtgagtggtcatctgaattttccagctccccagaaaatgtatgcactggtatagcacccttatgttactaaagcctagtctaacactgaactcatgttcttgatgagaatacttctagatgaggagtatagtggtaagtaagctctgacttggctccttccacaaaccaaaaagctggaacttaccactcaaaaacatgtataacctaataaattctacacaaggctttcaagaccatcagagagcaaaaccacatgttctgtcttgaggagccatagcagaaagagcaaattagtcattatttactgaacatgatgatttactaaatctctccatctgcattagtattttaaggagcactgtgagagaaatcacaaagtattagagtttaccatgattcagagaagttcttcaggcctgtagaaagaggagtatggaacaaccttacatttgttgaaataacttgaaaaggaaccatttcttgaagaaactgaagtaatagcaataagatttgatgtgtgagtagctttgatttaaaatcaatgcaaaaagcacaactaataaattgaatgtttccatgtacctcactttatttcagttaacaagatactttgacttgaagtgtttttagtgtatccctatgaaaatcatttttggtacatctaagttttcacttataaactgttatttcaaagcaaacatactagtgatatatatatgatttatggatgttgacgccaatgttcagtttgggtacgttggtgtattgcaaggggagaggcttttataacaatagatttgaacatttttaaaaaattggactgtgtaacttaaatacacaattatttggtttaggatggttattagggcccattagaaacaggagaagtattttacccattcttaaagctctaaaaaaccatctcatggactgaaaggtagatagacagatggaccacaatgggaaataggatgtccatttgtacttctttgtacttttttgttaataaactgttttggaattaatggcttaatttgtgatatcatgttctagaaatacctgcaacatgacagtctaatcagtagtctattaaaacttgtattcataatgtgtataatttcctggtaaggctaactcctgatcgtttctgtagaaagatgacaaataaagaaaaagttataattattaatta

SEQ ID NO: 178159 - DNA, 807 bp, Artificial Sequence
  derived and/or modified sequence
aggctcagagtagctgctgtttctgagagaacgattcgtaggacagcccctgacgccattcccttttgcccttctttctgcgggcctttccggtacttgagcggtgtccagagcgtggccagttctcgtctatctggctgcctttagggagcggtgcctagcgttggccaatagttggctgtcgaaagtgccggcccccgcgccggcgcctgcagcagccgggtgggaaggctcaagatggcgtgcttgttggagaccccaatccgcatgagcgtcctttcgtttttttaaagaaaaagacgactttcacctttcactatgttgctcttgaaccaggaccaggaatgaaagttactgggagataacttcgaaggattttgcaacaaattcgagctgtccgactctgagaatgagacatgaaaaatgctgtaattggaaacaacaagcagaaagccaatctcattgttttaggagctgttccaagattgttgtacttgcttcagcaagaaacctcaagcacagagctgaaaactgaatgtgcagtggtgttgggaagtcttgctatgggtactgaaaacaatgtcaagtctctactggactgccatattatccctgccttattgcaaggactactgtccccagacctgaagtttattgaagcttgcctccgatgcctgcgtaccatcttcaccagtcctgtcactccagaggagctactgtatacagatgccacagtgataccacacctcatggcactgcttagcaggtcccgctatacccaggagtacatctgtcagatcttctcac

SEQ ID NO: 178160 - DNA, 829 bp, Artificial Sequence
  derived and/or modified sequence
gcggccgagccaaagacgtttccaactccgggagctcccgccggtgcgggttcccaggatggcgtctggcaggcggggtggctgggcttatagacaactggctgggcggcgcggcttggactttgccaagcgtttcactgagccttccttttagcgatgccgcttcccgggggccgaacgctctgccttgtgaagcgccgggcttgcagccggcctgagaacgagcgcccactcagctctcccgggctttggcaagaagaggtgcaggctccttggcccccatttcctcagagctgccaggccaagtctgtgcggcttctatcgcgtcccagcacctgggcaccggctgaagcagtttgctttttggcaatggtgattcgtatcagctgcaactcttcctagtgtgtgtggttttttaagcccctttcctccgctctgctcagaggtcgcggctctgagtcagaggaactctatgttccctgtgcctggtattccgtttttctttaaggggagtcaaacattgaaggggggaaaagggggtgagatttatttccccattgttgaaagaagggaacgtattgacatgccaggaagtaaaacctgttttttttttttttaaaaaaagtttttttaaagaaaaagacgactttcacctttcactatgttgctcttgaaccaggaccaggaatgaaagttactgggagataacttcgaaggattttgcaacaaattcgagctgtccgactctgagaatggaagtaacagctagcagtcgccactatgttgacaggctatttgaccctgatccccagaaagttctacaaggtgt

SEQ ID NO: 178161 - DNA, 2910 bp, Artificial Sequence
  derived and/or modified sequence
gcagcagccgggtgggaaggctcaagatggcgtgcttgttggagaccccaatccgcatgagcgtcctttcggaccaggaatgaaagttactgggagataacttcgaaggattttgcaacaaattcgagctgtccgactctgagaatggaagtaacagctagcagtcgccactatgttgacaggctatttgaccctgatccccagaaagttctacaaggtgtcatagacatgaaaaatgctgtaattggaaacaacaagcagaaagccaatctcattgttttaggagctgttccaagattgttgtacttgcttcagcaagaaacctcaagcacagagctgaaaactgaatgtgcagtggtgttgggaagtcttgctatgggtactgaaaacaatgtcaagtctctactggactgccatattatccctgccttattgcaaggactactgtccccagacctgaagtttattgaagcttgcctccgatgcctgcgtaccatcttcaccagtcctgtcactccagaggagctactgtatacagatgccacagtgataccacacctcatggcactgcttagcaggtcccgctatacccaggagtacatctgtcagatcttctcacactgctgtaaagggccagatcatcaaacaattttatttaaccacggtgcagttcagaatattgctcacctactaacctcactgtcctacaaagttcgaatgcaagcactgaaatgtttctcagttttagcttttgaaaacccccaggtatcgatgaccctggtaaatgttttggttgatggagaattgttaccacagatttttgtgaagatgttacagagggataagcctattgagatgcagctcacatcagcaaaatgtttaacttacatgtgtagagctggagcaattcggacagatgataactgtattgtattaaagacattaccttgtttggttcgaatgtgcagtaaggagagattactagaggagagagttgaaggagctgagacacttgcctatctgattgaaccagatgttgagctacagagaatcgctagcataactgatcacctcattgccatgcttgctgattatttcaagtatcccagctcagtgagtgccatcactgatattaaaaggcttgatcatgatttaaaacatgctcacgaactccgccaggctgcattcaagctctatgcctctcttggagcaaatgatgaagacatccggaagaaggtgagtctgggagaggggcgtcccccagtcctgacagccagcaggcagggagtgacgtcaacctgaaagtcgtggtgaagagcactaacagtgactgtttgaatataataaagcagagtgactaaaggcataattgaagaatgaatgggacccggatttggggggttgtttgtttgtttttagaacatagagtggcatggccgtgctggaatgacaaataactggcgtgctttttttttgtgtcattaatatgaattattatgttgcacatttttgcatgtgttctgataaaaatcaattctagcactgtgaagcttcagacaccttgaaagtcctaacattagaattgtaaatgttatttatggaaataccttccaatgctattgagaaattcaaatctctattgtatattgttctttgatatgtggcttagttttatgttttgattttttttgctactgtgcaagtttaatgtgaataaaatctttgtggaatgatgattttatgtttagtgagtggtcatctgaattttccagctccccagaaaatgtatgcactggtatagcacccttatgttactaaagcctagtctaacactgaactcatgttcttgatgagaatacttctagatgaggagtatagtggtaagtaagctctgacttggctccttccacaaaccaaaaagctggaacttaccactcaaaaacatgtataacctaataaattctacacaaggctttcaagaccatcagagagcaaaaccacatgttctgtcttgaggagccatagcagaaagagcaaattagtcattatttactgaacatgatgatttactaaatctctccatctgcattagtattttaaggagcactgtgagagaaatcacaaagtattagagtttaccatgattcagagaagttcttcaggcctgtagaaagaggagtatggaacaaccttacatttgttgaaataacttgaaaaggaaccatttcttgaagaaactgaagtaatagcaataagatttgatgtgtgagtagctttgatttaaaatcaatgcaaaaagcacaactaataaattgaatgtttccatgtacctcactttatttcagttaacaagatactttgacttgaagtgtttttagtgtatccctatgaaaatcatttttggtacatctaagttttcacttataaactgttatttcaaagcaaacatactagtgatatatatatgatttatggatgttgacgccaatgttcagtttgggtacgttggtgtattgcaaggggagaggcttttataacaatagatttgaacatttttaaaaaattggactgtgtaacttaaatacacaattatttggtttaggatggttattagggcccattagaaacaggagaagtattttacccattcttaaagctctaaaaaaccatctcatggactgaaaggtagatagacagatggaccacaatgggaaataggatgtccatttgtacttctttgtacttttttgttaataaactgttttggaattaatggcttaatttgtgatatcatgttctagaaatacctgcaacatgacagtctaatcagtagtctattaaaacttgtattcataatgtgtataatttcctggtaaggctaactcctgatcgtttctgtagaaagatgac

SEQ ID NO: 178162 - protein, 2564 aa, Artificial Sequence
  derived and/or modified sequence
MKQLQPQPPPKMGDFYDPEHPTPEEEENEAKIENVQKTGFIKGPMFKGVASSRFLPKGTKTKVNLEEQGRQKVSFSFSLTKKTLQNRFLTALGNEKQSDTPNPPAVPLQVDSTPKMKMEIGDTLSTAEESSPPKSRVELGKIHFKKHLLHVTSRPLLATTTAVASPPTHAAPLPAVIAESTTVDSPPSSPPPPPPPAQATTLSSPAPVTEPVALPHTPITVLMAAPVPLPVDVAVRSLKEPPIIIVPESLEADTKQDTISNSLEEHVTQILNEQADISSKKEDSHIGKDEEIPDSSKISLSCKKTGSKKKSSQSEGIFLGSESDEDSVRTSSSQRSHDLKFSASIEKERDFKKSSAPLKSEDLGKPSRSKTDRDDKYFSYSKLERDTRYVSSRCRSERERRRSRSHSRSERGSRTNLSYSRSERSHYYDSDRRYHRSSPYRERTRYSRPYTDNRARESSDSEEEYKKTYSRRTSSHSSSYRDLRTSSYSKSDRDCKTETSYLEMERRGKYSSKLERESKRTSENEAIKRCCSPPNELGFRRGSSYSKHDSSASRYKSTLSKPIPKSDKFKNSFCCTELNEEIKQSHSFSLQTPCSKGSELRMINKNPEREKAGSPAPSNRLNDSPTLKKLDELPIFKSEFITHDSHDSIKELDSLSKVKNDQLRSFCPIELNINGSPGAESDLATFCTSKTDAVLMTSDDSVTGSELSPLVKACMLSSNGFQNISRCKEKDLDDTCMLHKKSESPFRETEPLVSPHQDKLMSMPVMTVDYSKTVVKEPVDTRVSCCKTKDSDIYCTLNDSNPSLCNSEAENIEPSVMKISSNSFMNVHLESKPVICDSRNLTDHSKFACEEYKQSIGSTSSASVNHFDDLYQPIGSSGIASSLQSLPPGIKVDSLTLLKCGENTSPVLDAVLKSKKSSEFLKHAGKETIVEVGSDLPDSGKGFASRENRRNNGLSGKCLQEAQEEGNSILPERRGRPEISLDERGEGGHVHTSDDSEVVFSSCDLNLTMEDSDGVTYALKCDSSGHAPEIVSTVHEDYSGSSESSNDESDSEDTDSDDSSIPRNRLQSVVVVPKNSTLPMEETSPCSSRSSQSYRHYSDHWEDERLESRRHLYEEKFESIASKACPQTDKFFLHKGTEKNPEISFTQSSRKQIDNRLPELSHPQSDGVDSTSHTDVKSDPLGHPNSEETVKAKIPSRQQEELPIYSSDFEDVPNKSWQQTTFQNRPDSRLGKTELSFSSSCEIPHVDGLHSSEELRNLGWDFSQEKPSTTYQQPDSSYGACGGHKYQQNAEQYGGTRDYWQGNGYWDPRSGRPPGTGVVYDRTQGQVPDSLTDDREEEENWDQQDGSHFSDQSDKFLLSLQKDKGSVQAPEISSNSIKDTLAVNEKKDFSKNLEKNDIKDRGPLKKRRQEIESDSESDGELQDRKKVRVEVEQGETSVPPGSALVGPSCVMDDFRDPQRWKECAKQGKMPCYFDLIEENVYLTERKKNKSHRDIKRMQCECTPLSKDERAQGEIACGEDCLNRLLMIECSSRCPNGDYCSNRRFQRKQHADVEVILTEKKGWGLRAAKDLPSNTFVLEYCGEVLDHKEFKARVKEYARNKNIHYYFMALKNDEIIDATQKGNCSRFMNHSCEPNCETQKWTVNGQLRVGFFTTKLVPSGSELTFDYQFQRYGKEAQKCFCGSANCRGYLGGENRVSIRAAGGKMKKERSRKKDSVDGELEALMENGEGLSDKNQVLSLSRLMVRIETLEQKLTCLELIQNTHSQSCLKSFLERHGLSLLWIWMAELGDGRESNQKLQEEIIKTLEHLPIPTKNMLEESKVLPIIQRWSQTKTAVPPLSEGDGYSSENTSRAHTPLNTPDPSTKLSTEADTDTPKKLMFRRLKIISENSMDSAISDATSELEGKDGKEDLDQLENVPVEEEEELQSQQLLPQQLPECKVDSETNIEASKLPTSEPEADAEIEPKESNGTKLEEPINEETPSQDEEEGVSDVESERSQEQPDKTVDISDLATKLLDSWKDLKEVYRIPKKSQTEKENTTTERGRDAVGFRDQTPAPKTPNRSRERDPDKQTQNKEKRKRRSSLSPPSSAYERGTKRPDDRYDTPTSKKKVRIKDRNKLSTEERRKLFEQEVAQREAQKQQQQMQNLGMTSPLPYDSLGYNAPHHPFAGYPPGYPMQAYVDPSNPNAGKVLLPTPSMDPVCSPAPYDHAQPLVGHSTEPLSAPPPVPVVPHVAAPVEVSSSQYVAQSDGVVHQDSSVAVLPVPAPGPVQGQNYSVWDSNQQSVSVQQQYSPAQSQATIYYQGQTCPTVYGVTSPYSQTTPPIVQSYAQPSLQYIQGQQIFTAHPQGVVVQPAAAVTTIVAPGQPQPLQPSEMVVTNNLLDLPPPSPPKPKTIVLPPNWKTARDPEGKIYYYHVITRQTQWDPPTWESPGDDASLEHEAEMDLGTPTYDENPMKASKKPKTAEADTSSELAKKSKEVFRKEMSQFIVQCLNPYRKPDCKVGRITTTEDFKHLARKLTHGVMNKELKYCKNPEDLECNENVKHKTKEYIKKYMQKFGAVYKPKEDTELE

SEQ ID NO: 178163 - protein, 2564 aa, Artificial Sequence
  derived and/or modified sequence
MKQLQPQPPPKMGDFYDPEHPTPEEQEPEAKIENVQKTGFIKGPMFKGVASSRFLPKGTKTKVNLEEQGRQKVSFSFSLTKKTLQNRFLTALGNEKQSDTPNPPAVPLQVDSTPKMKMEIGDTLSTAEESSPPKSRVELGKIHFKKHLLHVTSRPLLATTTAVASPPTHAAPLPAVIAESTTVDSPPSSPPPPPPPAQATTLSSPAPVTEPVALPHTPITVLMAAPVPLPVDVAVRSLKEPPIIIVPESLEADTKQDTISNSLEEHVTQILNEQADISSKKEDSHIGKDEEIPDSSKISLSCKKTGSKKKSSQSEGIFLGSESDEDSVRTSSSQRSHDLKFSASIEKERDFKKSSAPLKSEDLGKPSRSKTDRDDKYFSYSKLERDTRYVSSRCRSERERRRSRSHSRSERGSRTNLSYSRSERSHYYDSDRRYHRSSPYRERTRYSRPYTDNRARESSDSEEEYKKTYSRRTSSHSSSYRDLRTSSYSKSDRDCKTETSYLEMERRGKYSSKLERESKRTSENEAIKRCCSPPNELGFRRGSSYSKHDSSASRYKSTLSKPIPKSDKFKNSFCCTELNEEIKQSHSFSLQTPCSKGSELRMINKNPEREKAGSPAPSNRLNDSPTLKKLDELPIFKSEFITHDSHDSIKELDSLSKVKNDQLRSFCPIELNINGSPGAESDLATFCTSKTDAVLMTSDDSVTGSELSPLVKACMLSSNGFQNISRCKEKDLDDTCMLHKKSESPFRETEPLVSPHQDKLMSMPVMTVDYSKTVVKEPVDTRVSCCKTKDSDIYCTLNDSNPSLCNSEAENIEPSVMKISSNSFMNVHLESKPVICDSRNLTDHSKFACEEYKQSIGSTSSASVNHFDDLYQPIGSSGIASSLQSLPPGIKVDSLTLLKCGENTSPVLDAVLKSKKSSEFLKHAGKETIVEVGSDLPDSGKGFASRENRRNNGLSGKCLQEAQEEGNSILPERRGRPEISLDERGEGGHVHTSDDSEVVFSSCDLNLTMEDSDGVTYALKCDSSGHAPEIVSTVHEDYSGSSESSNDESDSEDTDSDDSSIPRNRLQSVVVVPKNSTLPMEETSPCSSRSSQSYRHYSDHWEDERLESRRHLYEEKFESIASKACPQTDKFFLHKGTEKNPEISFTQSSRKQIDNRLPELSHPQSDGVDSTSHTDVKSDPLGHPNSEETVKAKIPSRQQEELPIYSSDFEDVPNKSWQQTTFQNRPDSRLGKTELSFSSSCEIPHVDGLHSSEELRNLGWDFSQEKPSTTYQQPDSSYGACGGHKYQQNAEQYGGTRDYWQGNGYWDPRSGRPPGTGVVYDRTQGQVPDSLTDDREEEENWDQQDGSHFSDQSDKFLLSLQKDKGSVQAPEISSNSIKDTLAVNEKKDFSKNLEKNDIKDRGPLKKRRQEIESDSESDGELQDRKKVRVEVEQGETSVPPGSALVGPSCVMDDFRDPQRWKECAKQGKMPCYFDLIEENVYLTERKKNKSHRDIKRMQCECTPLSKDERAQGEIACGEDCLNRLLMIECSSRCPNGDYCSNRRFQRKQHADVEVILTEKKGWGLRAAKDLPSNTFVLEYCGEVLDHKEFKARVKEYARNKNIHYYFMALKNDEIIDATQKGNCSRFMNHSCEPNCETQKWTVNGQLRVGFFTTKLVPSGSELTFDYQFQRYGKEAQKCFCGSANCRGYLGGENRVSIRAAGGKMKKERSRKKDSVDGELEALMENGEGLSDKNQVLSLSRLMVRIETLEQKLTCLELIQNTHSQSCLKSFLERHGLSLLWIWMAELGDGRESNQKLQEEIIKTLEHLPIPTKNMLEESKVLPIIQRWSQTKTAVPPLSEGDGYSSENTSRAHTPLNTPDPSTKLSTEADTDTPKKLMFRRLKIISENSMDSAISDATSELEGKDGKEDLDQLENVPVEEEEELQSQQLLPQQLPECKVDSETNIEASKLPTSEPEADAEIEPKESNGTKLEEPINEETPSQDEEEGVSDVESERSQEQPDKTVDISDLATKLLDSWKDLKEVYRIPKKSQTEKENTTTERGRDAVGFRDQTPAPKTPNRSRERDPDKQTQNKEKRKRRSSLSPPSSAYERGTKRPDDRYDTPTSKKKVRIKDRNKLSTEERRKLFEQEVAQREAQKQQQQMQNLGMTSPLPYDSLGYNAPHHPFAGYPPGYPMQAYVDPSNPNAGKVLLPTPSMDPVCSPAPYDHAQPLVGHSTEPLSAPPPVPVVPHVAAPVEVSSSQYVAQSDGVVHQDSSVAVLPVPAPGPVQGQNYSVWDSNQQSVSVQQQYSPAQSQATIYYQGQTCPTVYGVTSPYSQTTPPIVQSYAQPSLQYIQGQQIFTAHPQGVVVQPAAAVTTIVAPGQPQPLQPSEMVVTNNLLDLPPPSPPKPKTIVLPPNWKTARDPEGKIYYYHVITRQTQWDPPTWESPGDDASLEHEAEMDLGTPTYDENPMKASKKPKTAEADTSSELAKKSKEVFRKEMSQFIVQCLNPYRKPDCKVGRITTTEDFKHLARKLTHGVMNKELKYCKNPEDLECNENVKHKTKEYIKKYMQKFGAVYKPKEDTELE

SEQ ID NO: 178164 - protein, 1714 aa, Artificial Sequence
  derived and/or modified sequence
MKQLQPQPPPKMGDFYDPEHPTPEKKEREAKIENVQKTGFIKGPMFKGVASSRFLPKGTKTKVNLEEQGRQKVSFSFSLTKKTLQNRFLTALGNEKQSDTPNPPAVPLQVDSTPKMKMEIGDTLSTAEESSPPKSRVELGKIHFKKHLLHVTSRPLLATTTAVASPPTHAAPLPAVIAESTTVDSPPSSPPPPPPPAQATTLSSPAPVTEPVALPHTPITVLMAAPVPLPVDVAVRSLKEPPIIIVPESLEADTKQDTISNSLEEHVTQILNEQADISSKKEDSHIGKDEEIPDSSKISLSCKKTGSKKKSSQSEGIFLGSESDEDSVRTSSSQRSHDLKFSASIEKERDFKKSSAPLKSEDLGKPSRSKTDRDDKYFSYSKLERDTRYVSSRCRSERERRRSRSHSRSERGSRTNLSYSRSERSHYYDSDRRYHRSSPYRERTRYSRPYTDNRARESSDSEEEYKKTYSRRTSSHSSSYRDLRTSSYSKSDRDCKTETSYLEMERRGKYSSKLERESKRTSENEAIKRCCSPPNELGFRRGSSYSKHDSSASRYKSTLSKPIPKSDKFKNSFCCTELNEEIKQSHSFSLQTPCSKGSELRMINKNPEREKAGSPAPSNRLNDSPTLKKLDELPIFKSEFITHDSHDSIKELDSLSKVKNDQLRSFCPIELNINGSPGAESDLATFCTSKTDAVLMTSDDSVTGSELSPLVKACMLSSNGFQNISRCKEKDLDDTCMLHKKSESPFRETEPLVSPHQDKLMSMPVMTVDYSKTVVKEPVDTRVSCCKTKDSDIYCTLNDSNPSLCNSEAENIEPSVMKISSNSFMNVHLESKPVICDSRNLTDHSKFACEEYKQSIGSTSSASVNHFDDLYQPIGSSGIASSLQSLPPGIKVDSLTLLKCGENTSPVLDAVLKSKKSSEFLKHAGKETIVEVGSDLPDSGKGFASRENRRNNGLSGKCLQEAQEEGNSILPERRGRPEISLDERGEGGHVHTSDDSEVVFSSCDLNLTMEDSDGVTYALKCDSSGHAPEIVSTVHEDYSGSSESSNDESDSEDTDSDDSSIPRNRLQSVVVVPKNSTLPMEETSPCSSRSSQSYRHYSDHWEDERLESRRHLYEEKFESIASKACPQTDKFFLHKGTEKNPEISFTQSSRKQIDNRLPELSHPQSDGVDSTSHTDVKSDPLGHPNSEETVKAKIPSRQQEELPIYSSDFEDVPNKSWQQTTFQNRPDSRLGKTELSFSSSCEIPHVDGLHSSEELRNLGWDFSQEKPSTTYQQPDSSYGACGGHKYQQNAEQYGGTRDYWQGNGYWDPRSGRPPGTGVVYDRTQGQVPDSLTDDREEEENWDQQDGSHFSDQSDKFLLSLQKDKGSVQAPEISSNSIKDTLAVNEKKDFSKNLEKNDIKDRGPLKKRRQEIESDSESDGELQDRKKVRVEVEQGETSVPPGSALVGPSCVMDDFRDPQRWKECAKQGKMPCYFDLIEENVYLTERKKNKSHRDIKRMQCECTPLSKDERAQGEIACGEDCLNRLLMIECSSRCPNGDYCSNRRFQRKQHADVEVILTEKKGWGLRAAKDLPSNTFVLEYCGEVLDHKEFKARVKEYARNKNIHYYFMALKNDEIIDATQKGNCSRFMNHSCEPNCETQKWTVNGQLRVGFFTTKLVPSGSELTFDYQFQRYGKEAQKCFCGSANCRGYLGGENRVSIRAAGGKMKKERSRKKDS

SEQ ID NO: 178165 - DNA, 7695 bp, Artificial Sequence
  derived and/or modified sequence
atgaaacagcttcaaccccaacctccccctaaaatgggtgacttctacgaccccgaacaccccacccccgaagaggaggaaaacgaggccaagattgagaatgtgcagaagaccggtttcatcaaagggccaatgttcaagggggtagcatcttccagattccttcccaaggggacaaaaaccaaggtgaatctggaggagcaggggcggcagaaggtctcgttctctttttctctgactaaaaagacactgcaaaaccggtttctaacagctctgggcaatgaaaagcagtcagacaccccaaacccccctgccgtgcctctgcaggtggatagcacaccaaagatgaaaatggaaattggcgacaccttgagcactgcggaagaaagttcacctccgaaaagcagggtcgagttgggcaaaatccacttcaaaaagcatttacttcatgttaccagcaggcctctgttggccaccaccaccgccgtcgcctccccgcctacgcacgctgcccccctgccagctgtgatcgcggagtccactaccgtagactcccctcctagcagtccaccaccacccccgccaccggcccaagccacgacgctttcctcaccagctcccgtcacagagccagtggccttgcctcatacacccatcacagtgctgatggctgcacctgtgcccctcccagttgatgttgccgtgcgctccttaaaggagccaccaataatcattgtacccgaaagcttggaagccgacaccaaacaagacaccatcagtaatagccttgaggagcacgtcacccagatattaaatgaacaggcagacatctcctcgaagaaggaggattcacacattgggaaagatgaggagatccccgatagctccaaaatctctctgtcctgcaagaagaccgggtcaaagaaaaagtctagccagagcgagggaatcttcctcggctccgaatccgatgaagatagtgtgaggacaagtagcagtcagagatcccacgacctgaaattctccgcatctattgaaaaagaaagagacttcaagaaaagcagtgccccgctcaaaagtgaagatctcgggaaaccatcaaggagcaagacagacagagacgacaagtacttcagctatagtaaactggagagggatacaaggtacgttagctcgagatgtcgaagtgagcgtgaaaggcgccgaagtcgatcccactcacgatccgagaggggctcaagaacaaatttaagttactctcgctctgaacgcagtcactactacgactctgatcggcgttatcacaggtcatctccctatcgagaaagaacacgatactcaaggccctatacagataaccgcgcccgcgagagcagcgactccgaggaagagtacaagaagacatattctagacggacttcttctcattcttctagttaccgggacctgcgcacttctagctatagcaagagtgacagggattgtaaaactgaaaccagttacctggagatggagagaagagggaagtactcaagtaaactggagcgggagtctaagaggacgtctgagaacgaagcaatcaaacggtgttgttcaccgcctaacgagctggggtttagaagaggctcaagttactccaagcacgatagttcggcaagcaggtacaagtccacactttctaaacctattccaaaatccgacaaattcaagaactcattctgttgcactgagctgaacgaagagattaaacagagtcactccttctcgctccaaaccccttgttctaagggtagtgagctgagaatgattaataaaaacccagaaagggagaaggcaggctctccggccccttctaatcgcttgaatgacagccctacactcaaaaagcttgacgagctccctatttttaaatctgagttcatcacgcatgactcccacgactctattaaggagctggactctttgagtaaggtgaagaatgaccagttaaggagcttttgcccaatagagcttaacatcaacggcagccccggcgcagagtccgacctggctaccttttgcacttcgaagaccgacgcagtgcttatgacttccgacgacagcgttaccggcagcgagttgagccctttagttaaggcttgcatgctaagcagtaacggatttcaaaacatctcccgatgtaaagaaaaagatctagacgatacctgcatgttacacaagaaatccgagtctcctttcagggaaaccgaacctctggtgtctcctcaccaggataagcttatgagtatgcccgtcatgactgtggactacagcaagaccgtggtcaaggagccggtggatacaagagtgagttgttgtaaaactaaggacagcgacatttactgtaccctcaacgatagtaacccttccctgtgtaattcggaggcagagaacattgaaccaagtgttatgaagatcagcagcaattcctttatgaacgtgcacttagagtccaagcctgtcatctgtgattcacggaacttgaccgaccacagtaaattcgcctgtgaagaatacaagcaaagcatcgggagcacctcaagcgccagtgtgaaccactttgatgatctgtatcaacccattggctcgagcggcattgcctcaagtcttcaatcgctaccccctggcatcaaggtggattccttgacgctgctgaagtgtggtgagaacacttcacccgtgctcgacgcagtcctcaagtccaagaaaagtagcgagtttctcaagcatgcaggaaaggaaaccatagtggaggtgggctctgacctgcctgatagtggaaaaggattcgctagccgagaaaatcgtaggaataacgggctgagcgggaagtgcctgcaggaggcccaggaggagggaaactcaatactgccagagcggagggggcgccctgagataagcctagatgagcgcggcgagggaggtcacgttcacacaagcgacgacagtgaggtcgtcttttcatcctgcgatcttaatttgacaatggaggactcagacggagtcacatacgcccttaagtgtgactcatccggacacgcacctgagatcgtgagcacagttcacgaggactacagcggctcaagcgaatcctccaacgatgaatccgattcagaagatactgatagcgacgattcttctattcccaggaatcgcctccagtctgttgtggtagtcccaaagaacagcacgttgcctatggaggagaccagcccttgctcttcccgcagcagtcagagctacagacactacagcgatcactgggaggatgagcgcctggaatctagaagacatctttacgaggaaaaatttgagagcatcgcctctaaagcctgtccacagactgataaattctttctacacaaggggacagaaaagaacccggaaattagttttacccagtcatctcgtaagcagatcgacaatcgtctcccggagttgtctcaccctcagagcgatggggtagattctacttcacatacggatgtcaagtctgaccccctgggtcaccccaatagcgaggaaactgtgaaagccaaaattccttctaggcagcaggaggaactccccatctattcatctgacttcgaggatgttcctaataagtcgtggcagcagactacattccagaatcgtccagatagtaggctgggcaaaacagaactgagttttagcagcagctgcgagatccctcatgtggatggcctccactcctccgaggaacttaggaatttaggctgggattttagccaggagaagccgtcaacaacctatcaacagccagactcctcctacggtgcatgtggcggtcataagtatcagcagaacgccgagcaatacggcggcacccgggactactggcaggggaatgggtactgggaccctaggtccggacgcccaccaggtaccggggtggtgtacgaccgtacacagggtcaagtgccggatagcttgacggacgatagggaggaagaggagaactgggatcagcaggacggatcccatttttctgatcaaagcgataaattcctgctttcattacagaaagataaaggctccgtacaggctcctgagatcagcagcaacagcatcaaggacactctagccgtgaacgagaaaaaagattttagcaagaatctggagaaaaacgacattaaggaccgtggaccgttaaaaaagagacgacaggaaattgagtcagattcggagagcgatggggaactccaggatcggaaaaaggtgagagtggaggtggaacagggggagacctcagtgccaccaggaagcgcccttgtcggaccttcatgcgtcatggacgacttccgggacccgcaacgttggaaggagtgtgcgaaacaaggaaagatgccttgctacttcgacctgatagaggagaacgtgtacctcacagagagaaagaagaataagagccaccgagacatcaagcgcatgcaatgcgagtgcacgcctcttagcaaggatgagagggcccagggcgagatcgcctgcggggaagattgcctgaatcggttgctgatgatcgaatgttcgtctaggtgccctaacggcgactactgttcaaaccgtcggttccagagaaagcaacacgctgacgtcgaggtaatcctgaccgagaagaaggggtgggggctgagggcagccaaggacctgccatctaacacttttgtcttggagtattgtggagaagttctggatcacaaggaatttaaggcccgcgtgaaggaatatgcccgaaacaagaacatccattactacttcatggccttaaaaaatgacgaaatcatcgatgccacgcagaaaggtaattgttctcggtttatgaaccactcctgcgaacctaattgtgagacccagaaatggactgtaaatggtcagcttcgggtcggatttttcacgaccaaactggtgccttctgggtcagagctcaccttcgactatcagttccagaggtatgggaaggaggcgcaaaagtgcttctgcgggagcgccaactgtagagggtatctgggcggtgagaatagagtgtccattagggcggccggcgggaaaatgaagaaggaacgctctaggaaaaaagatagcgtggatggagaactcgaagcgctcatggagaatggagagggtctgtctgataaaaatcaggtattgtcgctgtctcgtttaatggtacgaatagagacactggagcaaaaactaacctgtctcgaattgatacagaacacccatagccaatcttgcctgaaaagcttcctcgagcgccatggtctgtcactgttgtggatttggatggccgaactgggcgacgggagggaatctaatcagaaactgcaggaagaaatcatcaaaaccctggagcatctgccaattcccacaaaaaacatgctggaggagagtaaggttttgcccattatccagaggtggtcccagacaaagaccgcagtaccccctctgtctgaaggtgatggatactcctccgaaaacaccagcagggcccacacgcccctgaacacccccgaccctagcacaaagctctctacagaagctgataccgataccccaaaaaagttgatgttccgccgcctcaaaatcatctccgagaatagtatggattccgccatttcagatgcaacctcagagctggaaggcaaggacggcaaagaagatctagatcagttggaaaatgttccagtcgaggaggaagaggagctgcagagccagcagctgctccctcagcagcttcccgaatgcaaggtcgatagcgaaacaaacatcgaggcctcgaagctaccaacttcagagcctgaagccgacgccgaaatcgaaccaaaagagtccaacggtaccaaactggaggaaccaatcaatgaagaaaccccatcacaggatgaggaggagggagtgtctgatgtggaaagcgagcgaagtcaagaacaaccggacaagacggtggacatctcagatttagcaactaagttgttggacagttggaaagacctgaaagaggtgtacagaattccaaagaaatcccaaacggagaaggagaacaccaccacggagcggggacgcgatgctgtgggtttcagggatcagacaccagctcccaagacccctaacaggtcacgagaaagggacccagacaaacagacccagaacaaggagaaaaggaagaggcgcagctcactcagccctccatcttccgcttacgagcgcggaaccaagaggcccgatgaccgctacgacacccctacttctaagaagaaggttaggatcaaggatcgcaacaaactctctacggaagaaagacgtaagttatttgagcaggaggtggcacaacgggaagctcagaagcaacagcagcaaatgcagaacctggggatgacaagccccttaccttacgactcgctgggctataacgcacctcaccacccgttcgcaggatatcctccgggctacccaatgcaagcttatgtggacccttctaatccaaacgcaggaaaggtcctgttacctacgcctagcatggatccagtctgtagtcccgcaccttacgaccacgctcaaccccttgtcgggcacagcaccgagccgctctcagcccctccacccgtacctgtcgtgccacatgtggccgcccctgtcgaagtttcaagctctcagtacgtcgctcagagcgacggagtagtgcatcaggactcctccgtcgcagtcctcccggtgccggcacccggacctgtgcagggccagaattacagcgtgtgggactcaaatcagcagagtgtttctgtgcagcagcagtactccccagcgcagagccaagccacaatctattaccaggggcagacctgccccactgtgtacggtgtgaccagcccgtacagtcagacaacgcctccaatcgtgcagtcttacgcccagccatctctccagtatattcagggccaacaaatttttactgcccacccccagggcgtggtcgtgcagcccgctgccgccgtcacgaccatcgtagcccccggccagcctcaacctctgcagcctagtgagatggttgtcactaataacttactggatttaccacctcccagcccacctaaaccgaagactatagtgttacctccaaactggaagacggcccgcgaccctgagggtaagatctattactatcatgtgatcactcgccaaactcagtgggacccccctacttgggagagcccaggagacgacgcttcacttgagcacgaagccgagatggatttggggacaccaacatacgacgagaatccaatgaaggcgtcgaaaaaacctaagactgctgaagccgatacctcatcagagttggccaagaaatcgaaagaggtgtttcgcaaggagatgtctcagtttattgtgcagtgtctgaatccctacagaaaaccggactgtaaggtcgggagaatcacaactaccgaggacttcaagcacttagctagaaagctgacccacggcgtcatgaacaaggagctcaagtattgcaagaaccctgaggacttggaatgtaatgaaaatgtcaaacataagactaaagaatacataaagaaatatatgcagaagtttggcgcagtgtataagcctaaagaagatacagaactggagtag

SEQ ID NO: 178166 - DNA, 7695 bp, Artificial Sequence
  derived and/or modified sequence
atgaaacagctgcagccgcagccccccccaaaaatgggagatttttatgacccggaacaccccactccagaagaacaggagcccgaagccaagatagagaatgtgcagaaaacaggcttcattaaaggcccaatgttcaagggggtcgccagttcccgattcctgcccaaagggaccaaaaccaaagtcaacttggaagagcagggacgacagaaagtttcattttcattttcgctgactaaaaaaacattgcaaaatcgtttcctgacagcccttggcaacgaaaagcaaagcgatactccaaatcctcccgcagttccgcttcaggtggactctacacctaagatgaaaatggagatcggcgacaccctgtccacagccgaagaatctagtccacccaaatcccgcgtggagttagggaagattcactttaagaaacacttactccacgtgacgtccaggcccctactggcaaccacaactgccgttgctagtccacctactcatgcagctccactgccggctgtgattgcagagtctaccaccgttgacagtccacctagctctccacctcctcctccccctcctgcacaggcaaccacgctcagtagcccagctcccgtgacagagccagtggcattgcctcatacccccatcaccgtgttgatggctgcccccgtgcctcttccagtggatgtggcagtcaggtccctgaaggagccacctatcattatagtgcctgaatccctcgaggcggacactaagcaagacactatatccaatagtctcgaggaacacgtgacacagatcttgaatgagcaggccgacatctctagcaagaaggaagacagtcacataggcaaggacgaagaaattcccgattcatccaaaattagcctgtcctgtaagaaaaccggttcgaagaagaagagctcccagtccgaagggatctttctgggtagcgaaagcgacgaggattctgtccggacttcaagttcccagagaagccatgacctcaagttttcggcctcaatcgagaaggaacgagatttcaaaaaaagctctgcccctctgaaatccgaagacctgggaaagccttctagatccaagacggaccgcgacgataagtacttcagctacagcaaattggaacgggacacacgttatgtgtccagtcggtgccgctccgaacgcgagcggcggcgatccagatctcactccaggagcgagagggggagcaggaccaatctgtcctactcgcggagtgagcggtctcactattatgactccgataggagatatcaccggagttctccctatcgtgagcgaacaagatattctagaccctacactgacaaccgcgctagagagtcctcagattctgaggaagaatacaagaaaacttattctcgacgaaccagctcacactcttcgagctacagagatctgcggacttcttcttattccaaatccgatcgggattgtaagacggagactagctaccttgagatggagaggcggggaaaatatagtagtaaactggaacgggaatctaagagaacgtctgaaaacgaagccatcaagcggtgctgttccccacctaatgaactcgggtttcgtagaggctccagctacagtaagcatgattctagtgcttcaagatataaaagtacattgtccaaaccaattccaaaaagtgacaagttcaaaaactctttctgttgtaccgagctcaatgaagagatcaagcagtcacacagcttcagcctacaaacaccctgtagcaaggggtccgaactgaggatgattaacaaaaaccctgaaagggaaaaggccgggtccccagctccatccaacagactgaacgacagcccaaccctcaagaaactcgatgaacttccaatctttaagtcggagtttatcacgcatgatagccatgatagcattaaggagctggactccctctcaaaagtgaagaacgaccaattgcggtcgttttgcccaatcgagctaaacattaacggctcacccggggccgagtctgacctggcaacgttctgtacaagtaaaacagacgccgttctgatgacatcagatgattccgttaccggctcggagctttctcctctggtcaaggcatgtatgctgagttctaacggattccagaatatatctcgctgtaaagaaaaagacctggacgacacgtgtatgctgcacaagaagagcgagagccccttcagggagaccgaaccccttgtgtcaccccaccaggacaagttgatgagtatgcctgttatgactgtggactactccaagactgtggtcaaggagcccgtggacacgcgggtatcttgctgcaagaccaaggactccgacatctattgcacactcaatgactccaatcccagtctttgtaatagcgaggcggagaacattgagccctccgtgatgaaaattagctccaactctttcatgaacgtgcacctggaaagtaagcccgtaatatgtgattccaggaatttaacggaccatagtaaattcgcatgcgaagaatacaagcaatccatcggcagcactagtagcgcgagcgtaaatcactttgacgacctttaccagccaattggatcatccggcatcgcttccagcctgcagtctttgccccctggaattaaggtggacagtctgaccctcctcaaatgcggcgaaaacacaagcccagtgctcgatgccgtgcttaagtccaagaagtcctctgagttcctaaaacacgctgggaaagaaaccattgtggaggtcggctcagacttgcccgacagcggtaagggttttgccagtagggaaaataggagaaacaacggacttagcgggaaatgcttgcaggaggctcaggaggaaggtaactcaatccttcccgaacgacggggcagacccgaaatctctctggacgagcgtggagagggcgggcatgtgcatacatcagatgattctgaagtcgtgtttagctcttgtgacttgaacctgactatggaggactcagacggagtcacatatgcccttaaatgcgacagctcaggacacgctcccgaaatcgtttctacagtacacgaggattactcaggtagcagtgagtcttctaatgatgagtctgattccgaagacacagacagcgacgactcgagcatccccaggaaccgcctgcagtctgtggtagttgtgccaaaaaatagtaccctacctatggaagaaacatccccatgttccagccgctctagtcagtcttatcgccattacagtgatcattgggaagatgaaaggctggaatctcgacgccatttatacgaagaaaagttcgagagcattgcttctaaagcttgtccccagaccgataaattttttctgcacaagggtacagagaaaaacccagaaatctcatttacacagagctcccgaaaacagatcgacaacaggctgcccgaactctcccatccacagtcagatggcgtggatagtacgagccacactgacgtcaagtcagatcctcttggacatcctaacagtgaagagacagttaaagcgaagattccgtctcggcaacaggaagaactgcccatttatagctcagactttgaggacgtgccgaacaaaagttggcaacagacgacattccagaatcggcccgattcgaggctgggaaagactgagctaagcttttcaagcagttgtgaaattccccacgtcgatggcctccacagcagtgaggaactcaggaatctgggttgggacttcagccaggagaagccaagcactacataccagcagcctgattcctcctacggggcgtgtggaggacataaatatcagcagaacgcagagcagtacgggggcacacgggattactggcaaggaaacggctactgggatcctcggagcggccggcctcccggcaccggggtcgtctatgataggacacagggccaggttcctgattctcttaccgacgaccgagaagaggaagaaaactgggaccagcaggacggatcgcacttctcagatcagtcagataaattcttgctgtctctgcaaaaggacaagggatcggtgcaggcacctgaaatctcctccaactcaatcaaggataccctggcagtgaatgagaagaaagacttctctaaaaacctcgagaagaacgacataaaggacagagggccattgaagaaacgccggcaggaaattgagagtgatagcgagtccgacggtgaactccaggacaggaagaaagtgagggtcgaggtagagcagggagagaccagtgtgccccccgggtccgctctggtcggccccagctgtgtgatggacgatttccgagacccgcagcgttggaaagaatgtgctaagcaggggaagatgccctgttacttcgacttaattgaagaaaacgtctatctgacagaacggaaaaagaataagtcgcatagggacattaaacgaatgcagtgcgaatgcacgcctctgtccaaggatgaacgtgcgcaaggggaaattgcctgtggggaagattgcctgaatcgtctgctgatgatcgaatgctcgtctcggtgccctaatggggattattgcagcaatagaaggttccagcgcaagcaacacgccgatgtggaggtcatcttgacggagaagaagggatggggattgcgcgccgcaaaagacctgccctcaaacacattcgtcttggagtattgtggcgaggtgctggaccataaagagtttaaggcacgagttaaagaatatgcacggaataagaatattcactactactttatggctctgaaaaatgacgaaattatcgacgcaacccaaaaaggcaattgtagtcgcttcatgaatcacagctgtgaaccaaactgcgagacacagaagtggacagtcaacggacagctgcgtgtggggttctttactacaaagctggtcccaagcggatctgaattaacatttgactaccagttccaacgttatggtaaggaagcgcagaagtgtttttgtgggagcgctaattgtcgggggtatcttggtggagaaaaccgtgtgagtatacgtgccgcagggggaaagatgaaaaaagaacgatctcgtaagaaggacagtgtggacggcgagctggaggcccttatggaaaatggcgagggattatcagacaagaatcaggtgctgtcactaagtagactgatggtgagaatagagacacttgagcagaagttgacctgccttgagctcatccagaacacccacagccagtcttgccttaagtcctttttagagagacatggccttagccttctctggatatggatggcagaactgggggatggcagggagtcaaaccagaaattgcaggaggagataattaaaacgcttgagcatttacccattcccacaaagaatatgttggaggaaagcaaggtcctgccaattatccagcgctggtcccagaccaaaacggccgtccctcccctcagtgaaggcgacgggtactcatctgagaatacctctagagcgcatacgcctcttaacactcctgatcctagcactaagctgtctaccgaggccgacactgacacaccaaaaaagctcatgttcaggcgtcttaagatcatctcagagaattccatggacagcgccatttccgacgcgactagtgagctggaaggtaaagatggcaaggaggatctcgatcagttggagaacgtcccagtggaagaagaagaagaattgcaaagccagcagctgctgccccagcaacttccggagtgtaaggtggactcggaaactaatatcgaggcatccaaactccccacaagcgagccagaggctgacgcagaaattgagcccaaggagtctaacggcacaaagctggaggagccgattaacgaagagacgccctcacaggacgaggaggaaggtgtgtctgacgtcgagagcgaaagatcgcaagagcagcctgataaaaccgtggacatttcagacctagccaccaagcttttggattcatggaaagatctgaaggaggtatacaggattcctaaaaagagccagacagaaaaggaaaatactacaaccgaaagagggcgtgatgctgttgggttccgagatcagaccccagcccccaagacccctaatcgctcccgcgaacgtgaccctgacaaacagacccagaataaagaaaaacgaaaacggaggtcttctctcagcccaccgagcagcgcttatgagagaggtacaaagcggccggatgaccggtatgacacacccaccagtaaaaagaaggttcggataaaagatagaaataagcttagcacggaagagaggaggaagctctttgagcaagaagtagctcagagagaagctcaaaaacagcagcaacagatgcagaacttggggatgaccagtccactgccatatgacagcctgggctataatgcaccacatcacccattcgctggttatccaccgggataccctatgcaggcctacgtcgatccctctaatccgaacgctggaaaggtcctgcttcccaccccctctatggacccagtttgttcccctgccccctatgaccacgcccagcccctcgtgggacactcaactgagcccctgtctgcgccaccacccgttccagtggtcccgcacgtggctgcccccgtggaagtaagtagctcacagtatgtggcccagtctgatggcgtggtgcatcaggattcttctgtggccgtattaccggtgccagcgcccgggcccgtgcagggccagaactactctgtttgggactccaatcagcagtccgtttcggtgcagcagcagtactcgcctgctcaatctcaggccaccatttactaccaaggccagacctgtcctacggtgtacggagtcacctctccctactcgcagacaacgccgcccatagttcagtcatacgctcaacctagtttacagtacattcagggtcagcagatttttaccgcgcacccccaaggcgtggtggtccagccggcagctgccgtgactaccattgttgctcccggtcagcctcagccccttcagccttccgaaatggtcgtcacaaacaatttgttagatttgccccccccctccccccctaagccgaagaccatcgtgctgccccccaattggaagaccgctcgggaccctgaagggaagatttattactatcatgtgatcacgagacaaactcagtgggaccctccaacatgggagagcccaggagacgacgcatcactggagcacgaggcagagatggatctcgggacccccacttatgatgagaaccctatgaaggccagcaaaaagcctaagacagccgaggccgacacttcaagcgagcttgctaagaaatctaaggaagtgttcaggaaggaaatgtcccagttcattgtgcagtgcctgaacccctataggaagccagactgcaaggtggggcgcatcacaacgactgaagacttcaagcacctcgctaggaagctgacccacggagtcatgaataaggagctgaagtactgtaagaatcccgaggatttagagtgcaacgagaatgtcaaacacaagacgaaagagtatatcaagaagtatatgcagaagtttggtgccgtatataaacctaaggaagacacggagttggagtag

SEQ ID NO: 178167 - DNA, 5145 bp, Artificial Sequence
  derived and/or modified sequence
atgaagcaactgcagcctcaaccaccacctaagatgggcgatttctacgatcccgagcacccaacgcctgagaagaaagagagggaagccaaaatagagaacgtacagaagacagggttcatcaagggaccaatgttcaaaggggtggcaagctcaagattcctacctaaaggcacgaaaaccaaggtaaatctcgaggagcagggtagacagaaggtgagtttttctttctctctcactaaaaagacactgcaaaacaggtttttgacggcgctgggtaatgaaaaacagagtgatacccctaacccaccagcggtgccactacaggtggattctactcccaagatgaagatggaaatcggagatactttatccacggctgaagagtcttcaccaccgaagtcacgggtagagctcgggaagatccactttaagaaacatctgctgcacgtcacgtctcgaccactgctggctacaacaaccgcggtggcgtctccgcctactcacgctgctcccctccccgccgtgattgcagagtcgacgacagtcgactccccccctagctctccaccgccgccacccccaccggctcaggccacaactctctccagccctgcgcctgtcacagagcccgttgcgttgccacataccccaatcactgttctgatggcggcacctgtccctctgccggtagacgtggcagtccggtctctgaaggagccgcctatcatcatcgtgcctgaaagcctggaagctgacactaagcaggacacaatttccaacagtctggaagaacatgtaacccagattttaaatgagcaggccgacataagcagtaagaaagaggactcccacattgggaaggacgaggagatccctgatagtagtaaaatctccctttcctgtaagaaaacagggagtaaaaaaaagagctctcaaagcgaagggatttttcttggtagcgaatcagatgaggacagcgtaagaacgtcaagctcccaaaggagtcatgatctgaaattcagcgccagcattgagaaggagcgggactttaagaaaagctctgctccgttgaaatcagaggatctgggaaaacccagcaggtcaaaaacagacagggatgataagtattttagctattccaagctggaacgagatactagatacgtgtcctcccgctgccgcagcgagcgggaacgcagaaggtcgcggagtcatagccgctcagagcgcgggtcaaggaccaatctctcttattctaggtccgagcgctcccactattatgatagtgaccgccgctaccaccggtcaagtccgtatcgcgaacggactcgatattcccgtccttataccgataatcgcgccagagaatcatcagattctgaagaagagtacaagaagacatacagccggcggacttcatcacacagttcatcataccgtgaccttaggaccagctcatacagcaagtccgaccgtgactgtaaaaccgagacctcgtatctggagatggagcggcgcgggaagtattcttcaaaactggagcgggaatccaaacgaacctcagaaaatgaggctatcaagcgctgttgttccccccccaacgagctcgggttccggagaggaagcagctactccaagcacgattctagtgcctcccggtacaaatctaccttgtctaagccgattcccaaatcagacaagtttaagaattcattctgctgtaccgaactaaatgaggagatcaaacagagtcattctttcagcctgcagaccccttgttctaaggggagtgagctgaggatgataaataaaaatcctgagagagaaaaggccgggtcaccagcccctagcaaccgtctcaacgactccccgactctgaagaagctggacgagctgcccatcttcaaatccgagttcatcacacatgacagccatgacagtatcaaggaactggatagtttgagcaaagtcaagaacgatcaactgcggagcttttgccctattgaactgaatatcaatggtagccctggcgcagagagcgatctcgcgacattttgcacttctaaaacagatgctgtcctgatgaccagcgatgattcagttacggggagcgagctgagtcccctcgttaaagcctgcatgttgtcttccaacggtttccagaacattagcaggtgcaaggagaaagacctggacgacacatgcatgttgcacaagaagtctgagtccccttttagagaaacagagcccctcgtttcccctcaccaggataagctgatgagcatgccagtgatgacagtggattattccaaaactgtagttaaggagccagtcgacacgcgtgtgtcatgttgcaagactaaagactccgacatatactgtacgctcaatgacagcaacccaagcctctgcaattccgaggccgagaacattgaaccttccgtcatgaaaatcagtagtaatagttttatgaatgttcatcttgaaagcaagcccgtgatttgcgactctagaaacctcaccgaccatagtaaatttgcctgtgaagaatacaaacaaagtatcgggagcacctccagcgcctctgtgaatcatttcgatgatctgtaccagccaatcggcagcagtgggatcgccagcagcctccagtccctcccgccggggatcaaggttgacagccttactctccttaagtgcggagagaatacgtcccccgtcctcgatgctgtcctaaagtccaaaaagagctccgaattcctgaagcacgcagggaaggagactatagtcgaggtcggatcagacctccctgattctggtaaaggtttcgcctcccgcgaaaaccggcggaataacggcttaagtggcaagtgtctccaagaggctcaggaggagggtaactccatcctgcccgagagacgcggcagaccagaaatctcattggacgagcggggggagggtggacatgtgcatacttcagacgactccgaggttgtcttcagttcctgcgacctgaatctgacgatggaagattcggatggggtgacttacgccctgaaatgcgactctagcggccacgcccccgagatcgtgtctaccgtccatgaggactatagcggatcttcggaatcatcaaacgacgagtctgattccgaggataccgatagcgatgattcatcaattccgcgcaaccgcttgcaatctgttgtggtagtgcctaaaaatagcacattacccatggaagagaccagcccctgcagttcaagaagcagccagagctatagacactattcggatcactgggaggacgaacgcctggagagcagaaggcatctgtacgaagaaaaatttgagtctatcgcctctaaggcatgtcctcagactgataagttcttcctacataagggcaccgaaaagaaccccgagatctcattcactcagtccagtaggaagcagatcgacaatagactccctgagctatcacacccacagtctgatggggtagattctacaagtcatacagacgtgaaaagcgatccactgggacatccaaactcggaggaaaccgtgaaagctaaaatccctagcagacagcaggaggaactccctatttacagctctgacttcgaggatgtgcccaacaaaagttggcagcagacaacttttcagaataggcctgactccaggcttggtaagactgagctaagtttctccagtagctgtgagatcccccacgtggatggactgcatagctccgaggagctaaggaacttgggatgggatttttcccaagagaaaccatcgactacttaccagcagcccgactcttcatacggcgcatgcggcggacacaagtaccagcagaacgcagaacagtacggaggcacccgtgattattggcagggaaacggttactgggacccacgttcaggaagacctccagggactggtgttgtgtatgaccgcacccagggccaagtcccagatagtctgactgatgaccgggaggaagaggagaactgggatcaacaggacgggagccacttttcggatcaatctgataaatttctattgtcactgcagaaggataagggaagtgtgcaagctcctgagatatcttccaatagcataaaggataccctggctgtgaatgaaaagaaggatttctccaagaacctggaaaaaaacgatattaaagacaggggcccgctgaaaaaacggcgacaggagatcgagagtgattcagagagcgacggcgagctacaggatcggaagaaagtccgggttgaggtggaacagggcgaaactagcgtcccacccggttccgcactcgtgggcccatcttgcgtaatggatgatttcagagatccccagaggtggaaggaatgtgcaaaacagggcaaaatgccctgttattttgacctaattgaggagaacgtgtatttaactgaaagaaagaagaataagagtcaccgggacatcaagaggatgcagtgtgaatgtacacctctgtcaaaggatgaacgcgcacagggggaaattgcgtgtggagaggattgcctgaataggttactcatgattgaatgcagctctcggtgccctaacggagactactgttctaatagaagatttcagcggaaacagcatgctgacgtggaggttatcttgaccgagaagaagggatggggcctgcgggcagctaaggacttgccgtccaataccttcgtgttggagtattgtggggaggtcctcgatcacaaagaattcaaagcacgagtaaaggaatacgcaagaaacaaaaacatacactactacttcatggcactgaagaatgacgagattattgatgccacacagaagggaaattgttcccgatttatgaaccacagttgcgagcccaattgtgaaacgcagaaatggacagtcaacggtcagctccgggtaggcttttttaccactaaactggtgccgagtggaagcgaactcacgtttgattatcaatttcagcgctacggcaaagaggcacagaagtgtttttgtgggtccgccaattgtaggggttatctcggtggcgagaatcgggtcagtattcgcgcggccgggggcaaaatgaaaaaggaacgaagccgcaaaaaggatagttag

SEQ ID NO: 178168 - DNA, 7695 bp, Artificial Sequence
  derived and/or modified sequence
atgaagcagctgcagccccagcccccacccaagatgggagacttctatgaccctgagcaccccaccccagaggaggaggagaatgaggccaagattgaaaatgtgcagaagacaggcttcatcaagggccccatgtttaaaggagtggccagcagccgcttcctgcccaagggcaccaagaccaaggtgaacctggaggagcagggccggcagaaggtgtccttctccttcagcctgaccaagaagaccctgcagaaccgcttcctgacagccctgggcaatgagaagcagagcgacacccccaaccccccagctgtgcccctgcaggtggacagcacccccaagatgaagatggagatcggggacaccctgagcacagctgaggagagcagcccccccaagagccgggtggagctgggcaagatccacttcaagaagcacctgctgcacgtgaccagccggcccctgctggccaccaccacagctgtggccagcccccccacccacgccgcccccctgcctgctgtgattgctgagagcaccaccgtggacagcccccccagcagccccccacctcctcctcctccagcccaggccaccaccctgagcagccctgcccctgtgacagagcctgtggccctgccccacacccccatcaccgtgctgatggccgcccctgtgcccctgcctgtggatgtggccgtgcgcagcctgaaggagccccccatcatcatcgtgcctgagagcctggaggccgacaccaagcaggacaccatcagcaacagcctggaggagcacgtgacccagatcctgaatgagcaggccgacatcagcagcaagaaggaggacagccacatcggcaaggatgaggagatcccagacagcagcaagatcagcctgagctgcaagaagacaggcagcaagaagaagagcagccagagcgagggcatcttcctgggcagcgagagtgatgaagattctgtgaggaccagcagcagccagaggagccatgacctgaagttcagcgccagcattgagaaggagcgggacttcaagaagagcagcgcccccctgaagtctgaggacctgggcaagcccagccgcagcaagacagacagagatgacaagtacttctcctacagcaagctggagcgggacaccaggtatgtgagcagccgctgccgctctgagcgggagaggagaagaagccgcagccacagccgctctgagcggggcagcaggaccaacctgagctacagccgctctgagaggagccactactatgacagcgaccggcgctaccacaggagcagcccctaccgggagaggacccgctacagccggccctacacagacaacagagcccgggagagcagtgacagcgaggaggagtacaagaagacctacagcaggaggaccagcagccacagcagcagctacagagacctgcggaccagcagctacagcaagagtgaccgggactgcaagacagagaccagctacctggagatggagcggcggggcaagtacagcagcaagctggagcgggagagcaagaggaccagtgaaaatgaggccatcaagcgctgctgcagccccccaaatgagctgggcttccggcggggcagcagctacagcaagcatgacagcagcgccagccgctacaagagcaccctgagcaagcccatccccaagagtgacaagttcaagaacagcttctgctgcacagagctgaatgaggagatcaagcagagccacagcttcagcctgcagaccccctgcagcaagggcagcgagctgaggatgatcaacaagaaccctgagcgggagaaggccggcagccctgcccccagcaaccggctgaatgacagccccaccctgaagaagctggatgagctgcccatcttcaagtctgagttcatcacccatgacagccatgacagcatcaaggagctggacagcctgagcaaggtgaagaatgaccagctgcgctccttctgccccatcgagctgaacatcaatggcagccctggagctgagagtgacctggccaccttctgcaccagcaagacagatgctgtgctgatgaccagtgatgattctgtgactggaagtgagctgagccccctggtgaaggcctgcatgctgagcagcaatggcttccagaacatcagccgctgcaaggagaaggacctggatgacacctgcatgctgcacaagaagtctgagagccccttccgggagacagagcccctggtgagcccccaccaggacaagctgatgtccatgcctgtgatgacagtggactacagcaagacagtggtgaaggagcctgtggacaccagggtgtcctgctgcaagaccaaggacagcgacatctactgcaccctgaatgacagcaaccccagcctgtgcaacagcgaggccgagaacatcgagcccagcgtgatgaagatcagcagcaacagcttcatgaatgtgcacctggagagcaagcctgtgatctgtgacagcaggaacctgacagaccacagcaagtttgcctgtgaggagtacaagcagagcatcggcagcaccagcagcgcctctgtgaaccactttgatgacctgtaccagcccatcggcagcagcggcatcgccagcagcctgcagagcctgcccccaggcatcaaggtggacagcctgaccctgctgaagtgtggggagaacaccagccctgtgctggatgctgtgctgaagagcaagaagagcagcgagttcctgaagcacgccggcaaggagaccatcgtggaggtgggcagtgacctgcctgattctggaaaaggatttgccagcagagaaaatagaagaaacaacggcctgagcggcaagtgcctgcaggaggcccaggaggagggcaacagcatcctgcctgagcggcggggccggcctgagatcagcctggatgagcggggggagggcggccacgtgcacaccagtgatgacagcgaggtggtgttcagcagctgtgacctgaacctgaccatggaggacagtgatggagtgacctacgccctgaagtgtgacagcagcggccacgcccctgagatcgtgtccacagtgcatgaggactacagcggcagcagcgagagcagcaatgatgaaagtgacagcgaggacacagacagtgatgacagcagcatccccaggaaccggctgcagagcgtggtggtggtgcccaagaacagcaccctgcccatggaggagaccagcccctgcagcagccgcagcagccagagctaccgccactacagcgaccactgggaggatgagcggctggagagcagaagacacctgtatgaggagaagtttgagagcatcgccagcaaggcctgcccccagacagacaagttcttcctgcacaagggcacagagaagaaccctgagatctccttcacccagagcagcaggaagcagattgacaaccggctgcctgagctgagccacccccagagtgatggagtggacagcaccagccacacagatgtgaagagtgaccccctgggccaccccaacagcgaggagaccgtgaaggccaagatccccagccggcagcaggaggagctgcccatctacagcagtgactttgaagatgtgcccaacaagtcctggcagcagaccaccttccagaacagaccagacagccggctgggcaagacagagctgtccttcagcagcagctgtgagatcccccacgtggatggcctgcacagcagcgaggagctgaggaacctgggctgggacttcagccaggagaagcccagcaccacctaccagcagcctgacagcagctatggagcctgtggcggccacaagtaccagcagaatgctgagcagtatggaggcacccgggactactggcagggcaatggctactgggaccccaggagcggccggcccccaggcaccggggtggtgtatgacaggacccagggccaggtgcctgacagcctgacagatgaccgggaggaggaggagaactgggaccagcaggacggcagccacttcagtgaccagagcgacaagttcctgctgagcctgcagaaggacaagggctctgtgcaggcccctgagatcagcagcaacagcatcaaggacaccctggccgtgaatgagaagaaggacttcagcaagaacctggagaagaatgacatcaaggaccggggccccctgaagaagaggcggcaggagattgaaagtgacagcgagagtgatggagagctgcaggacaggaagaaggtgcgggtggaggtggagcagggcgagacctctgtgcccccaggcagcgccctggtgggccccagctgtgtgatggatgacttccgggacccccagcgctggaaggaatgtgccaagcagggcaagatgccctgctactttgacctgattgaggagaatgtgtacctgacagagaggaagaagaacaagagccaccgggacatcaagaggatgcagtgtgagtgcacccccctgagcaaggatgagcgggcccagggcgagatcgcctgtggggaggactgcctgaaccggctgctgatgattgagtgcagcagccgctgccccaatggagactactgcagcaacagacgcttccagaggaagcagcacgcagatgtggaggtgatcctgacagagaagaagggctggggcctgcgggccgccaaggacctgcccagcaacacctttgtgctggagtactgtggggaggtgctggaccacaaggagttcaaggcccgggtgaaggagtatgccaggaacaagaacatccactactacttcatggccctgaagaatgatgagatcattgatgccacccagaagggcaactgcagccgcttcatgaaccacagctgtgagcccaactgtgagacccagaagtggacagtgaatggccagctgcgggtgggcttcttcaccaccaagctggtgcccagcggcagcgagctgacctttgactaccagttccagagatatggcaaggaggcccagaagtgcttctgtggcagcgccaactgccggggctacctgggcggggagaacagagtgtccatccgggccgccggcggcaagatgaagaaggagaggagcaggaagaaggacagcgtggatggagagctggaggccctgatggagaatggagagggcctgagtgacaagaaccaggtgctgagcctgagccggctgatggtgagaattgagaccctggagcagaagctgacctgcctggagctgatccagaacacccacagccagagctgcctgaagagcttcctggagcggcacggcctgagcctgctgtggatctggatggccgagctgggagatggccgggagagcaaccagaagctgcaggaggagatcatcaagaccctggagcacctgcccatccccaccaagaacatgctggaggagagcaaggtgctgcccatcatccagcgctggagccagaccaagacagctgtgccccccctgtctgaaggagatggctacagcagcgagaacaccagccgggcccacacccccctgaacaccccagaccccagcaccaagctgagcacagaggccgacacagacacccccaagaagctgatgttccggcggctgaagatcatcagcgagaacagcatggattctgccatcagtgatgccaccagcgagctggagggcaaggatggcaaggaggacctggaccagctggagaatgtgcctgtggaggaggaggaggagctgcagagccagcagctgctgccccagcagctgcctgagtgcaaggtggacagcgagaccaacatcgaggccagcaagctgcccaccagcgagcctgaggctgatgctgagattgagcccaaggagagcaatggcaccaagctggaggagcccatcaatgaggagacccccagccaggatgaggaggagggcgtgtctgatgtggagagcgagaggagccaggagcagcctgacaagacagtggacatcagtgacctggccaccaagctgctggacagctggaaggacctgaaggaggtgtaccgcatccccaagaagagccagacagagaaggagaacaccaccacagagcggggcagagatgctgtgggcttccgggaccagaccccagcccccaagacccccaacagaagccgggagcgggaccctgacaagcagacccagaacaaggagaagaggaagagaagaagcagcctgagcccccccagcagcgcctatgaaagaggcaccaagaggccagatgacagatatgacacccccaccagcaagaagaaggtgcgcatcaaggacaggaacaagctgagcacagaggagaggaggaagctgtttgagcaggaggtggcccagcgggaggcccagaagcagcagcagcagatgcagaacctgggcatgaccagccccctgccctatgacagcctgggctacaatgccccccaccacccctttgctggctacccacctggctaccccatgcaggcctacgtggaccccagcaaccccaatgctgggaaggtgctgctgcccacccccagcatggaccctgtgtgcagccctgccccctatgaccacgcccagcccctggtgggccacagcacagagcccctgagcgcccctcctcctgtgcctgtggtgccccacgtggccgcccctgtggaggtgagcagcagccagtatgtggcccagagtgatggagtggtgcaccaggacagctctgtggccgtgctgcctgtgcctgcccctggccctgtgcagggccagaactacagcgtgtgggacagcaaccagcagagcgtgtctgtgcagcagcagtacagccctgcccagagccaggccaccatctactaccagggccagacctgccccaccgtgtatggagtgaccagcccctacagccagaccaccccacccatcgtgcagagctatgcccagcccagcctgcagtacatccagggccagcagatcttcaccgcccacccccagggcgtggtggtgcagcctgctgctgctgtgaccaccatcgtggcccctggccagccccagcccctgcagcccagcgagatggtggtgaccaacaacctgctggacctgcccccacccagcccccccaagcccaagaccatcgtgctgccccccaactggaagacagcccgggaccctgagggcaagatctactactaccacgtgatcacccggcagacccagtgggacccccccacctgggagagccctggagatgatgccagcctggagcatgaagctgagatggacctgggcacccccacctatgatgagaaccccatgaaggccagcaagaagcccaagacagctgaggccgacaccagcagcgagctggccaagaagagcaaggaggtgttcaggaaggagatgagccagttcatcgtgcagtgcctgaacccctacaggaagccagactgcaaggtgggccgcatcaccaccacagaggacttcaagcacctggccaggaagctgacccacggcgtgatgaacaaggagctgaagtactgcaagaaccctgaggacctggagtgcaatgaaaatgtgaagcacaagaccaaggagtacatcaagaagtacatgcagaagtttggagctgtgtacaagcccaaggaggacacagagctggagtag

SEQ ID NO: 178169 - DNA, 7695 bp, Artificial Sequence
  derived and/or modified sequence
atgaagcagctgcagccccagcccccacccaagatgggagacttctatgaccctgagcaccccaccccagaggagcaggagcctgaggccaagattgaaaatgtgcagaagacaggcttcatcaagggccccatgtttaaaggagtggccagcagccgcttcctgcccaagggcaccaagaccaaggtgaacctggaggagcagggccggcagaaggtgtccttctccttcagcctgaccaagaagaccctgcagaaccgcttcctgacagccctgggcaatgagaagcagagcgacacccccaaccccccagctgtgcccctgcaggtggacagcacccccaagatgaagatggagatcggggacaccctgagcacagctgaggagagcagcccccccaagagccgggtggagctgggcaagatccacttcaagaagcacctgctgcacgtgaccagccggcccctgctggccaccaccacagctgtggccagcccccccacccacgccgcccccctgcctgctgtgattgctgagagcaccaccgtggacagcccccccagcagccccccacctcctcctcctccagcccaggccaccaccctgagcagccctgcccctgtgacagagcctgtggccctgccccacacccccatcaccgtgctgatggccgcccctgtgcccctgcctgtggatgtggccgtgcgcagcctgaaggagccccccatcatcatcgtgcctgagagcctggaggccgacaccaagcaggacaccatcagcaacagcctggaggagcacgtgacccagatcctgaatgagcaggccgacatcagcagcaagaaggaggacagccacatcggcaaggatgaggagatcccagacagcagcaagatcagcctgagctgcaagaagacaggcagcaagaagaagagcagccagagcgagggcatcttcctgggcagcgagagtgatgaagattctgtgaggaccagcagcagccagaggagccatgacctgaagttcagcgccagcattgagaaggagcgggacttcaagaagagcagcgcccccctgaagtctgaggacctgggcaagcccagccgcagcaagacagacagagatgacaagtacttctcctacagcaagctggagcgggacaccaggtatgtgagcagccgctgccgctctgagcgggagaggagaagaagccgcagccacagccgctctgagcggggcagcaggaccaacctgagctacagccgctctgagaggagccactactatgacagcgaccggcgctaccacaggagcagcccctaccgggagaggacccgctacagccggccctacacagacaacagagcccgggagagcagtgacagcgaggaggagtacaagaagacctacagcaggaggaccagcagccacagcagcagctacagagacctgcggaccagcagctacagcaagagtgaccgggactgcaagacagagaccagctacctggagatggagcggcggggcaagtacagcagcaagctggagcgggagagcaagaggaccagtgaaaatgaggccatcaagcgctgctgcagccccccaaatgagctgggcttccggcggggcagcagctacagcaagcatgacagcagcgccagccgctacaagagcaccctgagcaagcccatccccaagagtgacaagttcaagaacagcttctgctgcacagagctgaatgaggagatcaagcagagccacagcttcagcctgcagaccccctgcagcaagggcagcgagctgaggatgatcaacaagaaccctgagcgggagaaggccggcagccctgcccccagcaaccggctgaatgacagccccaccctgaagaagctggatgagctgcccatcttcaagtctgagttcatcacccatgacagccatgacagcatcaaggagctggacagcctgagcaaggtgaagaatgaccagctgcgctccttctgccccatcgagctgaacatcaatggcagccctggagctgagagtgacctggccaccttctgcaccagcaagacagatgctgtgctgatgaccagtgatgattctgtgactggaagtgagctgagccccctggtgaaggcctgcatgctgagcagcaatggcttccagaacatcagccgctgcaaggagaaggacctggatgacacctgcatgctgcacaagaagtctgagagccccttccgggagacagagcccctggtgagcccccaccaggacaagctgatgtccatgcctgtgatgacagtggactacagcaagacagtggtgaaggagcctgtggacaccagggtgtcctgctgcaagaccaaggacagcgacatctactgcaccctgaatgacagcaaccccagcctgtgcaacagcgaggccgagaacatcgagcccagcgtgatgaagatcagcagcaacagcttcatgaatgtgcacctggagagcaagcctgtgatctgtgacagcaggaacctgacagaccacagcaagtttgcctgtgaggagtacaagcagagcatcggcagcaccagcagcgcctctgtgaaccactttgatgacctgtaccagcccatcggcagcagcggcatcgccagcagcctgcagagcctgcccccaggcatcaaggtggacagcctgaccctgctgaagtgtggggagaacaccagccctgtgctggatgctgtgctgaagagcaagaagagcagcgagttcctgaagcacgccggcaaggagaccatcgtggaggtgggcagtgacctgcctgattctggaaaaggatttgccagcagagaaaatagaagaaacaacggcctgagcggcaagtgcctgcaggaggcccaggaggagggcaacagcatcctgcctgagcggcggggccggcctgagatcagcctggatgagcggggggagggcggccacgtgcacaccagtgatgacagcgaggtggtgttcagcagctgtgacctgaacctgaccatggaggacagtgatggagtgacctacgccctgaagtgtgacagcagcggccacgcccctgagatcgtgtccacagtgcatgaggactacagcggcagcagcgagagcagcaatgatgaaagtgacagcgaggacacagacagtgatgacagcagcatccccaggaaccggctgcagagcgtggtggtggtgcccaagaacagcaccctgcccatggaggagaccagcccctgcagcagccgcagcagccagagctaccgccactacagcgaccactgggaggatgagcggctggagagcagaagacacctgtatgaggagaagtttgagagcatcgccagcaaggcctgcccccagacagacaagttcttcctgcacaagggcacagagaagaaccctgagatctccttcacccagagcagcaggaagcagattgacaaccggctgcctgagctgagccacccccagagtgatggagtggacagcaccagccacacagatgtgaagagtgaccccctgggccaccccaacagcgaggagaccgtgaaggccaagatccccagccggcagcaggaggagctgcccatctacagcagtgactttgaagatgtgcccaacaagtcctggcagcagaccaccttccagaacagaccagacagccggctgggcaagacagagctgtccttcagcagcagctgtgagatcccccacgtggatggcctgcacagcagcgaggagctgaggaacctgggctgggacttcagccaggagaagcccagcaccacctaccagcagcctgacagcagctatggagcctgtggcggccacaagtaccagcagaatgctgagcagtatggaggcacccgggactactggcagggcaatggctactgggaccccaggagcggccggcccccaggcaccggggtggtgtatgacaggacccagggccaggtgcctgacagcctgacagatgaccgggaggaggaggagaactgggaccagcaggacggcagccacttcagtgaccagagcgacaagttcctgctgagcctgcagaaggacaagggctctgtgcaggcccctgagatcagcagcaacagcatcaaggacaccctggccgtgaatgagaagaaggacttcagcaagaacctggagaagaatgacatcaaggaccggggccccctgaagaagaggcggcaggagattgaaagtgacagcgagagtgatggagagctgcaggacaggaagaaggtgcgggtggaggtggagcagggcgagacctctgtgcccccaggcagcgccctggtgggccccagctgtgtgatggatgacttccgggacccccagcgctggaaggaatgtgccaagcagggcaagatgccctgctactttgacctgattgaggagaatgtgtacctgacagagaggaagaagaacaagagccaccgggacatcaagaggatgcagtgtgagtgcacccccctgagcaaggatgagcgggcccagggcgagatcgcctgtggggaggactgcctgaaccggctgctgatgattgagtgcagcagccgctgccccaatggagactactgcagcaacagacgcttccagaggaagcagcacgcagatgtggaggtgatcctgacagagaagaagggctggggcctgcgggccgccaaggacctgcccagcaacacctttgtgctggagtactgtggggaggtgctggaccacaaggagttcaaggcccgggtgaaggagtatgccaggaacaagaacatccactactacttcatggccctgaagaatgatgagatcattgatgccacccagaagggcaactgcagccgcttcatgaaccacagctgtgagcccaactgtgagacccagaagtggacagtgaatggccagctgcgggtgggcttcttcaccaccaagctggtgcccagcggcagcgagctgacctttgactaccagttccagagatatggcaaggaggcccagaagtgcttctgtggcagcgccaactgccggggctacctgggcggggagaacagagtgtccatccgggccgccggcggcaagatgaagaaggagaggagcaggaagaaggacagcgtggatggagagctggaggccctgatggagaatggagagggcctgagtgacaagaaccaggtgctgagcctgagccggctgatggtgagaattgagaccctggagcagaagctgacctgcctggagctgatccagaacacccacagccagagctgcctgaagagcttcctggagcggcacggcctgagcctgctgtggatctggatggccgagctgggagatggccgggagagcaaccagaagctgcaggaggagatcatcaagaccctggagcacctgcccatccccaccaagaacatgctggaggagagcaaggtgctgcccatcatccagcgctggagccagaccaagacagctgtgccccccctgtctgaaggagatggctacagcagcgagaacaccagccgggcccacacccccctgaacaccccagaccccagcaccaagctgagcacagaggccgacacagacacccccaagaagctgatgttccggcggctgaagatcatcagcgagaacagcatggattctgccatcagtgatgccaccagcgagctggagggcaaggatggcaaggaggacctggaccagctggagaatgtgcctgtggaggaggaggaggagctgcagagccagcagctgctgccccagcagctgcctgagtgcaaggtggacagcgagaccaacatcgaggccagcaagctgcccaccagcgagcctgaggctgatgctgagattgagcccaaggagagcaatggcaccaagctggaggagcccatcaatgaggagacccccagccaggatgaggaggagggcgtgtctgatgtggagagcgagaggagccaggagcagcctgacaagacagtggacatcagtgacctggccaccaagctgctggacagctggaaggacctgaaggaggtgtaccgcatccccaagaagagccagacagagaaggagaacaccaccacagagcggggcagagatgctgtgggcttccgggaccagaccccagcccccaagacccccaacagaagccgggagcgggaccctgacaagcagacccagaacaaggagaagaggaagagaagaagcagcctgagcccccccagcagcgcctatgaaagaggcaccaagaggccagatgacagatatgacacccccaccagcaagaagaaggtgcgcatcaaggacaggaacaagctgagcacagaggagaggaggaagctgtttgagcaggaggtggcccagcgggaggcccagaagcagcagcagcagatgcagaacctgggcatgaccagccccctgccctatgacagcctgggctacaatgccccccaccacccctttgctggctacccacctggctaccccatgcaggcctacgtggaccccagcaaccccaatgctgggaaggtgctgctgcccacccccagcatggaccctgtgtgcagccctgccccctatgaccacgcccagcccctggtgggccacagcacagagcccctgagcgcccctcctcctgtgcctgtggtgccccacgtggccgcccctgtggaggtgagcagcagccagtatgtggcccagagtgatggagtggtgcaccaggacagctctgtggccgtgctgcctgtgcctgcccctggccctgtgcagggccagaactacagcgtgtgggacagcaaccagcagagcgtgtctgtgcagcagcagtacagccctgcccagagccaggccaccatctactaccagggccagacctgccccaccgtgtatggagtgaccagcccctacagccagaccaccccacccatcgtgcagagctatgcccagcccagcctgcagtacatccagggccagcagatcttcaccgcccacccccagggcgtggtggtgcagcctgctgctgctgtgaccaccatcgtggcccctggccagccccagcccctgcagcccagcgagatggtggtgaccaacaacctgctggacctgcccccacccagcccccccaagcccaagaccatcgtgctgccccccaactggaagacagcccgggaccctgagggcaagatctactactaccacgtgatcacccggcagacccagtgggacccccccacctgggagagccctggagatgatgccagcctggagcatgaagctgagatggacctgggcacccccacctatgatgagaaccccatgaaggccagcaagaagcccaagacagctgaggccgacaccagcagcgagctggccaagaagagcaaggaggtgttcaggaaggagatgagccagttcatcgtgcagtgcctgaacccctacaggaagccagactgcaaggtgggccgcatcaccaccacagaggacttcaagcacctggccaggaagctgacccacggcgtgatgaacaaggagctgaagtactgcaagaaccctgaggacctggagtgcaatgaaaatgtgaagcacaagaccaaggagtacatcaagaagtacatgcagaagtttggagctgtgtacaagcccaaggaggacacagagctggagtag

SEQ ID NO: 178170 - DNA, 5145 bp, Artificial Sequence
  derived and/or modified sequence
atgaagcagctgcagccccagcccccacccaagatgggagacttctatgaccctgagcaccccaccccagagaagaaggagcgggaggccaagattgaaaatgtgcagaagacaggcttcatcaagggccccatgtttaaaggagtggccagcagccgcttcctgcccaagggcaccaagaccaaggtgaacctggaggagcagggccggcagaaggtgtccttctccttcagcctgaccaagaagaccctgcagaaccgcttcctgacagccctgggcaatgagaagcagagcgacacccccaaccccccagctgtgcccctgcaggtggacagcacccccaagatgaagatggagatcggggacaccctgagcacagctgaggagagcagcccccccaagagccgggtggagctgggcaagatccacttcaagaagcacctgctgcacgtgaccagccggcccctgctggccaccaccacagctgtggccagcccccccacccacgccgcccccctgcctgctgtgattgctgagagcaccaccgtggacagcccccccagcagccccccacctcctcctcctccagcccaggccaccaccctgagcagccctgcccctgtgacagagcctgtggccctgccccacacccccatcaccgtgctgatggccgcccctgtgcccctgcctgtggatgtggccgtgcgcagcctgaaggagccccccatcatcatcgtgcctgagagcctggaggccgacaccaagcaggacaccatcagcaacagcctggaggagcacgtgacccagatcctgaatgagcaggccgacatcagcagcaagaaggaggacagccacatcggcaaggatgaggagatcccagacagcagcaagatcagcctgagctgcaagaagacaggcagcaagaagaagagcagccagagcgagggcatcttcctgggcagcgagagtgatgaagattctgtgaggaccagcagcagccagaggagccatgacctgaagttcagcgccagcattgagaaggagcgggacttcaagaagagcagcgcccccctgaagtctgaggacctgggcaagcccagccgcagcaagacagacagagatgacaagtacttctcctacagcaagctggagcgggacaccaggtatgtgagcagccgctgccgctctgagcgggagaggagaagaagccgcagccacagccgctctgagcggggcagcaggaccaacctgagctacagccgctctgagaggagccactactatgacagcgaccggcgctaccacaggagcagcccctaccgggagaggacccgctacagccggccctacacagacaacagagcccgggagagcagtgacagcgaggaggagtacaagaagacctacagcaggaggaccagcagccacagcagcagctacagagacctgcggaccagcagctacagcaagagtgaccgggactgcaagacagagaccagctacctggagatggagcggcggggcaagtacagcagcaagctggagcgggagagcaagaggaccagtgaaaatgaggccatcaagcgctgctgcagccccccaaatgagctgggcttccggcggggcagcagctacagcaagcatgacagcagcgccagccgctacaagagcaccctgagcaagcccatccccaagagtgacaagttcaagaacagcttctgctgcacagagctgaatgaggagatcaagcagagccacagcttcagcctgcagaccccctgcagcaagggcagcgagctgaggatgatcaacaagaaccctgagcgggagaaggccggcagccctgcccccagcaaccggctgaatgacagccccaccctgaagaagctggatgagctgcccatcttcaagtctgagttcatcacccatgacagccatgacagcatcaaggagctggacagcctgagcaaggtgaagaatgaccagctgcgctccttctgccccatcgagctgaacatcaatggcagccctggagctgagagtgacctggccaccttctgcaccagcaagacagatgctgtgctgatgaccagtgatgattctgtgactggaagtgagctgagccccctggtgaaggcctgcatgctgagcagcaatggcttccagaacatcagccgctgcaaggagaaggacctggatgacacctgcatgctgcacaagaagtctgagagccccttccgggagacagagcccctggtgagcccccaccaggacaagctgatgtccatgcctgtgatgacagtggactacagcaagacagtggtgaaggagcctgtggacaccagggtgtcctgctgcaagaccaaggacagcgacatctactgcaccctgaatgacagcaaccccagcctgtgcaacagcgaggccgagaacatcgagcccagcgtgatgaagatcagcagcaacagcttcatgaatgtgcacctggagagcaagcctgtgatctgtgacagcaggaacctgacagaccacagcaagtttgcctgtgaggagtacaagcagagcatcggcagcaccagcagcgcctctgtgaaccactttgatgacctgtaccagcccatcggcagcagcggcatcgccagcagcctgcagagcctgcccccaggcatcaaggtggacagcctgaccctgctgaagtgtggggagaacaccagccctgtgctggatgctgtgctgaagagcaagaagagcagcgagttcctgaagcacgccggcaaggagaccatcgtggaggtgggcagtgacctgcctgattctggaaaaggatttgccagcagagaaaatagaagaaacaacggcctgagcggcaagtgcctgcaggaggcccaggaggagggcaacagcatcctgcctgagcggcggggccggcctgagatcagcctggatgagcggggggagggcggccacgtgcacaccagtgatgacagcgaggtggtgttcagcagctgtgacctgaacctgaccatggaggacagtgatggagtgacctacgccctgaagtgtgacagcagcggccacgcccctgagatcgtgtccacagtgcatgaggactacagcggcagcagcgagagcagcaatgatgaaagtgacagcgaggacacagacagtgatgacagcagcatccccaggaaccggctgcagagcgtggtggtggtgcccaagaacagcaccctgcccatggaggagaccagcccctgcagcagccgcagcagccagagctaccgccactacagcgaccactgggaggatgagcggctggagagcagaagacacctgtatgaggagaagtttgagagcatcgccagcaaggcctgcccccagacagacaagttcttcctgcacaagggcacagagaagaaccctgagatctccttcacccagagcagcaggaagcagattgacaaccggctgcctgagctgagccacccccagagtgatggagtggacagcaccagccacacagatgtgaagagtgaccccctgggccaccccaacagcgaggagaccgtgaaggccaagatccccagccggcagcaggaggagctgcccatctacagcagtgactttgaagatgtgcccaacaagtcctggcagcagaccaccttccagaacagaccagacagccggctgggcaagacagagctgtccttcagcagcagctgtgagatcccccacgtggatggcctgcacagcagcgaggagctgaggaacctgggctgggacttcagccaggagaagcccagcaccacctaccagcagcctgacagcagctatggagcctgtggcggccacaagtaccagcagaatgctgagcagtatggaggcacccgggactactggcagggcaatggctactgggaccccaggagcggccggcccccaggcaccggggtggtgtatgacaggacccagggccaggtgcctgacagcctgacagatgaccgggaggaggaggagaactgggaccagcaggacggcagccacttcagtgaccagagcgacaagttcctgctgagcctgcagaaggacaagggctctgtgcaggcccctgagatcagcagcaacagcatcaaggacaccctggccgtgaatgagaagaaggacttcagcaagaacctggagaagaatgacatcaaggaccggggccccctgaagaagaggcggcaggagattgaaagtgacagcgagagtgatggagagctgcaggacaggaagaaggtgcgggtggaggtggagcagggcgagacctctgtgcccccaggcagcgccctggtgggccccagctgtgtgatggatgacttccgggacccccagcgctggaaggaatgtgccaagcagggcaagatgccctgctactttgacctgattgaggagaatgtgtacctgacagagaggaagaagaacaagagccaccgggacatcaagaggatgcagtgtgagtgcacccccctgagcaaggatgagcgggcccagggcgagatcgcctgtggggaggactgcctgaaccggctgctgatgattgagtgcagcagccgctgccccaatggagactactgcagcaacagacgcttccagaggaagcagcacgcagatgtggaggtgatcctgacagagaagaagggctggggcctgcgggccgccaaggacctgcccagcaacacctttgtgctggagtactgtggggaggtgctggaccacaaggagttcaaggcccgggtgaaggagtatgccaggaacaagaacatccactactacttcatggccctgaagaatgatgagatcattgatgccacccagaagggcaactgcagccgcttcatgaaccacagctgtgagcccaactgtgagacccagaagtggacagtgaatggccagctgcgggtgggcttcttcaccaccaagctggtgcccagcggcagcgagctgacctttgactaccagttccagagatatggcaaggaggcccagaagtgcttctgtggcagcgccaactgccggggctacctgggcggggagaacagagtgtccatccgggccgccggcggcaagatgaagaaggagaggagcaggaagaaggacagctag

SEQ ID NO: 178171 - DNA, 7695 bp, Artificial Sequence
  derived and/or modified sequence
atgaagcagctgcagccccagcccccccccaagatgggcgacttctacgaccctgaacatccgacccctgaggaggaagagaatgaggccaagatcgagaatgtgcaaaagactgggttcataaaaggccccatgtttaagggcgtcgcaagcagtcggtttctgcccaagggaactaagaccaaggttaatctggaggaacagggcagacagaaggtttctttttcattcagcttgaccaagaaaacgctgcagaataggttcttgactgccctgggcaatgagaagcagtccgacacaccaaatccccccgccgtgccactgcaggtcgactcaactcccaaaatgaagatggagatcggcgacactctgagcacagcagaggagagctctcctcccaagtcccgcgtggaactcggaaagatccacttcaagaagcacctcctgcatgtaacctcgcgaccactactagccacaacgaccgctgtcgccagcccccccacacatgctgctcccctccctgctgtgatcgccgagtccaccacagtggattcccccccttcaagccctcctccgcccccacctcccgcccaggccaccacactgtcctctcccgccccagttactgagccagtagctctccctcacacacctatcacggtcttgatggcggctcctgtgcctttgccagtcgatgtcgctgtccgtagcctcaaggaacctcctattattattgtaccagagtcgctggaggcagacacgaaacaagatacaatcagcaattccctggaggagcatgtgacgcagatattgaatgagcaggctgacatctccagtaaaaaagaggactctcatatcggaaaggacgaggaaatccccgattcttcaaaaatcagcctgtcctgtaagaagacagggtcaaagaagaagagctctcaaagcgagggcatttttttggggtcggaatctgatgaggacagcgttcggacctcctcctcgcagaggtcacatgacctgaaatttagcgcctctatagagaaggagagagattttaaaaagtcttctgcaccgttaaagtccgaggacttagggaagcctagtagatccaaaactgatcgcgatgataagtatttcagctacagcaaactggagagggatacacggtatgtttcctccaggtgtcgatctgagcgagaacggcgcagatctcgctcacatagtcgctctgaaagaggtagtcgaacaaacctcagctatagtcgcagtgaaagaagtcattactacgattctgaccgccggtaccatagatcctctccttacagagaaagaaccaggtactcgaggccctatactgacaatagggcgcgtgagtcctcagactccgaggaggagtacaagaaaacttacagcagacgaacgtctagccactcctctagctaccgggatctgaggactagctcttacagcaagagtgatagggattgtaagacagaaacgtcatacctggaaatggagaggagaggaaaatactctagcaaattggagagagaatcaaaacgcacatccgaaaacgaagcaattaagcggtgctgcagccccccaaacgaactgggctttcggcgggggtccagctactccaagcacgattctagtgcctctaggtataaatccacattgtccaagcccattcccaaatcagataaattcaagaattcgttttgctgtacagaactgaacgaggaaatcaagcaaagtcattcatttagtctgcagacaccatgctccaaaggaagcgaactccgaatgataaataagaatcccgaaagggagaaggctggcagcccggccccctcgaatcgtctcaatgacagccccacccttaaaaagctggatgagctgcccatcttcaaaagtgagttcataactcatgactcacatgattcaattaaagagttggacagcttgagcaaggtgaagaatgaccagctgaggagcttttgtcccattgaacttaacataaatgggtcccccggcgccgaaagtgatctcgctaccttctgcacatccaagactgacgccgtgctcatgacatctgacgacagcgtcaccgggtcggaactgtcacctctggtaaaagcttgcatgctgtcctcaaatggatttcagaatatcagtcgctgtaaagagaaagacctagacgatacttgtatgttgcataagaagtccgagtcaccgttccgtgagactgaaccccttgtgtcgccccaccaggacaagttgatgtctatgcccgtgatgactgtagattattcaaagaccgttgtaaaagaacccgtggatacacgcgtgtcatgttgtaagacaaaggactccgacatttactgtaccctgaatgattcgaatccatcattgtgtaacagcgaggcggagaatatagaaccctcagtgatgaaaattagcagcaattcctttatgaacgtgcacttggagagtaaacctgtgatttgcgactctagaaacctgaccgaccattccaagttcgcctgcgaagaatataagcagagtattggctctacctcatccgcttctgtgaaccatttcgacgatctgtatcagccaattggtagctctgggatcgcctcgagcctacagtctttgcctcccgggatcaaggtggactctctgacgctgctgaagtgtggcgagaacacatctcctgttcttgatgctgtactgaagtctaaaaagagtagcgagtttctcaagcatgccgggaaagagaccattgtcgaggtgggttcagatctgcctgattcagggaagggatttgcttcccgggaaaacagacggaacaacgggctgagcggcaaatgtttgcaggaggctcaggaagaaggcaacagcattctacccgagaggcgggggaggcccgaaatcagtcttgacgagcggggcgagggtggacacgtgcatacatcagatgacagcgaggtggtgtttagttcttgcgacctcaacttaaccatggaagatagcgacggcgtgacctatgccttaaagtgtgacagttccggacacgcgcccgaaatcgtgagcacagtgcacgaggactactctggcagcagcgagtctagcaatgatgaaagcgattccgaagacaccgactcagatgatagctccattccccgtaacaggctccaatctgtggtagttgttcctaagaatagcaccttgcccatggaagagactagtccatgtagtagtcgctcaagccaatcctacaggcattacagcgatcactgggaggatgagcgcctagaatcgcgcaggcacctgtacgaagaaaaatttgaatctattgccagtaaagcttgccctcagactgataaattctttcttcacaaaggtactgagaaaaatccagagatctcatttacacagtctagccgaaaacagattgacaaccggctacccgaattgagtcaccctcagtccgatggcgttgactccaccagtcataccgatgtgaaaagtgacccactcggacatcccaactccgaggagacagtgaaggctaaaatccccagcaggcagcaagaagaattaccgatttacagctcggattttgaggacgttcccaataagtcctggcagcaaactaccttccagaatagaccggactcccggctgggtaagaccgagctaagttttagtagctcctgtgagattccccatgtcgatgggctgcatagctccgaggagctgaggaacctgggatgggatttttcacaggagaagccatctaccacctaccaacagccggactcttcctatggcgcgtgtggtggacacaaatatcagcaaaatgcagagcagtatgggggcaccagagactactggcaaggaaatgggtactgggatcctcgttctgggagacccccagggacaggagtggtgtatgacaggactcagggccaagtcccggacagtctgaccgacgatcgggaggaggaagaaaactgggatcagcaggacggaagccatttctccgaccagtcagacaagttcttgctttccctccagaaggataaaggttccgtccaagcacctgagataagcagtaatagtatcaaagacacattggccgtgaatgaaaaaaaggatttctccaaaaatcttgagaagaacgacatcaaggatagaggccctctgaaaaagcgtcggcaagaaatagaaagtgattctgagtccgatggagagctccaggaccggaagaaggtgcgggtggaagtggaacagggggagacttcagtacctcctgggagtgctttggtaggtccaagctgcgtcatggatgactttcgtgatccccaacgctggaaggagtgcgccaagcagggaaagatgccttgttacttcgacttaatagaagaaaatgtctatctgacagagcgaaagaaaaataaatcacacagggatatcaaacgcatgcagtgtgagtgcactcccctatctaaagacgagcgggcccaaggagaaattgcctgtggagaagattgtctcaataggctcttgatgatcgaatgtagcagcagatgcccaaacggagattactgctccaatcgtagatttcaaaggaaacagcatgctgacgttgaagtgattctaactgaaaagaagggatgggggctgagggctgccaaagatttgccttccaatacttttgttctggaatactgcggagaggttctggaccataaggagtttaaagccagagttaaagagtacgctagaaacaagaatattcactattactttatggcgctgaagaatgacgagataattgacgctacacagaagggaaattgttctagattcatgaatcatagctgtgaacccaattgtgaaacccagaagtggaccgtcaacggacaactgcgggtcggcttctttacaactaaactggtgccgtctggttccgagctgacttttgattaccagtttcagcggtatggaaaagaagcgcagaagtgtttttgcggatccgcaaactgccgcggatacctgggcggagagaatcgcgtctctattcgtgcagctggcggtaagatgaaaaaggaacgtagtcgcaaaaaggactcagtagacggcgaactggaggcccttatggagaatggagaagggctatccgacaagaaccaggtactgagtctctctaggctgatggttcgaatcgagactctggagcaaaagctgacctgcctcgaactgattcaaaatacccacagtcagtcatgtttaaaatctttcctggaacggcatggattgtccctgttgtggatctggatggcggagttaggcgacggcagagaatcaaaccagaagttacaagaggagattatcaagactcttgaacacttgcctatccccacaaaaaacatgctggaggagtccaaggtgctgcccattatccagagatggagccagacgaagaccgccgttccaccgctgagcgaaggggatggctactcatcagagaatacctcccgggcccacacacccctcaatacacctgatccctccaccaagctgagcacggaggcggacacagacacacccaaaaaactgatgttccgtcgcttgaagataatatccgagaacagcatggacagtgccatttcagacgccaccagcgaactggagggcaaagatggaaaggaagacctggaccagctggagaatgtgcctgtcgaagaagaggaagagcttcagagccagcagctgctgccacagcagctacctgagtgcaaggtcgatagcgagacaaatatcgaggcttccaagctccccacatcggagcccgaggcggacgccgagatagagcctaaggaatctaatgggacgaagctggaagagcctatcaacgaggagacaccaagccaggacgaggaggaaggcgtttcggacgttgagagcgagagaagtcaggagcaaccagacaagaccgtggacataagcgacctcgctaccaagttactcgactcctggaaagatctcaaggaggtctacagaattccaaaaaagtcgcagacagagaaggaaaacacaaccacagagcgagggagagatgccgtcggcttccgcgatcaaactccagcaccaaagacccctaaccggtcacgggagcgggatcccgataagcagacccaaaacaaggaaaagcgaaagcgtcgctcctcgctcagtccaccaagctccgcatacgagagggggaccaagcgccctgatgaccggtacgatacaccaacttccaagaaaaaggttaggataaaagaccggaataagctgagtacagaagaacggaggaagctgtttgaacaggaagttgctcagagagaagcacagaaacagcagcagcagatgcagaacctaggcatgaccagccctttgccctacgattcacttgggtataacgcccctcatcacccatttgcagggtatcctcccgggtatcctatgcaggcatatgtcgaccctagcaatcctaatgccggtaaggtgcttctgcccaccccatcaatggatccggtatgttcacctgctccctatgaccacgcccagcccctcgttggtcacagtacggaacccctatcagctcccccccctgtacctgtggttccccacgtggccgctcctgttgaagtgtcatcatcgcagtacgtagcccagtctgatggcgtggttcaccaagatagcagtgtggccgtactgccagttcccgcacctggtccagttcaggggcagaattactccgtctgggactcaaatcagcaatctgtatctgtgcaacagcagtacagcccggcccaatcccaagccaccatatactatcaggggcagacctgccccacagtgtatggcgtgactagcccctacagccaaaccaccccaccaattgtgcagagttacgctcaaccaagtctgcagtatattcaggggcaacaaatcttcacggcccacccacagggtgtggttgtacagcccgcggcggctgtcaccacaatcgtggcccccggtcagcctcaacctctgcagccgtccgaaatggtggtcaccaataaccttttggacctgccccccccatcgcctcccaaacccaagaccattgtgttacctcccaactggaaaactgccagagatcctgagggtaagatatattactatcatgtaatcactcggcagacccagtgggatccccccacgtgggaatcccccggcgatgatgcctctttggaacacgaggccgagatggacctcggaacacctacgtacgatgagaacccaatgaaggcctccaagaaaccgaagacggccgaagctgatacgagctcggagttagctaaaaagagtaaagaggttttccggaaagaaatgtcccagtttatcgtacagtgtcttaatccatatagaaagccagactgcaaagtcggaaggattaccaccacagaagactttaaacatctagcgcggaagctgactcacggagtcatgaacaaggaactgaagtattgcaaaaatcccgaggacctcgaatgtaacgagaatgtcaagcacaaaacgaaggaatatatcaagaagtatatgcaaaagtttggggcggtgtataagcctaaagaggataccgaactggagtag

SEQ ID NO: 178172 - DNA, 7695 bp, Artificial Sequence
  derived and/or modified sequence
atgaagcagctgcagccccagcccccccccaagatgggcgacttctacgaccccgagcaccctaccccggaagaacaggaaccagaggctaagatagaaaacgttcaaaagaccgggttcatcaaaggaccaatgtttaagggggtcgcctctagcagattcctgccaaagggcaccaaaaccaaagttaatttagaggagcagggcagacagaaagtctcattctcctttagtttgaccaaaaagaccctccagaatcgcttcctgaccgcgttagggaacgaaaaacagagcgatactccaaaccccccagctgtgccattgcaagttgattctacccccaaaatgaagatggagataggagatacactgagcaccgcagaagagagctccccgccaaagagcagagtcgaacttgggaagatccacttcaagaagcatctcctgcacgtcacgtcaaggccactcctcgcgactactacagccgtggctagtccccctacccatgctgcacctttgcctgctgtgatcgccgaatcaacaactgttgactctcctcccagtagcccacctccccctccgccccccgctcaagcgactactttgagcagcccagcccccgtgactgaaccagtggccctgcctcacactcccattactgtgcttatggccgcacctgtgcccttaccagtggacgtggccgttcggtcactaaaggaacctccgatcatcatcgtccccgagtccttagaggccgatacaaagcaggacacaatctcgaattctcttgaggagcatgtcacccagatcctgaacgaacaggccgatatctcctccaagaaagaagattcccacatcggaaaagacgaagagattcccgacagctctaagatatcgctgagctgcaaaaaaactgggagcaagaaaaagtcttcccagtctgagggcatctttctgggttccgagtccgatgaggattccgtacgtacatcctcatcacagagatctcacgaccttaagtttagtgccagcatagaaaaagagcgagattttaagaagagctccgcccctttaaaaagtgaggatctcggaaaaccaagtcgttctaaaacagatcgagatgacaaatacttttcttactcaaaactggaaagagatacacgctatgtgtcaagtcgttgccggagtgagagggagagaaggagatcccgctctcacagcagaagcgaacgaggatctcggaccaacctgagctacagcaggagtgagagatcacattactacgatagcgacagaagatatcacaggtcatccccttacagagagcgtactcgctattcaaggccttacactgataacagagctagagagtcctctgactccgaagaggaatacaaaaagacttactccagacgtactagtagccatagcagtagttatcgagacctaagaacatcatcttatagcaaatccgatcgggactgcaaaaccgagacaagctacctagaaatggagaggcgtggcaagtattccagcaagctggagcgtgaaagcaagagaaccagtgaaaatgaagccatcaaaagatgctgctctccgcctaacgaactgggcttccgacgtgggtctagctacagcaagcatgactcatcagcttccagatataagagcacactctccaaaccaatccccaagtccgacaaattcaaaaattctttctgttgcactgagctgaacgaggagattaaacagagccatagcttcagtctccagactccttgctcgaaggggtctgagctgcggatgatcaataaaaatcctgagcgtgagaaagctgggtctcctgcccccagcaatcggttgaacgacagccctaccctgaagaagctggatgaactccccatcttcaaatcagaattcataactcatgacagccatgactctataaaggagttagactccctgtctaaagtgaagaacgaccagttgcggtcattctgtcccatcgagctgaatatcaatggaagtcctggcgccgagagcgacctagccacattctgtaccagcaaaactgatgcagtgctgatgaccagcgacgattctgtcacggggtccgaacttagtcccttagtaaaggcatgcatgctttctagcaacggctttcagaatatctctcgttgtaaagaaaaggatttggatgacacttgtatgctacacaaaaaaagtgaaagccccttcagagaaaccgagcctttggtgtctcctcatcaggacaaactgatgagtatgcctgtgatgactgtggactattcaaagactgtcgtgaaggagcctgtcgacacccgtgtgagttgctgcaagacgaaggattccgacatctattgtacgctgaatgacagcaatccctccttgtgcaattccgaagctgaaaacattgagccatccgtgatgaagatctcctccaacagtttcatgaacgtgcacctcgagtccaagccagtgatctgcgatagcaggaatctaacagatcactctaaatttgcttgcgaggagtacaaacaatcaataggcagtacaagctcagcttccgttaatcattttgatgacctgtatcagcccatcggctcaagtggcattgcaagctctctccagtcactgccaccaggaatcaaagtggattccctcactctcctgaaatgtggagaaaacacgagccccgttctggacgctgtcctgaaatccaaaaagtcttcagaatttctcaagcatgcaggcaaagagaccatcgttgaagtgggatctgatctgccagattcaggtaaaggctttgctagccgcgagaataggcgtaacaatggtctgtccgggaagtgcctgcaggaggcgcaagaggagggcaacagcatacttccagaacgcaggggaaggccagagatttccctcgacgagcgaggggagggcggtcatgtacatacctcagacgactcggaggtggtgttttccagctgtgacctgaacctgactatggaagactctgatggagtcacatacgctctgaagtgcgatagctcagggcacgcacccgaaattgtgagtaccgtccatgaggattattctggatcttccgagtcctccaatgacgagagtgattctgaggacaccgacagcgatgactcaagtatcccaaggaaccgtctgcagtcggtggtagtggtcccaaaaaactccacactgcctatggaggaaacctcaccgtgttcttcacgctcatctcaatcatatcgccactattccgaccattgggaagacgagcgcctggagtccaggcggcatctttacgaagaaaagttcgagtcaatagcctcgaaagcctgtccccagacagataaattcttcctgcataagggtacagaaaaaaatcccgagattagctttacgcagtccagtcggaagcagattgacaacaggctgcccgagctgagtcatccgcagtctgacggcgttgacagtacatctcacacagacgttaagtcagaccccctgggccaccctaatagcgaagaaacagtaaaggctaagataccctcgcgacagcaggaggagctgcctatttacagtagcgattttgaggatgtcccaaataaatcttggcagcagacaacatttcagaaccgaccggacagccggttgggaaaaactgaattaagcttcagctcttcctgtgagatcccccacgtcgacggcctgcatagctccgaggagctgaggaacctggggtgggatttttctcaggaaaagccgagcaccacctatcaacagcccgattcttcatatggtgcctgcggaggacataagtaccagcagaacgccgagcagtacggagggactcgcgactattggcagggaaacggttactgggatcctagatcaggccgtcctccgggaaccggagtggtgtacgatcggacgcaaggacaggtacctgattcactcactgatgaccgcgaagaagaagagaattgggaccagcaagatggaagtcacttctcggaccagtccgataaattcttgctgagcctgcaaaaagacaaggggtctgtccaggcccctgaaattagctccaactcaattaaagatactctggcagtgaatgaaaagaaggatttttctaaaaacctggagaagaacgacattaaggacagggggccacttaagaagaggaggcaggagattgaatccgatagcgagagcgatggcgagctacaggatcgtaaaaaggtccgggtcgaagttgagcagggtgagacttccgtgccccctggatcagccctcgtggggccttcctgcgtaatggatgactttcgagacccacagcgctggaaagagtgcgccaagcaggggaaaatgccatgctatttcgaccttatagaagagaatgtttatctgacagagaggaaaaaaaacaagagccatcgggatattaaacggatgcagtgtgagtgcactccacttagcaaagatgagcgcgcccagggagaaatcgcctgcggcgaagactgcctgaaccggctcctgatgatagaatgttcgagcagatgcccgaatggcgactactgctcaaacagaagattccaacggaagcaacacgctgacgtggaagtcattcttacagaaaagaaagggtggggtctccgagcagccaaggatcttccgtccaacaccttcgtgctcgaatattgtggagaggtattagaccacaaggagttcaaggcccgagtaaaagagtacgcacgaaataaaaatattcattattactttatggccctgaagaatgacgaaataatcgatgctactcagaaaggaaactgctcccgtttcatgaatcatagttgtgaacccaactgcgagactcagaaatggactgtgaacgggcaactgagagttggtttttttaccaccaaactggtgccttccgggtcagagttgacctttgactaccagttccaacgctatggcaaggaagctcagaagtgtttttgcggcagtgccaattgccgtggatatctgggcggagaaaaccgggtctcaattcgcgccgcaggggggaagatgaaaaaggaacggtcacggaagaaagactctgtcgatggagagctcgaagcgctgatggagaatggagaaggcttgtccgacaagaatcaagttctttccctgagtagactgatggtgagaatagagacccttgagcaaaagctcacctgtttagaactgattcaaaatactcattctcagagctgccttaaaagttttctggaaagacacggactgtccctgctctggatctggatggctgaactgggcgacgggagggagagcaatcagaaattgcaggaggaaatcataaagactctagaacacctgcccattcccactaagaacatgttagaagagtcaaaggttcttcctatcattcaacggtggagccagaccaagactgctgttcctccactcagcgagggtgatgggtacagttccgagaacacttcccgtgcacacactccattgaacacccctgacccgtctacgaaactctctacggaagccgacaccgacacccctaagaaactgatgttcaggcggttaaagattatctctgagaactcaatggattccgcaatatctgatgctacgtcagaactagaaggaaaggacgggaaagaggatctagatcagctcgaaaacgtaccagtcgaagaggaagaagagttgcagagccaacagctactgccccaacagctgcctgaatgtaaggttgacagcgaaacaaacatagaggcctcaaagttacctacttctgaaccggaggctgacgctgagatagaaccgaaggagtcaaatggcacaaaattggaggagcccattaacgaagaaacaccctcccaggacgaggaggaaggtgtgagcgacgttgagtctgaacgaagccaggagcagcccgataaaaccgtcgatatttccgacctggctactaagctactggattcatggaaggacctgaaagaagtgtaccggattccaaaaaagtcccaaaccgagaaggagaatacaaccaccgaaagaggcagagacgcagtggggtttcgggatcaaaccccagcaccaaaaacaccaaatcgctcacgagaacgtgacccagacaagcagacccagaataaagagaagcgcaagagaaggagctcactgtcccccccctccagtgcctacgaacggggaacaaaaaggcccgacgacagatacgatactcccacctctaagaaaaaggtacgcatcaaagacagaaacaaactttctaccgaagagaggaggaagttgttcgagcaggaagtcgcccagagggaggctcagaagcagcagcagcagatgcagaatttgggcatgacaagccctctaccatacgattctcttggctacaacgcccctcaccatccgttcgcaggataccccccaggttaccctatgcaggcctatgtcgacccttcaaacccaaatgccggaaaggtgctgttaccaactccatccatggacccagtctgttccccagcgccctatgatcacgcccagccattagtggggcactccactgaacccctctccgctccaccgcctgttccggtggtgccacacgttgctgctccggtcgaagtgagttcgagtcagtatgtggcccaatccgacggcgtggtgcatcaagactcttctgtggcagtcctgcccgtccccgccccgggacctgtgcaaggacagaattacagcgtgtgggacagtaatcagcagtccgtaagcgtccaacagcagtactctccagcgcagtctcaagccaccatctattatcaagggcaaacatgcccaacagtatacggcgtcactagcccatatagtcaaaccacgccccccatcgtgcagagctatgcgcagccatccctgcagtatatccaagggcagcaaatctttactgcacaccctcagggcgtggtggtgcagccagccgcggctgtgacaacgattgtggcgccaggccagccacagccactccagccaagtgagatggtagtgaccaataacttgctggacttgcctcctccatctccaccaaagcccaaaacaatagtgctgcctcctaactggaaaaccgcaagagatcctgagggcaaaatctactattatcacgtcatcactcgtcagacacagtgggatccacccacctgggagtccccaggcgacgatgccagtcttgagcacgaagcggaaatggatttgggaaccccaacctacgatgagaacccaatgaaggccagtaaaaagcctaaaactgcggaggctgatacttctagcgagctggccaaaaaatctaaggaggtgtttcggaaggagatgtcccagttcatagttcagtgtctaaacccttaccggaagcccgactgtaaagtgggcagaatcacaactacagaggacttcaagcacttggctcgaaagctcacgcatggggtcatgaacaaggaattaaaatattgtaaaaacccagaggacctggaatgtaacgaaaacgtgaaacataagactaaagaatacattaagaagtatatgcaaaaattcggcgccgtttacaaacctaaagaggatacggaactggaatag

SEQ ID NO: 178173 - DNA, 5145 bp, Artificial Sequence
  derived and/or modified sequence
atgaagcagctgcagccccagcccccccccaagatgggcgacttctacgaccccgaacatccaacacccgagaaaaaggaacgggaggccaaaattgaaaatgttcagaagaccggcttcatcaagggtccaatgttcaagggagtggcatcaagccgcttcctgccgaagggtaccaagactaaggttaatctcgaggaacagggccgccaaaaggtttccttcagtttctcactgacgaaaaaaacccttcagaatagattcctgactgccctcggcaacgagaagcagagcgatacccccaatcctcccgctgttcccttacaagtggatagtacaccgaagatgaagatggagatcggggacacactgagcacagctgaggaatctagtcctcctaaaagcagggtggagcttgggaaaatacacttcaaaaaacacctgctgcacgtgacatcgcgtcctctgctggctaccactacagccgtggccagtccacccactcacgcagccccgttgccagccgtgattgctgaaagcacgacagtggatagtcccccctcaagccccccgcctcctccaccacccgcgcaggcaaccactctgtcctcccctgctcctgtaacagagcctgtggctctgcctcacactccgattactgtgttgatggcggcgcctgtgccacttcccgtggatgtcgccgttcggagtcttaaagaaccccccatcattattgtcccagagtcactcgaagctgacacaaaacaagacaccatctctaattcccttgaggagcacgtgactcagatcctaaatgagcaggctgatatatcatccaaaaaggaagattcgcacataggaaaagacgaagagattcccgactccagcaaaatcagtctgtcttgcaaaaaaacgggttcgaaaaaaaagtccagtcaatctgaggggatcttcctcggctccgagagcgacgaagacagtgtccgtacgagtagctcccagcgatcgcatgatttaaagttctcagcctctattgaaaaagagcgcgacttcaagaagagctccgcccccctaaaatcagaggatttgggaaagcctagcagatcaaaaacagaccgcgacgacaagtatttttcctacagcaagcttgagagagacacgagatatgtatccagtaggtgccgatccgagagggagcgccgacggagcagatcccatagccgaagtgaacgaggctcaaggacaaatcttagctacagtcggtcagagaggagccactactacgactccgatagaagataccatagatctagtccttaccgtgaacgtacacgatactctagaccctacactgacaacagggccagggagagctctgacagcgaagaggaatacaagaagacgtattctaggaggacctcctcccattcctcttcttacagagacctgaggacatcctcctactcaaagtctgacagagactgcaagactgagacatcctatctcgaaatggaaaggagaggcaagtacagtagcaagctggagagggagagcaagcgtacatctgaaaacgaagctattaagcgctgttgcagtcctccaaacgagctggggttcagaagaggaagctcttattccaaacatgatagctccgcgtctagatataagtctaccctgagtaaaccgattcccaagagcgataaatttaagaatagtttctgctgcacagagctgaatgaggaaatcaagcagagccacagcttctcactccaaacgccttgttcaaagggaagtgaactgcggatgatcaataaaaaccccgaaagagagaaggctggctcacctgcacccagtaacaggctcaacgattcccccacacttaagaagcttgatgagttacccatctttaaaagcgagtttataactcatgattctcatgacagcatcaaagagcttgactccttgtctaaggtcaaaaatgatcaactgcggtcattctgtcccatcgagctgaatatcaatgggtctccaggagccgagagcgacctggcgaccttttgtacctccaagaccgacgccgtcttaatgacttcagatgattcagtcacaggatccgagctttcaccactcgtcaaggcctgcatgttaagctctaacggcttccaaaatataagcagatgtaaggagaaggatttagatgacacctgcatgctgcacaaaaaaagcgagagccctttccgcgagacggagccactcgtgtcgcctcaccaggacaaactgatgagtatgcctgtgatgaccgtggactatagcaagaccgtggttaaggaaccagtggacacccgtgtaagctgttgcaagactaaagacagtgacatctactgcacactgaacgattcaaatccaagcttatgtaacagcgaagccgagaatattgaaccaagcgtcatgaagatctcatctaattcttttatgaacgtccacctggaaagcaagcctgtgatctgtgatagccggaatctaaccgatcacagcaagtttgcatgtgaggagtataagcaatccattggctccacctcttcagcgagcgtcaaccattttgatgacctgtatcaacccattggcagtagcggtattgccagtagtctgcaaagccttccgcctggtattaaagttgacagtctgacactcttgaagtgtggtgaaaacacttcgcccgtgctagacgctgtcctgaagagcaagaaaagctcagaatttctaaaacatgccggcaaggaaacaatcgttgaagtgggctctgatctccccgattctggaaaaggattcgcgtctagagagaataggagaaacaatggactgtcagggaaatgtctgcaggaggcccaagaggaaggaaacagtatcctgcctgagcgtagaggtaggccagaaattagtttagacgagagaggtgaaggtggacatgtccacacctcagatgacagcgaggtcgttttctcaagttgcgacctgaacttaactatggaggatagcgacggcgttacctatgcattgaagtgtgactcgagcggacatgcaccggaaatagtgagtacagtgcacgaggactatagcggatccagcgagtcgtcgaacgatgaatctgacagtgaagataccgatagcgacgattctagtatcccacgcaacaggctccagtccgtggtggtggtgcccaagaactccaccctcccaatggaggagacctccccgtgctccagcaggagttcccagtcatatagacattactccgatcactgggaggatgaaagacttgaatcacgccgtcatctgtatgaagaaaaattcgaatctattgctagtaaggcctgccctcagaccgacaaattctttctgcacaagggaactgagaaaaacccagagatttcatttacacagagctctaggaaacagatcgataatcggctgcccgagctatctcacccccaatctgacggcgtggacagcacatcgcacaccgacgttaaaagcgaccccctggggcaccccaacagcgaggaaaccgtaaaagccaaaattccttcccgccagcaggaagaattgccaatttactccagcgattttgaagatgttccaaacaagtcctggcagcagaccacatttcagaataggccagactctcgactggggaaaaccgaactaagctttagtagctcctgtgagatcccccatgttgacggactccactcgtcagaggaactccgtaatcttggatgggatttttcacaggaaaagccaagcacaacatatcagcagccagatagtagctacggtgcctgcggtgggcataagtatcagcagaacgctgagcagtacggtggtacccgcgactactggcagggcaatggttactgggaccctcggtccggacgaccacccggcacaggagtggtttacgaccggacacaagggcaggtgcctgattctttgacagatgacagggaagaggaggaaaattgggatcaacaggatggaagccacttttcagaccaaagtgataagtttctgctgagcctgcaaaaggacaagggtagcgtgcaagcgcccgagatctcatcaaacagcatcaaagatactctcgctgttaatgagaaaaaggacttcagcaaaaatttagagaagaatgacatcaaggatcgtggccccctgaaaaaacggcgccaagaaatagaatctgacagtgaatcggacggggagttgcaggatcggaaaaaggttcgcgtggaggttgaacaaggcgagaccagtgtcccccccgggagtgcattagtgggaccttcctgcgtgatggatgactttagagatccacagagatggaaggagtgcgccaaacaggggaaaatgccatgttacttcgacctgattgaagaaaacgtgtacctaaccgagagaaaaaagaacaaaagccatcgagacattaagagaatgcagtgcgagtgcacccctctttcgaaagatgaacgggcacagggtgaaattgcctgcggcgaagattgtctgaataggctgctgatgatcgaatgctcatctcgctgtccaaacggggactactgctcgaatcgccgattccaaagaaagcagcatgctgatgtcgaagtcattctaactgagaaaaaaggatgggggctaagggccgccaaggatttacctagtaatacattcgtgctcgagtactgcggggaggtcctcgatcacaaggagttcaaggcccgggtgaaggagtatgcaagaaataagaacatccactactactttatggctctcaaaaacgacgagatcattgatgctacccagaagggtaattgttctagatttatgaatcatagctgtgagccaaactgcgagacccagaaatggacggttaatggtcagctaagggttggcttcttcacgactaagctcgtgccctccggaagtgaactgacctttgactaccagttccagcgatacggtaaggaagcacagaagtgcttttgtggaagcgctaattgtcggggatacctaggcggcgagaatcgggtctccattcgggcagccggggggaagatgaagaaagaacggtcaaggaagaaggactcttag

SEQ ID NO: 178174 - DNA, 7694 bp, Artificial Sequence
  derived and/or modified sequence
atgaagcagctgcaaccccagccaccccctaaaatgggagacttttatgacccagaacacccgacacccgaagaggaagaaaacgaggcaaagattgagaacgttcagaagacaggcttcattaaaggtccaatgtttaaaggggtggcatctagcaggtttctgccaaaaggcaccaagacaaaggttaatctcgaggagcaggggagacagaaggtcagtttcagtttcagcctcactaagaaaacattgcagaatcggttcctgacggcactgggaaatgagaaacagagtgatactcctaacccccctgctgtgcctttacaggtggacagcactccaaagatgaaaatggaaattggagataccctctctaccgcagaggaatcatctccccctaagtcccgggtggaactcggcaagatacatttcaagaagcatcttctgcatgttacatccagacccctgctggctacaaccaccgcagtagccagcccccctacccacgcagcccctttgccggctgttattgccgaatccaccacagtcgattctccaccctccagtcccccaccaccccctcccccagctcaggcaactacgctgtctagtccagctcccgtgaccgaaccagtcgctctgcctcacactcccatcactgtgttaatggccgctcccgtgcccctccccgtggacgttgctgtcagatcccttaaggaaccacctatcattattgtgcccgagagcctggaggctgataccaagcaagataccattagtaactctctggaggagcatgttactcagatcctcaacgagcaggctgacataagcagtaaaaaggaagacagccatataggtaaagacgaggagatcccagactcatcgaagatttcactgagttgcaaaaagacaggaagtaagaaaaagagtagtcagtccgagggaatctttctgggcagcgaaagcgacgaggactccgtacgaacatcgagctcacaaagatctcacgacttaaaattctcagcatccattgagaaggagcgcgacttcaagaagtcctccgctccccttaagagcgaggacttgggtaaaccctcccgctccaagaccgacagagacgacaagtatttcagctattccaagttagagcgggatacccggtatgtgtcaagtcgatgtcggtccgagcgagaacggcgacgttcaagatctcactctcgctctgaacgcggttctcgtaccaacttatcctactctcgctcagagcggagtcactactatgacagcgaccggcgataccaccgttcgtctccctacagggagagaacacggtattctcgcccatacacggacaatagggcacgggagagctctgatagtgaagaggagtataagaaaacctatagtcggcgaaccagctcgcactcctcctcatatcgagacttaagaacatcatcgtactcgaagagtgacagggactgcaagaccgagacatcttacctggaaatggagcggagagggaagtacagctcaaagttggagagggagtccaagcgtactagcgaaaatgaagctatcaaacgttgctgttcaccgcctaacgagttgggctttcggagaggcagctcttacagcaaacatgactctagcgcttctagatacaaaagtaccctgtcaaagcccatccctaagtctgataagttcaagaacagtttttgttgcactgaattgaatgaggaaattaaacagagtcactcgttcagtctgcaaacaccctgtagtaagggtagtgagctcaggatgataaacaaaaaccctgaaagggaaaaagctggcagcccggcaccgagcaaccgcctgaatgactcccccaccttgaaaaagctagatgagttgcctatttttaaaagcgagtttatcacccacgacagccatgactctataaaggaactagatagtctcagtaaggtaaagaacgatcaattgcgtagcttctgcccgattgagctaaacattaatggctcacctggtgcagaatctgaccttgcaactttttgcacatcgaaaacagacgcagttcttatgacgtcagacgactctgtcacaggatctgagctgagccctctggtgaaggcatgcatgctgtcttccaacggttttcaaaacatctccaggtgtaaggagaaggacctcgatgacacctgcatgctccataaaaaatcagagtctccttttcgggaaactgagcccctggtttcaccacaccaggacaagttaatgtccatgcccgtaatgacagtcgattattctaagaccgttgtcaaagagcccgttgatacacgagtgtcatgctgcaagaccaaagatagcgatatctactgtacacttaacgattcaaacccatctctgtgcaacagcgaggcggagaatatcgaaccatctgtgatgaagatctcttctaatagtttcatgaatgtgcacctggagagtaaacccgtcatctgcgacagtcgaaacctgactgaccactctaagttcgcatgtgaggagtataagcaaagcattggatctacatccagcgcctccgtgaatcactttgacgacctttatcagcctatcggcagctctgggattgcttctagtctgcagtctctgcctcccggaatcaaagtggattctctgactctgcttaagtgcggcgaaaatacttctcccgtcctggacgccgtactcaagagcaaaaaatcctcggagttcctgaagcacgcgggaaaggagaccatcgtggaggtcgggtccgatcttcccgatagcgggaagggttttgcaagcagagaaaatcgccgaaacaatggactgagcggcaaatgcctccaggaggcacaggaggagggtaactccattctgcccgagcgaagaggtcgccctgaaatctctctagatgagcgaggtgagggcggacatgttcacaccagcgacgactctgaggtggtgttctcctcctgcgacctaaacctgactatggaggacagtgacggagtgacctacgctctaaaatgtgattccagtggacatgcaccggagatcgtgagcactgtgcacgaggattacagcggctcgagcgaatcgtcgaatgacgagagcgactccgaggacactgattccgatgatagtagtatccctaggaatagactacaaagcgtggtcgtggtacccaagaacagcacattaccgatggaagagacctcgccctgctccagtcgcagttcccagagttataggcactattctgatcactgggaggatgagcggctagagagtaggcgacacctctacgaagagaagttcgagtcgatcgcctccaaagcctgtccccagacggacaaattctttcttcacaagggtactgagaaaaatccagagatctcattcactcagtcaagccggaagcaaatcgataatagactcccggagctgtcccatccacagtccgacggagtggacagtacgtcccatacagatgttaagtcggacccactcggacaccctaacagtgaggaaacggtcaaggctaaaatcccctcccggcaacaagaagaacttcccatctattcctctgactttgaggacgttcctaacaagtcatggcagcaaacaactttccagaaccggccagattctcgactgggtaagaccgagctcagtttcagtagcagctgcgagatcccacatgtggatggcttgcatagttccgaagagctgcggaatttgggatgggatttctctcaggaaaagccttctactacataccaacagccagattccagctacggcgcatgtggtggacacaaatatcagcaaaacgccgaacagtatggcggaacaagggactattggcaagggaacgggtattgggatccgcgatcaggtaggccaccagggactggcgtggtgtacgatcgcactcaaggacaggtaccagactcactgaccgacgatagagaagaggaggaaaattgggaccagcaagatggctcgcatttctccgaccagtcagataaatttctcctgtccttgcagaaggacaaaggctctgtacaggcgccagaaatatcgagtaattccattaaagacacccttgcagtcaatgagaaaaaggacttcagcaaaaatcttgagaaaaacgatatcaaggaccgtggcccactgaaaaagcgacgtcaggaaatcgagtccgacagtgagtccgatggagagcttcaagatcgcaaaaaagtgcgggtagaggtcgaacagggagagaccagcgtgccccctggcagcgctctggtgggcccttcctgcgtaatggacgatttcagagacccccagcgctggaaagagtgcgccaagcagggtaagatgccttgctatttcgacctcatcgaagaaaacgtttatctgaccgaaaggaagaagaataagagccatagagatatcaaaaggatgcagtgcgagtgcacccccctgtcaaaggatgaaagagcccagggagagatagcgtgtggcgaggactgtctaaatcggcttctcatgatcgagtgtagttcccgctgccctaatggcgactattgctctaaccggaggtttcagcgcaagcagcatgctgatgtagaagtcatactcacagaaaagaaaggctgggggcttagagctgcaaaggacctcccctcaaataccttcgtactcgagtattgtggggaagtgctggatcacaaggagttcaaagcaagagtgaaggaatatgctaggaacaagaacattcactattacttcatggcactgaagaatgacgagattatagatgctactcagaaaggaaactgctcaagattcatgaaccactcatgcgagcctaattgcgaaacccagaagtggaccgtgaacggtcagctccgcgtgggcttcttcaccactaagctcgtcccgtccggctcggagctgacattcgactaccagttccagcgttatggaaaggaggcccagaaatgtttttgtggctctgcgaactgccggggatatttgggcggtgagaaccgcgtgtccatccgggcagctggtggtaagatgaagaaagaaaggagtaggaagaaggatagcgtggacggggaactagaggccttaatggaaaacggagaaggccttagtgacaaaaatcaagtattaagtctctccaggctcatggttagaattgagacgctggagcagaagcttacatgcctggagctcatacagaacacacatagccaatcatgcctgaaatcctttctggagagacatggcctgagtctactatggatctggatggccgagctaggagacggcagagaaagcaaccagaagctccaggaggagatcataaaaactctggaacacttacccatccccaccaaaaacatgctcgaggagtcaaaggttctcccgatcattcagcggtggtcacagacaaaaaccgcagtgccccctctgagtgagggcgatggttattcatctgagaatacctctcgggctcataccccactgaatacgccagatccttcaactaagcttagcacagaggccgacacagacacacccaagaaactcatgtttcggaggctaaaaatcatttctgaaaactctatggattcagccattagtgatgccacaagcgagctcgaaggcaaggacggaaaggaagatctggatcagctcgaaaacgtacctgtcgaggaggaagaggaactgcagagtcagcagttgcttccccagcaactccccgaatgtaaggttgacagcgaaaccaacatcgaagcatctaagctgcccacatccgagcccgaagcggatgcagaaatcgaacccaaggaaagtaacggcactaagctggaggagccaataaacgaggaaacacctagccaggatgaggaagagggcgtatccgacgtggagtctgaaaggagccaggaacagcccgacaagacagtggatatcagtgatcttgctacaaagctgctggacagctggaaggatctcaaagaagtgtataggatccctaagaaaagccaaacagaaaaggagaatacgacaacggagagagggcgagatgcggttgggttccgcgaccagaccccggcaccaaaaaccccaaacagatcaagagaacgcgatccagacaagcagacacagaataaggagaagcgaaagaggcgttcttctttatccccgccttcctccgcctacgagagaggcaccaagcggccagacgataggtacgatacccccacttctaagaagaaggtgcggattaaggacaggaataagctctccaccgaggaaaggcgcaaactttttgaacaagaagtagcccagcgtgaggcccagaagcagcagcaacagatgcagaacctgggaatgacaagcccactgccttacgactcgctggggtacaatgcccctcatcatcctttcgccggatatccgccaggatacccaatgcaagcctacgttgaccctagtaaccctaacgccggtaaggtcctgcttcccactcccagcatggatcctgtctgctcccccgctccgtacgatcatgctcagcctttagtaggtcatagcactgagcccctgtctgcgcctccacccgtgcccgtcgtgccacatgtcgcagccccagttgaggtcagctcatctcagtatgtcgcccagagtgatggcgtggtgcaccaggattcatcggtggccgtcctgccagtgcccgctcccggacccgtccagggacaaaactactcagtctgggattccaaccagcagtctgtcagtgtccaacagcaatactctcccgcacagagccaagctacaatttattaccagggccaaacatgcccaacagtgtacggcgtcacttcgccatactctcagacaacacctcccatcgtgcagagttatgctcagccatctctccagtacatacagggtcagcaaatcttcacggcccatcctcaaggagtggtagtgcagccagcggcagcagtgactactatcgtagctccaggtcagccccagcccctccagcccagcgagatggttgtgacaaataaccttcttgacttaccacccccaagcccccctaagcccaagactatagtgttaccccctaattggaagacagcgcgagaccccgagggaaagatttattactatcacgtcatcacccgtcagacacagtgggacccccctacgtgggagtcaccgggagacgatgcctccctggaacacgaagcagagatggatctcggaacccccacctacgatgagaacccaatgaaggccagcaaaaaaccgaagacagcagaggcagacacaagttctgagctggctaagaagagcaaagaagtgtttagaaaggaaatgagtcagttcatcgtccagtgcctcaatccctatcgcaagcctgattgtaaagtaggcaggataactacaacagaagactttaagcatctggccaggaagctcacacatggcgtaatgaacaaagagctgaaatattgtaagaatcccgaagatctggagtgcaacgaaaacgtgaagcacaaaactaaagagtacatcaagaagtacatgcagaagttcggcgcagtttacaaaccaaaagaagacacagagctagaata

SEQ ID NO: 178175 - DNA, 7694 bp, Artificial Sequence
  derived and/or modified sequence
atgaagcagctgcagcctcagccgcctcccaagatgggagatttttatgatcctgagcaccctacaccggaagaacaggaacccgaggcaaaaatcgaaaacgtacagaagaccggcttcatcaaagggcctatgttcaaaggggtggcttcatcccgtttcctccctaaaggcacaaaaaccaaggtgaatcttgaagaacagggtcgccagaaagtctccttcagtttttccctgacaaagaagaccctccagaatagattcttgaccgccctcggaaacgaaaagcagagcgatacccccaatccccctgcagtccctttacaggtcgactctacaccaaaaatgaaaatggagattggggacactctaagcacagcagaagagagttctcctcccaagagccgggttgagctgggcaagatccacttcaaaaaacacttgctgcacgttaccagtcggcctttgctggctactaccacggccgtcgcctccccccctactcacgcagcccctctccctgccgtcatcgccgagagcactacagtcgattcgcccccatccagcccgccaccaccgccaccaccggctcaagccacaacgttaagcagcccagcgccagtgaccgaaccagtggccctcccccacacaccaattaccgttctgatggcagctcccgtgccccttccggtggatgttgcggtgcggtcactgaaagaacctcccatcattatcgtgcctgaatctctcgaagccgatacaaaacaggacacaattagcaattctttggaagaacatgttacacagattctcaatgagcaggccgacatcagctctaagaaggaagacagccacatcgggaaggatgaagagatcccagattcaagcaaaatcagtctttcttgtaagaagactgggagcaaaaagaaatctagccagtcagaaggcatctttcttgggagcgagtccgacgaggactcggtacgcaccagctcaagccaacggagccatgacctgaagttcagcgcctctatcgagaaggagagagatttcaaaaagtcttcagctccgctgaagagcgaggacctggggaagccaagtcgctctaagaccgatcgtgatgacaagtattttagctactctaaactcgaaagagacacccgctatgtctcaagtcgatgcaggtctgaacgcgagcgacgtaggtcccggtctcattcacgctccgaaagggggtcacgaactaacctgtcttacagccgttctgagcggtcccactattacgactctgatcgccgataccatcgttcttcgccttacagagaacgtacaagatactctagaccgtataccgacaaccgagcccgtgagagcagtgactccgaggaagagtacaaaaagacatattccaggaggacaagttctcactctagttcataccgtgacctgcggacctccagctacagcaagtctgaccgggattgcaaaacggagacaagctacttggagatggagagacgcggaaaatacagctcaaagttggaaagggaatcaaagaggacctctgaaaacgaggctataaaacggtgctgcagtcctccgaatgagttaggatttcggagaggcagctcttattccaaacacgacagctctgctagtagatataagagcactctgagcaaacctataccaaaaagtgataagtttaagaatagcttttgctgtaccgaacttaatgaggaaatcaagcagagtcattcgttcagtcttcaaacaccatgcagcaaaggctcggagctgcgcatgattaataagaatccagagagagagaaggccggaagccccgctccgtctaacagactgaacgacagccctaccctgaagaaactagatgaattacctatcttcaagagtgagtttattactcatgattctcatgattcgataaaggagcttgattcgctgtccaaggtgaaaaacgaccagctgcggtccttctgtcccatagagctcaacatcaacggatccccaggcgctgaaagcgaccttgcaactttctgtacatctaagaccgacgccgtgttaatgaccagtgacgactctgttaccgggtcagagttgagcccgctggtgaaggcctgcatgctgtcctccaatggatttcaaaacatttccaggtgcaaggaaaaggatcttgatgacacatgcatgctccacaaaaagagtgagtcaccctttagggagactgagcccctggtgtcgcctcatcaggataagctgatgtccatgcccgtgatgaccgtggattacagtaaaactgtggtgaaggaacctgtagatactcgtgtatcctgttgtaaaaccaaggattccgacatctattgtacactgaacgatagcaacccatcactctgtaattctgaggcagagaacatcgaaccctcggtcatgaagatctcatccaacagctttatgaatgttcaccttgaaagcaagccagtaatttgtgattctcgcaatctaactgatcactctaagttcgcatgcgaagaatataagcagtccatcggctccacaagctctgccagcgtgaatcactttgacgacctgtatcagcctatcggctcgtctggaatagcttcaagcttgcagagtcttcctccgggtattaaggtcgacagtctcaccttactgaaatgcggtgaaaacacttcgcctgtgctggacgccgtcctcaaatctaaaaaatccagtgaattcttaaaacatgctgggaaggaaactatcgtggaggttggctccgacctcccagattcaggcaaaggatttgccagtagagagaatagacgcaataatggactgtctgggaagtgcctgcaagaggctcaggaggaaggcaactccattctgcccgagcgacgtggaaggccagaaattagccttgacgagaggggggagggagggcacgttcatacgtccgacgatagcgaagttgttttcagtagttgtgacctaaacctgaccatggaagattcagacggcgtgacctatgctctgaaatgtgactccagtggccatgcaccggagatcgtctcgactgtgcatgaggactattctgggagctctgaaagtagtaatgatgagtcagattctgaggacaccgattccgacgattcctccattccgcgaaatcggctgcaaagtgtcgtggtggtgcccaagaactctactttaccaatggaggaaacatcaccctgctcctcccggagtagccagtcataccggcactattcagatcattgggaggatgagcgactggagagtcgaagacacctatacgaggaaaagttcgagagcatcgccagcaaagcctgcccccagacggacaaatttttcctccataaagggacagagaagaaccccgagattagctttacgcaaagttctcggaagcagatcgacaataggctgcctgaattgtcacacccccaatctgatggcgtcgactcaacttctcataccgacgtaaagtctgaccccctgggtcatccaaattccgaggagacagtaaaggcgaaaatccccagccgccagcaagaagagttacccatatacagttcagactttgaggatgtccctaacaagtcctggcagcaaaccacgtttcaaaatcgcccagatagccgtctgggaaaaacggaactgtcattctcgtccagttgtgagattccacacgtggatggcttacactcatcagaggaactgcggaatctaggctgggatttctctcaggaaaaaccaagcacaacttaccaacaaccagatagtagctacggcgcttgtggcggacacaagtaccaacaaaatgctgagcagtacggtgggacgcgggactactggcaaggcaatggctattgggacccacggagcggccgaccgccaggcacaggggtcgtgtacgaccgcactcagggccaggtaccagattccctgaccgacgatcgtgaggaggaagagaactgggatcagcaggatgggtcccacttctccgatcagagcgacaagtttctgcttagtctgcagaaagacaagggcagtgtccaggccccagagatcagcagcaattcgattaaagatactctggctgtgaacgagaaaaaagacttttccaagaacctcgagaaaaacgacatcaaagaccgaggcccactcaagaagcgcagacaggagatagagagcgattccgaatctgatggggaactacaggaccgcaaaaaggtacgcgtggaggtggaacagggagagacgagtgttccccctggatccgccctggtgggccctagctgtgtcatggacgatttccgcgacccacagcgttggaaggagtgtgctaagcagggaaagatgccatgttattttgacctgatcgaagagaacgtataccttactgagcgaaaaaagaataaatcccaccgcgatataaaacgcatgcaatgtgagtgcacaccactgtctaaagacgagagagctcagggagagatcgcttgtggagaggattgcttaaaccggttgctgatgattgaatgttcgagccggtgccccaacggcgactactgttctaatcgcagatttcagcgtaagcagcatgccgacgtggaggtgattttgacagaaaagaagggctggggactgcgagccgctaaagacctgccttcgaacacatttgttctcgagtattgcggagaggtccttgaccataaggagttcaaggcccgagtgaaggagtacgcaagaaataagaatattcattactacttcatggctctgaaaaacgatgagatcattgacgctactcagaagggtaattgttcacgcttcatgaatcactcctgcgaacctaactgtgaaactcagaagtggacagtgaacggccaactgcgcgtcgggttttttaccacaaagctagtgccctctggatctgaattgaccttcgattaccagtttcaaagatatggcaaagaagcacagaaatgtttttgtgggagcgccaactgcagggggtatctgggaggagaaaaccgcgtgagcattcgggcagccggaggcaagatgaagaaggaaagaagcaggaagaaagacagcgtagacggtgaactggaagctctaatggaaaacggagagggcctaagcgacaagaaccaggttctgtccctgtcccgcttgatggtgcgcatcgagactctcgagcagaagcttacctgcctcgagctgattcagaacactcacagccagtcttgccttaagtccttcctggagcggcacgggttgtctctgctctggatctggatggctgagcttggggacggtcgggagtctaaccagaaactacaggaagagatcattaagacactagagcacctgcctatcccgacaaagaacatgcttgaagaaagtaaggtgctacctattatccagaggtggtcacaaacgaagaccgcggtcccccctttgtccgaaggagatggctattcttctgagaacaccagtagggcccacactcccctcaacacccctgatccgagcacaaagctctctaccgaagctgacaccgatacaccgaagaagctaatgtttagaagacttaagatcatctccgaaaacagtatggattcagccattagcgatgcgaccagcgaactcgagggtaaagatggcaaggaagacctcgatcaattggaaaacgttccggtggaggaagaagaagagttacagtcccagcaactgttacctcagcaactgccagaatgcaaggttgactctgagacaaatatcgaggcaagcaagctgcctacatctgagcccgaggctgacgccgagatcgagcctaaagagagcaacgggacgaaactggaggaaccgatcaacgaggagacaccttcccaggatgaagaggagggggtaagtgacgtggagtcagagagaagccaggagcagcccgacaagacggtggacatttctgaccttgcaaccaaactgctggattcatggaaagatctgaaggaggtttatcggatccccaaaaagagtcagaccgaaaaggagaacacgacaacagagcgcggtagagacgctgtgggattccgcgaccagacacccgcacctaaaacacctaaccggtccagggagcgcgatcctgacaagcagacacagaataaggagaagagaaaacggaggtccagcctgtcaccacccagcagcgcatacgagcggggtaccaagcggccagacgaccggtacgacacccctacctctaagaagaaagtgcggatcaaggacaggaacaagctctctaccgaagaaaggcggaaactgttcgagcaggaagtggcacaacgcgaagcacagaaacagcagcagcagatgcagaatctcggaatgactagcccacttccttacgactcactcgggtacaacgcccctcaccacccttttgcaggttaccctcctggctaccccatgcaggcctatgtcgacccaagcaacccaaatgctggtaaggtgttgctgcctaccccctccatggacccggtgtgttcgccggctccatacgaccatgctcagccgctagtgggccacagtacggaaccactgtcagctcctccgccagtgcccgttgtgccacacgtggcagccccagtagaggtctcttcttctcagtacgtcgctcagagtgacggggtagtgcaccaagattcttcagtagccgttctacccgtgcccgcacccggtcccgtgcagggacaaaattattcagtctgggacagcaaccaacagtcagtttctgtgcagcaacagtactccccagcccaatcacaggctacgatatactaccagggacaaacatgtcccaccgtgtacggtgtgacatccccttactcacagaccacacctcccatcgtccaatcttacgctcaacctagtctgcagtatatacagggacagcagattttcaccgcacatcctcagggtgtggttgtccaacctgccgctgcggtgactacaatcgtggcaccaggccagccacagccactgcagcccagcgagatggtagttacaaataatcttttggatctgccaccaccttctcccccaaaacctaaaacaatagtactgccacctaactggaaaaccgctcgggatcccgagggaaagatctactattatcatgttataacaaggcagacgcagtgggaccctcccacatgggagtccccaggcgacgacgcttctctggaacacgaggccgagatggatttaggtacgcctacctacgacgagaatcctatgaaagccagcaaaaaaccgaaaaccgccgaagcagatacgtcaagcgagctggccaagaaaagtaaagaggtcttccgaaaagaaatgagtcaattcattgtgcagtgcttgaatccatatcgaaagccagactgtaaagtagggcgaatcacaactacagaggattttaaacatctcgcacgtaaactgacacatggcgtcatgaataaggagctgaagtactgtaagaaccctgaagacctggaatgcaacgagaatgtaaagcataagactaaagagtatattaagaagtatatgcagaaattcggcgcagtgtacaaaccgaaagaagacacggagctagagta

SEQ ID NO: 178176 - DNA, 5144 bp, Artificial Sequence
  derived and/or modified sequence
atgaagcagttgcagcctcagccaccgccaaagatgggcgacttctatgatcctgaacatccgactcccgagaagaaggagcgggaggctaaaatagaaaatgtccaaaaaacgggctttatcaaaggaccaatgttcaaaggggtagcatctagtcgattcttgccaaaaggtaccaagacaaaagtgaacctagaggagcagggacggcaaaaagtatctttctctttttcactcactaaaaaaacattacagaacaggttcctgaccgcgctcgggaatgagaagcagagcgatacccctaacccacccgctgtcccgctgcaggtcgattccaccccaaagatgaagatggagatcggggacaccctgagcactgccgaggagtctagtccacctaaaagccgggtggagctcgggaagatccactttaaaaaacacctgttgcacgtgacttcacgtcctcttcttgcaactacaacagccgtggcgagtcccccaacccacgccgcacccctgccagcagtcatcgcagagagcactacggtggactctccgccatcgtcaccccctcctccccctccacccgctcaagctacgacgctttcctccccggctccagtgactgagccagttgcactgccacacacgccaataacggtgctgatggccgcacctgtcccgcttcctgttgacgtggccgtaaggagcctgaaggagccacctataattatagtgcccgagagcctggaggcagatacaaaacaagacaccatctccaattccctcgaggaacacgtaactcagatcttaaacgaacaggcagacatatcatcgaaaaaggaagacagtcacatcggtaaagacgaggagattccagacagtagtaaaatcagtctctcttgtaagaagactggctccaaaaagaaaagctcacagagcgaggggatcttcctggggagcgagtctgacgaagactcagtaagaactagcagctctcagagatcacacgatctcaaatttagcgcctcaatagagaaagagcgggattttaagaaaagctccgcccctctgaagagcgaggacttgggaaaaccctcccggagcaagactgatcgcgacgataaatatttctcatacagcaaactggagcgcgatactaggtacgtctcgagtcggtgtaggtccgaacgggagcggagacgcagtcggtcacatagccgctcagaacgcggatccaggacaaacttgtcatactcacggtcggagcgcagccattattatgactcagatcgcagatatcaccgcagttcaccttacagggagcgtacccgttactctcggccatataccgataatcgtgcacgagagtcttccgattcagaggaagaatataaaaaaacatacagccgaagaacgtcttcccattcgtcttcctatagggacctccgaacaagcagttattctaagtctgaccgagactgtaagaccgaaacttcctacctcgaaatggaacgccgtggtaagtattccagcaaactggagagagagtcaaagcgtacctcagagaacgaagcaatcaaaagatgttgttctccacctaacgagcttggattccgccgagggagtagttattccaaacacgactcaagtgcctctcgatataaatcaacattaagtaagcctatcccaaaaagtgacaagttcaagaatagcttttgctgcacagaacttaacgaggagattaagcaaagtcattcatttagtttgcagacaccctgttctaaaggttctgagctgcggatgatcaataaaaatcccgaaagagaaaaagccggatctcctgcacccagcaataggcttaatgattcaccgacccttaaaaagctcgatgaactgcctatttttaaatccgagttcattacacatgactcccacgacagcatcaaagagttggactccctgtcaaaggtgaagaatgaccaactgaggagtttctgtcccattgagctgaacattaatgggtcacctggggcagagagtgatcttgcaacgttctgcacatcaaaaaccgacgccgtactgatgaccagtgatgacagcgtaaccggctcagagctgagcccattggttaaggcctgcatgttgtcctcaaatggattccaaaacatcagccgatgtaaagagaaggatctcgacgacacctgcatgctccataaaaaatccgaatcaccctttagagagaccgagcctctcgtttccccacatcaggacaagttaatgtcaatgccagtgatgactgtggactattctaaaacggttgtgaaggaacccgtcgacaccagggtaagctgctgcaaaactaaggattctgatatctactgcaccttgaacgatagtaacccgagcttgtgtaactcagaggcagagaatatcgagccttcggtgatgaaaatcagttccaattccttcatgaatgtacacctcgagtccaagcctgtgatctgcgattctcggaacctgacagatcattctaagtttgcctgtgaggagtacaagcagagtattgggagcaccagctcagcctctgtcaaccacttcgatgatctgtaccaaccgattggatcatctggaattgcctccagtctccagtccttgccccctggcatcaaggtcgactctctgactctactgaaatgcggcgagaacacatcgcccgtgctggacgcggtgctgaaatcaaagaagagctcagaattcctgaaacatgctggtaaagaaaccatcgttgaggtgggctctgatctgcccgacagcggcaaaggatttgccagccgagagaaccgcagaaacaacgggctgtctgggaaatgcctccaagaggctcaggaagaaggaaattccattctgcctgagagacggggacgaccagaaatcagcctcgatgaacgcggtgaaggtggccatgtccacaccagtgatgattccgaagtggtcttctccagctgcgacctgaatctgacaatggaagactcggacggagtcacttacgccctcaagtgtgacagctctggccatgcacctgaaattgtatctactgttcatgaagactattccggcagctccgagagcagtaatgatgagtctgactcggaggatactgactcagatgacagttcaattcccaggaacagactgcagtcagtggtcgtcgtgcccaagaatagcactctccctatggaggagacctcgccgtgcagctcacgtagtagtcagagctatcgacactattctgatcattgggaagacgagcgcctggaaagccgcagacacctgtatgaagaaaaattcgagagcatcgcatcgaaagcttgcccacagacagacaaattttttttgcacaagggcacggaaaagaaccccgagattagcttcacacaaagcagcagaaaacagatcgataacagactgccagaacttagccaccctcaatccgacggcgtagactcaactagccacacagacgttaagagcgatcctctcggtcatcccaattccgaagaaactgtgaaagccaaaatcccctcccggcagcaagaggagctgccaatttacagcagcgattttgaggatgtgcctaataagtcatggcagcagaccacctttcagaatcgaccagattcaaggctcggtaaaacagaactgtccttcagttcgtcttgcgagattccccatgtagacggcttgcactccagtgaagaactgcggaatttgggctgggacttttctcaggagaagccctcaaccacctaccaacaacccgattccagctacggcgcatgtggaggtcacaaatatcagcagaatgccgagcagtacggaggcacacgagactattggcagggaaacgggtattgggacccaaggagcggacggccaccagggaccggggtggtgtatgaccggacccagggtcaggtcccagatagcctcacagatgaccgggaagaagaagagaattgggatcagcaagacggaagccattttagcgaccaatccgacaaatttttgctctcactgcagaaagataaaggatccgtccaggccccagagatctcttcaaactcgatcaaagacactctcgccgttaacgagaagaaggatttttccaaaaatttggagaaaaacgacatcaaagacagaggccctttgaaaaagaggaggcaggaaatcgaatccgacagcgaatccgacggcgaattgcaagaccggaagaaggtcagggtcgaggtggaacaaggggagacttcagttcctcccggatcggcactagtgggccctagctgcgtgatggatgacttcagggacccacagcggtggaaggaatgcgctaagcagggaaagatgccatgctactttgatttaattgaggagaatgtgtatctcacagaaagaaagaaaaataaatcccacagggacataaaacgcatgcagtgtgagtgtactccgctgtcaaaggatgagcgggctcaaggagaaatcgcttgtggcgaagattgcctcaatcgcctcttgatgatcgagtgctcctcgaggtgccccaacggggactattgcagcaaccgccgatttcaacggaaacagcatgctgacgtcgaagtaatattgactgagaagaagggatgggggttgagggcagcaaaagatctgccatccaatacctttgtgttggaatactgcggggaagtattggatcacaaggaattcaaagccagagttaaggagtatgccagaaacaaaaacattcactactatttcatggccctcaagaacgacgagataatcgatgctacccagaaggggaattgtagcaggtttatgaatcactcttgcgaaccaaactgcgagacccagaagtggacagttaatgggcagttacgcgtcgggttcttcacaaccaagctagtaccctccgggtccgaattaacgttcgactatcaatttcagcggtacggtaaggaggctcagaaatgcttctgcggcagtgctaactgcagggggtatctggggggagaaaacagagtgtcaatccgggctgccggaggtaagatgaaaaaggaacggtcacgaaaaaaggactctta

SEQ ID NO: 178177 - DNA, 8142 bp, Artificial Sequence
  derived and/or modified sequence
gctgcggggagggggctcgcgtcgccgtctccagccgctcccgatgaagcagctgcagccgcagccgcctccgaagatgggggatttctacgacccggagcacccgacccctgaagaagaagaaaatgaggcaaagattgaaaatgtgcagaaaacaggtttcatcaaaggaccaatgttcaaaggtgttgcttctagtcgatttttgcccaaaggcaccaaaacaaaagttaatttggaagaacagggacgacagaaggtgtcattcagcttcagccttacaaagaaaactttgcagaataggtttctcactgcacttggcaatgaaaagcaaagtgatactccaaaccctccagctgtacctcttcaggtagactcgactcctaaaatgaaaatggaaattggtgataccttatctactgcagaagaatcttccccaccaaagtcaagggtggaattgggcaaaattcattttaagaaacatctgcttcatgtaacatccaggccactgctggctactaccacagcagtagcatctccacctactcatgcagcaccattaccagcagtgatagcagaatcaacaactgtagactcaccgccctcatctccgcctccaccgcctccacctgcccaagccacaacactctcatcaccagcaccagtaacagagccagtggccttgccacatacaccaataacagttctaatggcagcaccagtacccttaccagtagatgtagcagttagatctctgaaagaaccaccaattataattgtaccagaatctttagaagcagatactaagcaggacactatatctaatagtttagaagaacacgtaactcaaatattgaatgagcaagcagatatttcctcaaaaaaagaagattcccatattgggaaggatgaagaaattccagatagttctaagattagtctgagctgtaaaaaaacaggttctaagaagaaatcctcacaatctgaaggcatctttcttggttcagaatctgatgaagattctgtacggacttcttcaagtcaaagatcacatgatttaaaattttcagcaagcattgaaaaggaaagagattttaaaaagagctcagcacctttaaaaagtgaggatctagggaaaccttcacgatctaaaacagacagagatgataaatattttagctattcaaaacttgaaagagatactcggtatgtatcttcccgatgtagatcagaaagagagcgacggcggagcagatctcactctaggtctgagagaggctctagaactaatttatcctattccaggtcagaacgatctcattattatgactctgatcgtcgctaccataggagctccccttatcgagagaggacgcgctattctcggccatacacagataacagagcacgagagagttctgactcagaagaagagtataagaagacatactcaaggcgtacctcatctcattcctcttcttacagagacctaaggacatcatcctattctaaatctgatcgggactgtaaaactgagacctcttacttagagatggaaagaagaggcaagtattcttcaaaactagaaagagaatctaaaaggacttcagaaaatgaagcaattaaaagatgttgttctccccctaatgaactgggattccgacgagggtcatcatattctaagcatgacagtagtgcttcccgttataaatctaccctttcaaaacctatacccaagtctgataaatttaaaaattctttctgttgtacagaattaaatgaagaaatcaaacagtctcattcttttagtttacagacaccttgttcaaaaggtagtgaattaagaatgattaataaaaatcctgaaagagaaaaggctgggtctccagctccatcaaatcgattaaatgattcacctactttaaaaaagctagatgaattgcctatttttaagtccgaatttataacacatgatagccatgatagtattaaggaattagactctttatctaaagtgaagaatgatcaattaagaagtttttgtcccatagaattaaatataaatggatctcctggggcagaatctgatttggcaacattttgcacttctaaaactgatgctgttttaatgacttctgatgatagtgtgactggatcggaattatcccctttggtcaaagcatgcatgctttcatcaaatggatttcagaatattagtaggtgcaaagaaaaagacttggatgatacctgcatgctgcataagaagtcagaaagcccatttagagaaacagaacctctggtgtcaccacaccaagataaactcatgtctatgccagttatgactgtggattattccaaaacagtagttaaagaaccagttgatacgagggtttcttgctgcaaaaccaaagattcagacatatactgtactttgaacgatagcaacccttctttgtgtaactctgaagctgaaaatattgagccttcagttatgaagatttcttcaaatagctttatgaatgtgcatttggaatcaaaaccagttatatgtgatagtagaaatttgacagatcactcaaaatttgcatgtgaagaatataagcagagcatcggtagcactagttcagcttctgttaatcattttgatgatttatatcaacctattgggagttcaggtattgcttcatctcttcagagtcttccaccaggaataaaggtggacagtctaactctcttgaaatgcggagagaacacatctccagttctggatgcagtgctaaagagtaaaaaaagttcagagtttttaaagcatgcagggaaagaaacaatagtagaagtaggtagtgaccttcctgattcaggaaagggatttgcttccagggagaacaggcgtaataatgggttatctgggaaatgtttgcaagaggctcaagaagaagggaattccatattgcctgaaagaagaggaagaccagaaatctctttagatgaaagaggagaaggaggacatgtgcatacttctgatgactcagaagttgtattttcttcttgtgatttgaatttaaccatggaagacagtgatggtgtaacttatgcattaaagtgtgacagtagtggtcatgccccagaaattgtgtctacagttcatgaagattattctggctcttctgaaagttcaaatgatgaaagtgattcagaagatacagattcggatgatagcagtattccaagaaaccgtctccagtctgttgtggttgtgccaaagaattctactttgcccatggaagaaacaagtccttgttcttctcggagcagtcaaagttatagacactattctgaccattgggaagatgagagattggagtcaaggagacatttgtatgaggaaaaatttgaaagtatagcaagtaaagcctgtcctcaaactgataagtttttccttcataaaggaacagagaagaatccggaaatttcttttacacagtccagtagaaaacaaatagataatcgcctgcctgaactttctcatcctcagagtgatggggttgatagtacaagtcatacagatgtgaaatctgaccctctgggtcacccaaattcagaggaaaccgtgaaagccaaaataccttctaggcagcaagaagagctgccaatttattcttctgattttgaagatgtcccaaataagtcttggcaacagaccactttccaaaacaggccagatagtagactgggaaaaacagaattgagtttttcttcctcttgtgagataccacatgtggatggcttgcactcatcagaagagctcagaaacttaggttgggacttctctcaagaaaagccttctaccacgtatcagcaacctgacagtagctatggagcttgtggtggacacaagtatcagcaaaatgcagaacagtatggtgggacacgtgattactggcaaggcaatggttactgggatccaagatcaggtagacctcctggaactggggttgtgtatgatcgaactcaaggacaagtaccagattccctaacagatgatcgtgaagaagaggagaattgggatcaacaggatggatcccatttttcagaccagtccgataaatttcttctatcccttcagaaagacaaggggtcagtgcaagcacctgaaataagcagcaattccattaaggacactttagctgtgaatgaaaagaaagatttttcaaaaaacttagaaaaaaatgatatcaaagatagagggcctcttaaaaaaaggaggcaggaaatagagagtgattctgaaagtgatggtgagcttcaggacagaaagaaagttagagtggaggtagagcagggagagacatcagtgcccccaggttcagcactggttgggccctcctgtgtcatggatgacttcagggacccacagcgatggaaggaatgtgccaagcaagggaaaatgccatgttactttgatcttattgaagaaaatgtttatttaacagaaagaaagaagaataaatctcatcgagatattaagcgaatgcagtgtgagtgtacacctctttctaaagatgaaagagctcaaggtgaaatagcatgtggggaagattgtcttaatcgtcttctcatgattgaatgttcttctcggtgtccaaatggggattattgttccaatagacggtttcagagaaaacagcatgcagatgtggaagtcatactcacagaaaagaaaggctggggcttgagagctgccaaagaccttccttcgaacacctttgtcctagaatattgtggagaggtactcgatcataaagagtttaaagctcgagtgaaggagtatgcacgaaacaaaaacatccattactatttcatggccctgaagaatgatgagataatagatgccactcaaaaaggaaattgctctcgtttcatgaatcacagctgtgaaccaaattgtgaaacccaaaaatggactgtgaacggacaactgagggttgggttttttaccaccaaactggttccttcaggctcagagttaacgtttgactatcagttccagagatatggaaaagaagcccagaaatgtttctgcggatcagccaattgccggggttacctgggaggagaaaacagagtcagcatcagagcagcaggagggaaaatgaagaaggaacgatctcgtaagaaggattcagtggatggagagctagaagctctgatggaaaatggtgagggtctctctgataaaaaccaggtgctcagcttatcccggctaatggttagaattgaaactttggagcagaaacttacctgtctggaactcatacagaacacacactcacagtcctgcctgaagtcctttctggaacgtcatgggctgtctttgttgtggatctggatggcagagctaggtgacggccgggaaagtaaccagaagcttcaggaagagattataaagactttggaacacttgcccattcctactaaaaatatgttggaggaaagcaaagtacttccaattattcaacgctggtctcagactaagactgctgtccctccgttgagtgaaggagatgggtattctagtgagaatacatcgcgtgctcatacaccactcaacacacctgatccttccaccaagctgagcacagaagctgacacagacactcccaagaaactaatgtttcgcagactgaaaattataagtgaaaatagcatggacagtgcaatctctgatgcaaccagtgagctagaaggcaaggatggcaaagaggatcttgatcaattagaaaatgtccctgtagaggaagaggaagaattgcagtcacaacagctactcccacaacagctgcctgaatgcaaagttgatagtgaaaccaacatagaagctagtaagctacctacatctgaaccagaagctgacgctgaaatagagcccaaagagagcaacggcacaaaactagaagaacctattaatgaagaaacaccatcccaagatgaagaggagggtgtgtctgatgtggagagtgaaaggagccaagaacagccagataaaacagtggatataagtgatttggccaccaaactcctggacagttggaaagacctaaaggaggtatatcgaattccaaagaaaagtcaaactgaaaaggaaaacacaacaactgaacgaggaagggatgctgttggcttcagagatcaaacacctgccccgaagactcctaataggtcaagagagagagacccagacaagcaaactcaaaataaagagaaaaggaaacgaagaagctccctctcaccaccctcttctgcctatgagcggggaacaaaaaggccagatgacagatatgatacaccaacttctaaaaagaaagtacgaattaaagaccgcaataaactttctacagaggaacgccggaagttgtttgagcaagaggtggctcaacgggaggctcagaaacaacagcaacagatgcagaacctgggaatgacatcaccactgccctatgactctcttggttataatgccccgcatcatccctttgctggttacccaccaggttatcccatgcaggcctatgtggatcccagcaaccctaatgctggaaaggtgctcctgcccacacccagcatggacccagtgtgttctcctgctccttatgatcatgctcagcccttggtgggacattctacagaacccctttctgcccctccaccagtaccagtggtgccacatgtggcagctcctgtggaagtttccagttcccagtatgtggcccagagtgatggtgtagtacaccaagactccagcgttgctgtcttgccagtgccggcccccggcccagttcagggacagaattatagtgtttgggattcaaaccaacagtctgtcagtgtacagcagcagtactctcctgcacagtctcaagcaaccatatattatcaaggacagacatgtccaacagtctatggtgtgacatcaccttattcacagacaactccaccaattgtacagagttatgcccagccaagtcttcagtatatccaggggcaacagattttcacagctcatccacaaggagtggtggtacagccagccgcagcagtgactacaatagttgcaccagggcagcctcagcccttgcagccatctgaaatggttgtgacaaataatctcttggatctgccgcccccctctcctcccaaaccaaaaaccattgtcttacctcccaactggaagacagctcgagatccagaagggaagatttattactaccatgtgatcacaaggcagactcagtgggatcctcctacttgggaaagcccaggagatgatgccagccttgagcatgaagctgagatggacctgggaactccaacatatgatgaaaaccccatgaaggcctcgaaaaagcccaagacagcagaagcagacacctccagtgaactagcaaagaaaagcaaagaagtattcagaaaagagatgtcccagttcatcgtccagtgcctgaacccttaccggaaacctgactgcaaagtgggaagaattaccacaactgaagactttaaacatctggctcgcaagctgactcacggtgttatgaataaggagctgaagtactgtaagaatcctgaggacctggagtgcaatgagaatgtgaaacacaaaaccaaggagtacattaagaagtacatgcagaagtttggggctgtttacaaacccaaagaggacactgaattagagtgactgttgggccagggtgggaggatgggtggtcaggtaagacagactctagggagaggaaatcctgtgggcctttctgtcccacccctgtcagcactgtgctactgatgatacatcaccctggggaattcaaccctgcagatgtcaactgaaggccacaaaaatgaactccatctacaagtgattacctagttgtgagctgttggcatgtggttagaagccatcagaggtgcaagggcttagaaaagaccctggccagacctgactccactcttaaacctgggtcttctccttggcggtgctgtcagcgcacagacccatgcgcatccccacccacaaccctttaccctgatgatctgtattatattttaatgtatatgtgaatatattgaaaataatttgttttt

SEQ ID NO: 178178 - DNA, 8431 bp, Artificial Sequence
  derived and/or modified sequence
gcgtcgccctgctgcggggagggggctcgcgtcgccgtctccagccgctcccgatgaagcagctgcagccgcagccgcctccgaagatgggggatttctacgacccggagcacccgacccctgaggaacaagagcctgaggcaaagattgaaaatgtgcagaaaacaggtttcatcaaaggaccaatgttcaaaggtgttgcttctagtcgatttttgcccaaaggcaccaaaacaaaagttaatttggaagaacagggacgacagaaggtgtcattcagcttcagccttacaaagaaaactttgcagaataggtttctcactgcacttggcaatgaaaagcaaagtgatactccaaaccctccagctgtacctcttcaggtagactcgactcctaaaatgaaaatggaaattggtgataccttatctactgcagaagaatcttccccaccaaagtcaagggtggaattgggcaaaattcattttaagaaacatctgcttcatgtaacatccaggccactgctggctactaccacagcagtagcatctccacctactcatgcagcaccattaccagcagtgatagcagaatcaacaactgtagactcaccgccctcatctccgcctccaccgcctccacctgcccaagccacaacactctcatcaccagcaccagtaacagagccagtggccttgccacatacaccaataacagttctaatggcagcaccagtacccttaccagtagatgtagcagttagatctctgaaagaaccaccaattataattgtaccagaatctttagaagcagatactaagcaggacactatatctaatagtttagaagaacacgtaactcaaatattgaatgagcaagcagatatttcctcaaaaaaagaagattcccatattgggaaggatgaagaaattccagatagttctaagattagtctgagctgtaaaaaaacaggttctaagaagaaatcctcacaatctgaaggcatctttcttggttcagaatctgatgaagattctgtacggacttcttcaagtcaaagatcacatgatttaaaattttcagcaagcattgaaaaggaaagagattttaaaaagagctcagcacctttaaaaagtgaggatctagggaaaccttcacgatctaaaacagacagagatgataaatattttagctattcaaaacttgaaagagatactcggtatgtatcttcccgatgtagatcagaaagagagcgacggcggagcagatctcactctaggtctgagagaggctctagaactaatttatcctattccaggtcagaacgatctcattattatgactctgatcgtcgctaccataggagctccccttatcgagagaggacgcgctattctcggccatacacagataacagagcacgagagagttctgactcagaagaagagtataagaagacatactcaaggcgtacctcatctcattcctcttcttacagagacctaaggacatcatcctattctaaatctgatcgggactgtaaaactgagacctcttacttagagatggaaagaagaggcaagtattcttcaaaactagaaagagaatctaaaaggacttcagaaaatgaagcaattaaaagatgttgttctccccctaatgaactgggattccgacgagggtcatcatattctaagcatgacagtagtgcttcccgttataaatctaccctttcaaaacctatacccaagtctgataaatttaaaaattctttctgttgtacagaattaaatgaagaaatcaaacagtctcattcttttagtttacagacaccttgttcaaaaggtagtgaattaagaatgattaataaaaatcctgaaagagaaaaggctgggtctccagctccatcaaatcgattaaatgattcacctactttaaaaaagctagatgaattgcctatttttaagtccgaatttataacacatgatagccatgatagtattaaggaattagactctttatctaaagtgaagaatgatcaattaagaagtttttgtcccatagaattaaatataaatggatctcctggggcagaatctgatttggcaacattttgcacttctaaaactgatgctgttttaatgacttctgatgatagtgtgactggatcggaattatcccctttggtcaaagcatgcatgctttcatcaaatggatttcagaatattagtaggtgcaaagaaaaagacttggatgatacctgcatgctgcataagaagtcagaaagcccatttagagaaacagaacctctggtgtcaccacaccaagataaactcatgtctatgccagttatgactgtggattattccaaaacagtagttaaagaaccagttgatacgagggtttcttgctgcaaaaccaaagattcagacatatactgtactttgaacgatagcaacccttctttgtgtaactctgaagctgaaaatattgagccttcagttatgaagatttcttcaaatagctttatgaatgtgcatttggaatcaaaaccagttatatgtgatagtagaaatttgacagatcactcaaaatttgcatgtgaagaatataagcagagcatcggtagcactagttcagcttctgttaatcattttgatgatttatatcaacctattgggagttcaggtattgcttcatctcttcagagtcttccaccaggaataaaggtggacagtctaactctcttgaaatgcggagagaacacatctccagttctggatgcagtgctaaagagtaaaaaaagttcagagtttttaaagcatgcagggaaagaaacaatagtagaagtaggtagtgaccttcctgattcaggaaagggatttgcttccagggagaacaggcgtaataatgggttatctgggaaatgtttgcaagaggctcaagaagaagggaattccatattgcctgaaagaagaggaagaccagaaatctctttagatgaaagaggagaaggaggacatgtgcatacttctgatgactcagaagttgtattttcttcttgtgatttgaatttaaccatggaagacagtgatggtgtaacttatgcattaaagtgtgacagtagtggtcatgccccagaaattgtgtctacagttcatgaagattattctggctcttctgaaagttcaaatgatgaaagtgattcagaagatacagattcggatgatagcagtattccaagaaaccgtctccagtctgttgtggttgtgccaaagaattctactttgcccatggaagaaacaagtccttgttcttctcggagcagtcaaagttatagacactattctgaccattgggaagatgagagattggagtcaaggagacatttgtatgaggaaaaatttgaaagtatagcaagtaaagcctgtcctcaaactgataagtttttccttcataaaggaacagagaagaatccggaaatttcttttacacagtccagtagaaaacaaatagataatcgcctgcctgaactttctcatcctcagagtgatggggttgatagtacaagtcatacagatgtgaaatctgaccctctgggtcacccaaattcagaggaaaccgtgaaagccaaaataccttctaggcagcaagaagagctgccaatttattcttctgattttgaagatgtcccaaataagtcttggcaacagaccactttccaaaacaggccagatagtagactgggaaaaacagaattgagtttttcttcctcttgtgagataccacatgtggatggcttgcactcatcagaagagctcagaaacttaggttgggacttctctcaagaaaagccttctaccacgtatcagcaacctgacagtagctatggagcttgtggtggacacaagtatcagcaaaatgcagaacagtatggtgggacacgtgattactggcaaggcaatggttactgggatccaagatcaggtagacctcctggaactggggttgtgtatgatcgaactcaaggacaagtaccagattccctaacagatgatcgtgaagaagaggagaattgggatcaacaggatggatcccatttttcagaccagtccgataaatttcttctatcccttcagaaagacaaggggtcagtgcaagcacctgaaataagcagcaattccattaaggacactttagctgtgaatgaaaagaaagatttttcaaaaaacttagaaaaaaatgatatcaaagatagagggcctcttaaaaaaaggaggcaggaaatagagagtgattctgaaagtgatggtgagcttcaggacagaaagaaagttagagtggaggtagagcagggagagacatcagtgcccccaggttcagcactggttgggccctcctgtgtcatggatgacttcagggacccacagcgatggaaggaatgtgccaagcaagggaaaatgccatgttactttgatcttattgaagaaaatgtttatttaacagaaagaaagaagaataaatctcatcgagatattaagcgaatgcagtgtgagtgtacacctctttctaaagatgaaagagctcaaggtgaaatagcatgtggggaagattgtcttaatcgtcttctcatgattgaatgttcttctcggtgtccaaatggggattattgttccaatagacggtttcagagaaaacagcatgcagatgtggaagtcatactcacagaaaagaaaggctggggcttgagagctgccaaagaccttccttcgaacacctttgtcctagaatattgtggagaggtactcgatcataaagagtttaaagctcgagtgaaggagtatgcacgaaacaaaaacatccattactatttcatggccctgaagaatgatgagataatagatgccactcaaaaaggaaattgctctcgtttcatgaatcacagctgtgaaccaaattgtgaaacccaaaaatggactgtgaacggacaactgagggttgggttttttaccaccaaactggttccttcaggctcagagttaacgtttgactatcagttccagagatatggaaaagaagcccagaaatgtttctgcggatcagccaattgccggggttacctgggaggagaaaacagagtcagcatcagagcagcaggagggaaaatgaagaaggaacgatctcgtaagaaggattcagtggatggagagctagaagctctgatggaaaatggtgagggtctctctgataaaaaccaggtgctcagcttatcccggctaatggttagaattgaaactttggagcagaaacttacctgtctggaactcatacagaacacacactcacagtcctgcctgaagtcctttctggaacgtcatgggctgtctttgttgtggatctggatggcagagctaggtgacggccgggaaagtaaccagaagcttcaggaagagattataaagactttggaacacttgcccattcctactaaaaatatgttggaggaaagcaaagtacttccaattattcaacgctggtctcagactaagactgctgtccctccgttgagtgaaggagatgggtattctagtgagaatacatcgcgtgctcatacaccactcaacacacctgatccttccaccaagctgagcacagaagctgacacagacactcccaagaaactaatgtttcgcagactgaaaattataagtgaaaatagcatggacagtgcaatctctgatgcaaccagtgagctagaaggcaaggatggcaaagaggatcttgatcaattagaaaatgtccctgtagaggaagaggaagaattgcagtcacaacagctactcccacaacagctgcctgaatgcaaagttgatagtgaaaccaacatagaagctagtaagctacctacatctgaaccagaagctgacgctgaaatagagcccaaagagagcaacggcacaaaactagaagaacctattaatgaagaaacaccatcccaagatgaagaggagggtgtgtctgatgtggagagtgaaaggagccaagaacagccagataaaacagtggatataagtgatttggccaccaaactcctggacagttggaaagacctaaaggaggtatatcgaattccaaagaaaagtcaaactgaaaaggaaaacacaacaactgaacgaggaagggatgctgttggcttcagagatcaaacacctgccccgaagactcctaataggtcaagagagagagacccagacaagcaaactcaaaataaagagaaaaggaaacgaagaagctccctctcaccaccctcttctgcctatgagcggggaacaaaaaggccagatgacagatatgatacaccaacttctaaaaagaaagtacgaattaaagaccgcaataaactttctacagaggaacgccggaagttgtttgagcaagaggtggctcaacgggaggctcagaaacaacagcaacagatgcagaacctgggaatgacatcaccactgccctatgactctcttggttataatgccccgcatcatccctttgctggttacccaccaggttatcccatgcaggcctatgtggatcccagcaaccctaatgctggaaaggtgctcctgcccacacccagcatggacccagtgtgttctcctgctccttatgatcatgctcagcccttggtgggacattctacagaacccctttctgcccctccaccagtaccagtggtgccacatgtggcagctcctgtggaagtttccagttcccagtatgtggcccagagtgatggtgtagtacaccaagactccagcgttgctgtcttgccagtgccggcccccggcccagttcagggacagaattatagtgtttgggattcaaaccaacagtctgtcagtgtacagcagcagtactctcctgcacagtctcaagcaaccatatattatcaaggacagacatgtccaacagtctatggtgtgacatcaccttattcacagacaactccaccaattgtacagagttatgcccagccaagtcttcagtatatccaggggcaacagattttcacagctcatccacaaggagtggtggtacagccagccgcagcagtgactacaatagttgcaccagggcagcctcagcccttgcagccatctgaaatggttgtgacaaataatctcttggatctgccgcccccctctcctcccaaaccaaaaaccattgtcttacctcccaactggaagacagctcgagatccagaagggaagatttattactaccatgtgatcacaaggcagactcagtgggatcctcctacttgggaaagcccaggagatgatgccagccttgagcatgaagctgagatggacctgggaactccaacatatgatgaaaaccccatgaaggcctcgaaaaagcccaagacagcagaagcagacacctccagtgaactagcaaagaaaagcaaagaagtattcagaaaagagatgtcccagttcatcgtccagtgcctgaacccttaccggaaacctgactgcaaagtgggaagaattaccacaactgaagactttaaacatctggctcgcaagctgactcacggtgttatgaataaggagctgaagtactgtaagaatcctgaggacctggagtgcaatgagaatgtgaaacacaaaaccaaggagtacattaagaagtacatgcagaagtttggggctgtttacaaacccaaagaggacactgaattagagtgactgttgggccagggtgggaggatgggtggtcaggtaagacagactctagggagaggaaatcctgtgggcctttctgtcccacccctgtcagcactgtgctactgatgatacatcaccctggggaattcaaccctgcagatgtcaactgaaggccacaaaaatgaactccatctacaagtgattacctagttgtgagctgttggcatgtggttagaagccatcagaggtgcaagggcttagaaaagaccctggccagacctgactccactcttaaacctgggtcttctccttggcggtgctgtcagcgcacagacccatgcgcatccccacccacaaccctttaccctgatgatctgtattatattttaatgtatatgtgaatatattgaaaataatttgttttttcctggtttttgtttggttttcgttttgcttttagcctctacatgctaggatcacaggaagactttgtaaggacagtttaagttctcctgcaaggtttaatttgttatcatgtaaatattctaaagcaggctgccttgtggttttggccagccttgtgctatgttgataagattgatttactgcttaaaatcactttactttatccaatttttactgaactttttatgtaaaaaaataaaatcaattaaagaacttggcatgtgtgttccctaaaagtt

SEQ ID NO: 178179 - DNA, 8431 bp, Artificial Sequence
  derived and/or modified sequence
gcgtcgccctgctgcggggagggggctcgcgtcgccgtctccagccgctcccgatgaagcagctgcagccgcagccgcctccgaagatgggggatttctacgacccggagcacccgacccctgaaaaaaaagaaagagaggcaaagattgaaaatgtgcagaaaacaggtttcatcaaaggaccaatgttcaaaggtgttgcttctagtcgatttttgcccaaaggcaccaaaacaaaagttaatttggaagaacagggacgacagaaggtgtcattcagcttcagccttacaaagaaaactttgcagaataggtttctcactgcacttggcaatgaaaagcaaagtgatactccaaaccctccagctgtacctcttcaggtagactcgactcctaaaatgaaaatggaaattggtgataccttatctactgcagaagaatcttccccaccaaagtcaagggtggaattgggcaaaattcattttaagaaacatctgcttcatgtaacatccaggccactgctggctactaccacagcagtagcatctccacctactcatgcagcaccattaccagcagtgatagcagaatcaacaactgtagactcaccgccctcatctccgcctccaccgcctccacctgcccaagccacaacactctcatcaccagcaccagtaacagagccagtggccttgccacatacaccaataacagttctaatggcagcaccagtacccttaccagtagatgtagcagttagatctctgaaagaaccaccaattataattgtaccagaatctttagaagcagatactaagcaggacactatatctaatagtttagaagaacacgtaactcaaatattgaatgagcaagcagatatttcctcaaaaaaagaagattcccatattgggaaggatgaagaaattccagatagttctaagattagtctgagctgtaaaaaaacaggttctaagaagaaatcctcacaatctgaaggcatctttcttggttcagaatctgatgaagattctgtacggacttcttcaagtcaaagatcacatgatttaaaattttcagcaagcattgaaaaggaaagagattttaaaaagagctcagcacctttaaaaagtgaggatctagggaaaccttcacgatctaaaacagacagagatgataaatattttagctattcaaaacttgaaagagatactcggtatgtatcttcccgatgtagatcagaaagagagcgacggcggagcagatctcactctaggtctgagagaggctctagaactaatttatcctattccaggtcagaacgatctcattattatgactctgatcgtcgctaccataggagctccccttatcgagagaggacgcgctattctcggccatacacagataacagagcacgagagagttctgactcagaagaagagtataagaagacatactcaaggcgtacctcatctcattcctcttcttacagagacctaaggacatcatcctattctaaatctgatcgggactgtaaaactgagacctcttacttagagatggaaagaagaggcaagtattcttcaaaactagaaagagaatctaaaaggacttcagaaaatgaagcaattaaaagatgttgttctccccctaatgaactgggattccgacgagggtcatcatattctaagcatgacagtagtgcttcccgttataaatctaccctttcaaaacctatacccaagtctgataaatttaaaaattctttctgttgtacagaattaaatgaagaaatcaaacagtctcattcttttagtttacagacaccttgttcaaaaggtagtgaattaagaatgattaataaaaatcctgaaagagaaaaggctgggtctccagctccatcaaatcgattaaatgattcacctactttaaaaaagctagatgaattgcctatttttaagtccgaatttataacacatgatagccatgatagtattaaggaattagactctttatctaaagtgaagaatgatcaattaagaagtttttgtcccatagaattaaatataaatggatctcctggggcagaatctgatttggcaacattttgcacttctaaaactgatgctgttttaatgacttctgatgatagtgtgactggatcggaattatcccctttggtcaaagcatgcatgctttcatcaaatggatttcagaatattagtaggtgcaaagaaaaagacttggatgatacctgcatgctgcataagaagtcagaaagcccatttagagaaacagaacctctggtgtcaccacaccaagataaactcatgtctatgccagttatgactgtggattattccaaaacagtagttaaagaaccagttgatacgagggtttcttgctgcaaaaccaaagattcagacatatactgtactttgaacgatagcaacccttctttgtgtaactctgaagctgaaaatattgagccttcagttatgaagatttcttcaaatagctttatgaatgtgcatttggaatcaaaaccagttatatgtgatagtagaaatttgacagatcactcaaaatttgcatgtgaagaatataagcagagcatcggtagcactagttcagcttctgttaatcattttgatgatttatatcaacctattgggagttcaggtattgcttcatctcttcagagtcttccaccaggaataaaggtggacagtctaactctcttgaaatgcggagagaacacatctccagttctggatgcagtgctaaagagtaaaaaaagttcagagtttttaaagcatgcagggaaagaaacaatagtagaagtaggtagtgaccttcctgattcaggaaagggatttgcttccagggagaacaggcgtaataatgggttatctgggaaatgtttgcaagaggctcaagaagaagggaattccatattgcctgaaagaagaggaagaccagaaatctctttagatgaaagaggagaaggaggacatgtgcatacttctgatgactcagaagttgtattttcttcttgtgatttgaatttaaccatggaagacagtgatggtgtaacttatgcattaaagtgtgacagtagtggtcatgccccagaaattgtgtctacagttcatgaagattattctggctcttctgaaagttcaaatgatgaaagtgattcagaagatacagattcggatgatagcagtattccaagaaaccgtctccagtctgttgtggttgtgccaaagaattctactttgcccatggaagaaacaagtccttgttcttctcggagcagtcaaagttatagacactattctgaccattgggaagatgagagattggagtcaaggagacatttgtatgaggaaaaatttgaaagtatagcaagtaaagcctgtcctcaaactgataagtttttccttcataaaggaacagagaagaatccggaaatttcttttacacagtccagtagaaaacaaatagataatcgcctgcctgaactttctcatcctcagagtgatggggttgatagtacaagtcatacagatgtgaaatctgaccctctgggtcacccaaattcagaggaaaccgtgaaagccaaaataccttctaggcagcaagaagagctgccaatttattcttctgattttgaagatgtcccaaataagtcttggcaacagaccactttccaaaacaggccagatagtagactgggaaaaacagaattgagtttttcttcctcttgtgagataccacatgtggatggcttgcactcatcagaagagctcagaaacttaggttgggacttctctcaagaaaagccttctaccacgtatcagcaacctgacagtagctatggagcttgtggtggacacaagtatcagcaaaatgcagaacagtatggtgggacacgtgattactggcaaggcaatggttactgggatccaagatcaggtagacctcctggaactggggttgtgtatgatcgaactcaaggacaagtaccagattccctaacagatgatcgtgaagaagaggagaattgggatcaacaggatggatcccatttttcagaccagtccgataaatttcttctatcccttcagaaagacaaggggtcagtgcaagcacctgaaataagcagcaattccattaaggacactttagctgtgaatgaaaagaaagatttttcaaaaaacttagaaaaaaatgatatcaaagatagagggcctcttaaaaaaaggaggcaggaaatagagagtgattctgaaagtgatggtgagcttcaggacagaaagaaagttagagtggaggtagagcagggagagacatcagtgcccccaggttcagcactggttgggccctcctgtgtcatggatgacttcagggacccacagcgatggaaggaatgtgccaagcaagggaaaatgccatgttactttgatcttattgaagaaaatgtttatttaacagaaagaaagaagaataaatctcatcgagatattaagcgaatgcagtgtgagtgtacacctctttctaaagatgaaagagctcaaggtgaaatagcatgtggggaagattgtcttaatcgtcttctcatgattgaatgttcttctcggtgtccaaatggggattattgttccaatagacggtttcagagaaaacagcatgcagatgtggaagtcatactcacagaaaagaaaggctggggcttgagagctgccaaagaccttccttcgaacacctttgtcctagaatattgtggagaggtactcgatcataaagagtttaaagctcgagtgaaggagtatgcacgaaacaaaaacatccattactatttcatggccctgaagaatgatgagataatagatgccactcaaaaaggaaattgctctcgtttcatgaatcacagctgtgaaccaaattgtgaaacccaaaaatggactgtgaacggacaactgagggttgggttttttaccaccaaactggttccttcaggctcagagttaacgtttgactatcagttccagagatatggaaaagaagcccagaaatgtttctgcggatcagccaattgccggggttacctgggaggagaaaacagagtcagcatcagagcagcaggagggaaaatgaagaaggaacgatctcgtaagaaggattcagtggatggagagctagaagctctgatggaaaatggtgagggtctctctgataaaaaccaggtgctcagcttatcccggctaatggttagaattgaaactttggagcagaaacttacctgtctggaactcatacagaacacacactcacagtcctgcctgaagtcctttctggaacgtcatgggctgtctttgttgtggatctggatggcagagctaggtgacggccgggaaagtaaccagaagcttcaggaagagattataaagactttggaacacttgcccattcctactaaaaatatgttggaggaaagcaaagtacttccaattattcaacgctggtctcagactaagactgctgtccctccgttgagtgaaggagatgggtattctagtgagaatacatcgcgtgctcatacaccactcaacacacctgatccttccaccaagctgagcacagaagctgacacagacactcccaagaaactaatgtttcgcagactgaaaattataagtgaaaatagcatggacagtgcaatctctgatgcaaccagtgagctagaaggcaaggatggcaaagaggatcttgatcaattagaaaatgtccctgtagaggaagaggaagaattgcagtcacaacagctactcccacaacagctgcctgaatgcaaagttgatagtgaaaccaacatagaagctagtaagctacctacatctgaaccagaagctgacgctgaaatagagcccaaagagagcaacggcacaaaactagaagaacctattaatgaagaaacaccatcccaagatgaagaggagggtgtgtctgatgtggagagtgaaaggagccaagaacagccagataaaacagtggatataagtgatttggccaccaaactcctggacagttggaaagacctaaaggaggtatatcgaattccaaagaaaagtcaaactgaaaaggaaaacacaacaactgaacgaggaagggatgctgttggcttcagagatcaaacacctgccccgaagactcctaataggtcaagagagagagacccagacaagcaaactcaaaataaagagaaaaggaaacgaagaagctccctctcaccaccctcttctgcctatgagcggggaacaaaaaggccagatgacagatatgatacaccaacttctaaaaagaaagtacgaattaaagaccgcaataaactttctacagaggaacgccggaagttgtttgagcaagaggtggctcaacgggaggctcagaaacaacagcaacagatgcagaacctgggaatgacatcaccactgccctatgactctcttggttataatgccccgcatcatccctttgctggttacccaccaggttatcccatgcaggcctatgtggatcccagcaaccctaatgctggaaaggtgctcctgcccacacccagcatggacccagtgtgttctcctgctccttatgatcatgctcagcccttggtgggacattctacagaacccctttctgcccctccaccagtaccagtggtgccacatgtggcagctcctgtggaagtttccagttcccagtatgtggcccagagtgatggtgtagtacaccaagactccagcgttgctgtcttgccagtgccggcccccggcccagttcagggacagaattatagtgtttgggattcaaaccaacagtctgtcagtgtacagcagcagtactctcctgcacagtctcaagcaaccatatattatcaaggacagacatgtccaacagtctatggtgtgacatcaccttattcacagacaactccaccaattgtacagagttatgcccagccaagtcttcagtatatccaggggcaacagattttcacagctcatccacaaggagtggtggtacagccagccgcagcagtgactacaatagttgcaccagggcagcctcagcccttgcagccatctgaaatggttgtgacaaataatctcttggatctgccgcccccctctcctcccaaaccaaaaaccattgtcttacctcccaactggaagacagctcgagatccagaagggaagatttattactaccatgtgatcacaaggcagactcagtgggatcctcctacttgggaaagcccaggagatgatgccagccttgagcatgaagctgagatggacctgggaactccaacatatgatgaaaaccccatgaaggcctcgaaaaagcccaagacagcagaagcagacacctccagtgaactagcaaagaaaagcaaagaagtattcagaaaagagatgtcccagttcatcgtccagtgcctgaacccttaccggaaacctgactgcaaagtgggaagaattaccacaactgaagactttaaacatctggctcgcaagctgactcacggtgttatgaataaggagctgaagtactgtaagaatcctgaggacctggagtgcaatgagaatgtgaaacacaaaaccaaggagtacattaagaagtacatgcagaagtttggggctgtttacaaacccaaagaggacactgaattagagtgactgttgggccagggtgggaggatgggtggtcaggtaagacagactctagggagaggaaatcctgtgggcctttctgtcccacccctgtcagcactgtgctactgatgatacatcaccctggggaattcaaccctgcagatgtcaactgaaggccacaaaaatgaactccatctacaagtgattacctagttgtgagctgttggcatgtggttagaagccatcagaggtgcaagggcttagaaaagaccctggccagacctgactccactcttaaacctgggtcttctccttggcggtgctgtcagcgcacagacccatgcgcatccccacccacaaccctttaccctgatgatctgtattatattttaatgtatatgtgaatatattgaaaataatttgttttttcctggtttttgtttggttttcgttttgcttttagcctctacatgctaggatcacaggaagactttgtaaggacagtttaagttctcctgcaaggtttaatttgttatcatgtaaatattctaaagcaggctgccttgtggttttggccagccttgtgctatgttgataagattgatttactgcttaaaatcactttactttatccaatttttactgaactttttatgtaaaaaaataaaatcaattaaagaacttggcatgtgtgttccctaaaagtt

SEQ ID NO: 178180 - DNA, 7695 bp, Artificial Sequence
  derived and/or modified sequence
atgaagcagctgcagccccagcccccccccaagatgggcgacttctacgaccccgagcaccccacccccgaggaggaggagaacgaggccaagatcgagaacgtgcagaagaccggcttcatcaagggccccatgttcaagggcgtggccagcagcagattcctgcccaagggcaccaagaccaaggtgaacctggaggagcagggcagacagaaggtgagcttcagcttcagcctgaccaagaagaccctgcagaacagattcctgaccgccctgggcaacgagaagcagagcgacacccccaacccccccgccgtgcccctgcaggtggacagcacccccaagatgaagatggagatcggcgacaccctgagcaccgccgaggagagcagcccccccaagagcagagtggagctgggcaagatccacttcaagaagcacctgctgcacgtgaccagcagacccctgctggccaccaccaccgccgtggccagcccccccacccacgccgcccccctgcccgccgtgatcgccgagagcaccaccgtggacagcccccccagcagccccccccccccccccccccccgcccaggccaccaccctgagcagccccgcccccgtgaccgagcccgtggccctgccccacacccccatcaccgtgctgatggccgcccccgtgcccctgcccgtggacgtggccgtgagaagcctgaaggagccccccatcatcatcgtgcccgagagcctggaggccgacaccaagcaggacaccatcagcaacagcctggaggagcacgtgacccagatcctgaacgagcaggccgacatcagcagcaagaaggaggacagccacatcggcaaggacgaggagatccccgacagcagcaagatcagcctgagctgcaagaagaccggcagcaagaagaagagcagccagagcgagggcatcttcctgggcagcgagagcgacgaggacagcgtgagaaccagcagcagccagagaagccacgacctgaagttcagcgccagcatcgagaaggagagagacttcaagaagagcagcgcccccctgaagagcgaggacctgggcaagcccagcagaagcaagaccgacagagacgacaagtacttcagctacagcaagctggagagagacaccagatacgtgagcagcagatgcagaagcgagagagagagaagaagaagcagaagccacagcagaagcgagagaggcagcagaaccaacctgagctacagcagaagcgagagaagccactactacgacagcgacagaagataccacagaagcagcccctacagagagagaaccagatacagcagaccctacaccgacaacagagccagagagagcagcgacagcgaggaggagtacaagaagacctacagcagaagaaccagcagccacagcagcagctacagagacctgagaaccagcagctacagcaagagcgacagagactgcaagaccgagaccagctacctggagatggagagaagaggcaagtacagcagcaagctggagagagagagcaagagaaccagcgagaacgaggccatcaagagatgctgcagcccccccaacgagctgggcttcagaagaggcagcagctacagcaagcacgacagcagcgccagcagatacaagagcaccctgagcaagcccatccccaagagcgacaagttcaagaacagcttctgctgcaccgagctgaacgaggagatcaagcagagccacagcttcagcctgcagaccccctgcagcaagggcagcgagctgagaatgatcaacaagaaccccgagagagagaaggccggcagccccgcccccagcaacagactgaacgacagccccaccctgaagaagctggacgagctgcccatcttcaagagcgagttcatcacccacgacagccacgacagcatcaaggagctggacagcctgagcaaggtgaagaacgaccagctgagaagcttctgccccatcgagctgaacatcaacggcagccccggcgccgagagcgacctggccaccttctgcaccagcaagaccgacgccgtgctgatgaccagcgacgacagcgtgaccggcagcgagctgagccccctggtgaaggcctgcatgctgagcagcaacggcttccagaacatcagcagatgcaaggagaaggacctggacgacacctgcatgctgcacaagaagagcgagagccccttcagagagaccgagcccctggtgagcccccaccaggacaagctgatgagcatgcccgtgatgaccgtggactacagcaagaccgtggtgaaggagcccgtggacaccagagtgagctgctgcaagaccaaggacagcgacatctactgcaccctgaacgacagcaaccccagcctgtgcaacagcgaggccgagaacatcgagcccagcgtgatgaagatcagcagcaacagcttcatgaacgtgcacctggagagcaagcccgtgatctgcgacagcagaaacctgaccgaccacagcaagttcgcctgcgaggagtacaagcagagcatcggcagcaccagcagcgccagcgtgaaccacttcgacgacctgtaccagcccatcggcagcagcggcatcgccagcagcctgcagagcctgccccccggcatcaaggtggacagcctgaccctgctgaagtgcggcgagaacaccagccccgtgctggacgccgtgctgaagagcaagaagagcagcgagttcctgaagcacgccggcaaggagaccatcgtggaggtgggcagcgacctgcccgacagcggcaagggcttcgccagcagagagaacagaagaaacaacggcctgagcggcaagtgcctgcaggaggcccaggaggagggcaacagcatcctgcccgagagaagaggcagacccgagatcagcctggacgagagaggcgagggcggccacgtgcacaccagcgacgacagcgaggtggtgttcagcagctgcgacctgaacctgaccatggaggacagcgacggcgtgacctacgccctgaagtgcgacagcagcggccacgcccccgagatcgtgagcaccgtgcacgaggactacagcggcagcagcgagagcagcaacgacgagagcgacagcgaggacaccgacagcgacgacagcagcatccccagaaacagactgcagagcgtggtggtggtgcccaagaacagcaccctgcccatggaggagaccagcccctgcagcagcagaagcagccagagctacagacactacagcgaccactgggaggacgagagactggagagcagaagacacctgtacgaggagaagttcgagagcatcgccagcaaggcctgcccccagaccgacaagttcttcctgcacaagggcaccgagaagaaccccgagatcagcttcacccagagcagcagaaagcagatcgacaacagactgcccgagctgagccacccccagagcgacggcgtggacagcaccagccacaccgacgtgaagagcgaccccctgggccaccccaacagcgaggagaccgtgaaggccaagatccccagcagacagcaggaggagctgcccatctacagcagcgacttcgaggacgtgcccaacaagagctggcagcagaccaccttccagaacagacccgacagcagactgggcaagaccgagctgagcttcagcagcagctgcgagatcccccacgtggacggcctgcacagcagcgaggagctgagaaacctgggctgggacttcagccaggagaagcccagcaccacctaccagcagcccgacagcagctacggcgcctgcggcggccacaagtaccagcagaacgccgagcagtacggcggcaccagagactactggcagggcaacggctactgggaccccagaagcggcagaccccccggcaccggcgtggtgtacgacagaacccagggccaggtgcccgacagcctgaccgacgacagagaggaggaggagaactgggaccagcaggacggcagccacttcagcgaccagagcgacaagttcctgctgagcctgcagaaggacaagggcagcgtgcaggcccccgagatcagcagcaacagcatcaaggacaccctggccgtgaacgagaagaaggacttcagcaagaacctggagaagaacgacatcaaggacagaggccccctgaagaagagaagacaggagatcgagagcgacagcgagagcgacggcgagctgcaggacagaaagaaggtgagagtggaggtggagcagggcgagaccagcgtgccccccggcagcgccctggtgggccccagctgcgtgatggacgacttcagagacccccagagatggaaggagtgcgccaagcagggcaagatgccctgctacttcgacctgatcgaggagaacgtgtacctgaccgagagaaagaagaacaagagccacagagacatcaagagaatgcagtgcgagtgcacccccctgagcaaggacgagagagcccagggcgagatcgcctgcggcgaggactgcctgaacagactgctgatgatcgagtgcagcagcagatgccccaacggcgactactgcagcaacagaagattccagagaaagcagcacgccgacgtggaggtgatcctgaccgagaagaagggctggggcctgagagccgccaaggacctgcccagcaacaccttcgtgctggagtactgcggcgaggtgctggaccacaaggagttcaaggccagagtgaaggagtacgccagaaacaagaacatccactactacttcatggccctgaagaacgacgagatcatcgacgccacccagaagggcaactgcagcagattcatgaaccacagctgcgagcccaactgcgagacccagaagtggaccgtgaacggccagctgagagtgggcttcttcaccaccaagctggtgcccagcggcagcgagctgaccttcgactaccagttccagagatacggcaaggaggcccagaagtgcttctgcggcagcgccaactgcagaggctacctgggcggcgagaacagagtgagcatcagagccgccggcggcaagatgaagaaggagagaagcagaaagaaggacagcgtggacggcgagctggaggccctgatggagaacggcgagggcctgagcgacaagaaccaggtgctgagcctgagcagactgatggtgagaatcgagaccctggagcagaagctgacctgcctggagctgatccagaacacccacagccagagctgcctgaagagcttcctggagagacacggcctgagcctgctgtggatctggatggccgagctgggcgacggcagagagagcaaccagaagctgcaggaggagatcatcaagaccctggagcacctgcccatccccaccaagaacatgctggaggagagcaaggtgctgcccatcatccagagatggagccagaccaagaccgccgtgccccccctgagcgagggcgacggctacagcagcgagaacaccagcagagcccacacccccctgaacacccccgaccccagcaccaagctgagcaccgaggccgacaccgacacccccaagaagctgatgttcagaagactgaagatcatcagcgagaacagcatggacagcgccatcagcgacgccaccagcgagctggagggcaaggacggcaaggaggacctggaccagctggagaacgtgcccgtggaggaggaggaggagctgcagagccagcagctgctgccccagcagctgcccgagtgcaaggtggacagcgagaccaacatcgaggccagcaagctgcccaccagcgagcccgaggccgacgccgagatcgagcccaaggagagcaacggcaccaagctggaggagcccatcaacgaggagacccccagccaggacgaggaggagggcgtgagcgacgtggagagcgagagaagccaggagcagcccgacaagaccgtggacatcagcgacctggccaccaagctgctggacagctggaaggacctgaaggaggtgtacagaatccccaagaagagccagaccgagaaggagaacaccaccaccgagagaggcagagacgccgtgggcttcagagaccagacccccgcccccaagacccccaacagaagcagagagagagaccccgacaagcagacccagaacaaggagaagagaaagagaagaagcagcctgagcccccccagcagcgcctacgagagaggcaccaagagacccgacgacagatacgacacccccaccagcaagaagaaggtgagaatcaaggacagaaacaagctgagcaccgaggagagaagaaagctgttcgagcaggaggtggcccagagagaggcccagaagcagcagcagcagatgcagaacctgggcatgaccagccccctgccctacgacagcctgggctacaacgccccccaccaccccttcgccggctacccccccggctaccccatgcaggcctacgtggaccccagcaaccccaacgccggcaaggtgctgctgcccacccccagcatggaccccgtgtgcagccccgccccctacgaccacgcccagcccctggtgggccacagcaccgagcccctgagcgcccccccccccgtgcccgtggtgccccacgtggccgcccccgtggaggtgagcagcagccagtacgtggcccagagcgacggcgtggtgcaccaggacagcagcgtggccgtgctgcccgtgcccgcccccggccccgtgcagggccagaactacagcgtgtgggacagcaaccagcagagcgtgagcgtgcagcagcagtacagccccgcccagagccaggccaccatctactaccagggccagacctgccccaccgtgtacggcgtgaccagcccctacagccagaccaccccccccatcgtgcagagctacgcccagcccagcctgcagtacatccagggccagcagatcttcaccgcccacccccagggcgtggtggtgcagcccgccgccgccgtgaccaccatcgtggcccccggccagccccagcccctgcagcccagcgagatggtggtgaccaacaacctgctggacctgcccccccccagcccccccaagcccaagaccatcgtgctgccccccaactggaagaccgccagagaccccgagggcaagatctactactaccacgtgatcaccagacagacccagtgggacccccccacctgggagagccccggcgacgacgccagcctggagcacgaggccgagatggacctgggcacccccacctacgacgagaaccccatgaaggccagcaagaagcccaagaccgccgaggccgacaccagcagcgagctggccaagaagagcaaggaggtgttcagaaaggagatgagccagttcatcgtgcagtgcctgaacccctacagaaagcccgactgcaaggtgggcagaatcaccaccaccgaggacttcaagcacctggccagaaagctgacccacggcgtgatgaacaaggagctgaagtactgcaagaaccccgaggacctggagtgcaacgagaacgtgaagcacaagaccaaggagtacatcaagaagtacatgcagaagttcggcgccgtgtacaagcccaaggaggacaccgagctggagtag

SEQ ID NO: 178181 - DNA, 7695 bp, Artificial Sequence
  derived and/or modified sequence
atgaagcagctgcagccccagcccccccccaagatgggcgacttctacgaccccgagcaccccacccccgaggagcaggagcccgaggccaagatcgagaacgtgcagaagaccggcttcatcaagggccccatgttcaagggcgtggccagcagcagattcctgcccaagggcaccaagaccaaggtgaacctggaggagcagggcagacagaaggtgagcttcagcttcagcctgaccaagaagaccctgcagaacagattcctgaccgccctgggcaacgagaagcagagcgacacccccaacccccccgccgtgcccctgcaggtggacagcacccccaagatgaagatggagatcggcgacaccctgagcaccgccgaggagagcagcccccccaagagcagagtggagctgggcaagatccacttcaagaagcacctgctgcacgtgaccagcagacccctgctggccaccaccaccgccgtggccagcccccccacccacgccgcccccctgcccgccgtgatcgccgagagcaccaccgtggacagcccccccagcagccccccccccccccccccccccgcccaggccaccaccctgagcagccccgcccccgtgaccgagcccgtggccctgccccacacccccatcaccgtgctgatggccgcccccgtgcccctgcccgtggacgtggccgtgagaagcctgaaggagccccccatcatcatcgtgcccgagagcctggaggccgacaccaagcaggacaccatcagcaacagcctggaggagcacgtgacccagatcctgaacgagcaggccgacatcagcagcaagaaggaggacagccacatcggcaaggacgaggagatccccgacagcagcaagatcagcctgagctgcaagaagaccggcagcaagaagaagagcagccagagcgagggcatcttcctgggcagcgagagcgacgaggacagcgtgagaaccagcagcagccagagaagccacgacctgaagttcagcgccagcatcgagaaggagagagacttcaagaagagcagcgcccccctgaagagcgaggacctgggcaagcccagcagaagcaagaccgacagagacgacaagtacttcagctacagcaagctggagagagacaccagatacgtgagcagcagatgcagaagcgagagagagagaagaagaagcagaagccacagcagaagcgagagaggcagcagaaccaacctgagctacagcagaagcgagagaagccactactacgacagcgacagaagataccacagaagcagcccctacagagagagaaccagatacagcagaccctacaccgacaacagagccagagagagcagcgacagcgaggaggagtacaagaagacctacagcagaagaaccagcagccacagcagcagctacagagacctgagaaccagcagctacagcaagagcgacagagactgcaagaccgagaccagctacctggagatggagagaagaggcaagtacagcagcaagctggagagagagagcaagagaaccagcgagaacgaggccatcaagagatgctgcagcccccccaacgagctgggcttcagaagaggcagcagctacagcaagcacgacagcagcgccagcagatacaagagcaccctgagcaagcccatccccaagagcgacaagttcaagaacagcttctgctgcaccgagctgaacgaggagatcaagcagagccacagcttcagcctgcagaccccctgcagcaagggcagcgagctgagaatgatcaacaagaaccccgagagagagaaggccggcagccccgcccccagcaacagactgaacgacagccccaccctgaagaagctggacgagctgcccatcttcaagagcgagttcatcacccacgacagccacgacagcatcaaggagctggacagcctgagcaaggtgaagaacgaccagctgagaagcttctgccccatcgagctgaacatcaacggcagccccggcgccgagagcgacctggccaccttctgcaccagcaagaccgacgccgtgctgatgaccagcgacgacagcgtgaccggcagcgagctgagccccctggtgaaggcctgcatgctgagcagcaacggcttccagaacatcagcagatgcaaggagaaggacctggacgacacctgcatgctgcacaagaagagcgagagccccttcagagagaccgagcccctggtgagcccccaccaggacaagctgatgagcatgcccgtgatgaccgtggactacagcaagaccgtggtgaaggagcccgtggacaccagagtgagctgctgcaagaccaaggacagcgacatctactgcaccctgaacgacagcaaccccagcctgtgcaacagcgaggccgagaacatcgagcccagcgtgatgaagatcagcagcaacagcttcatgaacgtgcacctggagagcaagcccgtgatctgcgacagcagaaacctgaccgaccacagcaagttcgcctgcgaggagtacaagcagagcatcggcagcaccagcagcgccagcgtgaaccacttcgacgacctgtaccagcccatcggcagcagcggcatcgccagcagcctgcagagcctgccccccggcatcaaggtggacagcctgaccctgctgaagtgcggcgagaacaccagccccgtgctggacgccgtgctgaagagcaagaagagcagcgagttcctgaagcacgccggcaaggagaccatcgtggaggtgggcagcgacctgcccgacagcggcaagggcttcgccagcagagagaacagaagaaacaacggcctgagcggcaagtgcctgcaggaggcccaggaggagggcaacagcatcctgcccgagagaagaggcagacccgagatcagcctggacgagagaggcgagggcggccacgtgcacaccagcgacgacagcgaggtggtgttcagcagctgcgacctgaacctgaccatggaggacagcgacggcgtgacctacgccctgaagtgcgacagcagcggccacgcccccgagatcgtgagcaccgtgcacgaggactacagcggcagcagcgagagcagcaacgacgagagcgacagcgaggacaccgacagcgacgacagcagcatccccagaaacagactgcagagcgtggtggtggtgcccaagaacagcaccctgcccatggaggagaccagcccctgcagcagcagaagcagccagagctacagacactacagcgaccactgggaggacgagagactggagagcagaagacacctgtacgaggagaagttcgagagcatcgccagcaaggcctgcccccagaccgacaagttcttcctgcacaagggcaccgagaagaaccccgagatcagcttcacccagagcagcagaaagcagatcgacaacagactgcccgagctgagccacccccagagcgacggcgtggacagcaccagccacaccgacgtgaagagcgaccccctgggccaccccaacagcgaggagaccgtgaaggccaagatccccagcagacagcaggaggagctgcccatctacagcagcgacttcgaggacgtgcccaacaagagctggcagcagaccaccttccagaacagacccgacagcagactgggcaagaccgagctgagcttcagcagcagctgcgagatcccccacgtggacggcctgcacagcagcgaggagctgagaaacctgggctgggacttcagccaggagaagcccagcaccacctaccagcagcccgacagcagctacggcgcctgcggcggccacaagtaccagcagaacgccgagcagtacggcggcaccagagactactggcagggcaacggctactgggaccccagaagcggcagaccccccggcaccggcgtggtgtacgacagaacccagggccaggtgcccgacagcctgaccgacgacagagaggaggaggagaactgggaccagcaggacggcagccacttcagcgaccagagcgacaagttcctgctgagcctgcagaaggacaagggcagcgtgcaggcccccgagatcagcagcaacagcatcaaggacaccctggccgtgaacgagaagaaggacttcagcaagaacctggagaagaacgacatcaaggacagaggccccctgaagaagagaagacaggagatcgagagcgacagcgagagcgacggcgagctgcaggacagaaagaaggtgagagtggaggtggagcagggcgagaccagcgtgccccccggcagcgccctggtgggccccagctgcgtgatggacgacttcagagacccccagagatggaaggagtgcgccaagcagggcaagatgccctgctacttcgacctgatcgaggagaacgtgtacctgaccgagagaaagaagaacaagagccacagagacatcaagagaatgcagtgcgagtgcacccccctgagcaaggacgagagagcccagggcgagatcgcctgcggcgaggactgcctgaacagactgctgatgatcgagtgcagcagcagatgccccaacggcgactactgcagcaacagaagattccagagaaagcagcacgccgacgtggaggtgatcctgaccgagaagaagggctggggcctgagagccgccaaggacctgcccagcaacaccttcgtgctggagtactgcggcgaggtgctggaccacaaggagttcaaggccagagtgaaggagtacgccagaaacaagaacatccactactacttcatggccctgaagaacgacgagatcatcgacgccacccagaagggcaactgcagcagattcatgaaccacagctgcgagcccaactgcgagacccagaagtggaccgtgaacggccagctgagagtgggcttcttcaccaccaagctggtgcccagcggcagcgagctgaccttcgactaccagttccagagatacggcaaggaggcccagaagtgcttctgcggcagcgccaactgcagaggctacctgggcggcgagaacagagtgagcatcagagccgccggcggcaagatgaagaaggagagaagcagaaagaaggacagcgtggacggcgagctggaggccctgatggagaacggcgagggcctgagcgacaagaaccaggtgctgagcctgagcagactgatggtgagaatcgagaccctggagcagaagctgacctgcctggagctgatccagaacacccacagccagagctgcctgaagagcttcctggagagacacggcctgagcctgctgtggatctggatggccgagctgggcgacggcagagagagcaaccagaagctgcaggaggagatcatcaagaccctggagcacctgcccatccccaccaagaacatgctggaggagagcaaggtgctgcccatcatccagagatggagccagaccaagaccgccgtgccccccctgagcgagggcgacggctacagcagcgagaacaccagcagagcccacacccccctgaacacccccgaccccagcaccaagctgagcaccgaggccgacaccgacacccccaagaagctgatgttcagaagactgaagatcatcagcgagaacagcatggacagcgccatcagcgacgccaccagcgagctggagggcaaggacggcaaggaggacctggaccagctggagaacgtgcccgtggaggaggaggaggagctgcagagccagcagctgctgccccagcagctgcccgagtgcaaggtggacagcgagaccaacatcgaggccagcaagctgcccaccagcgagcccgaggccgacgccgagatcgagcccaaggagagcaacggcaccaagctggaggagcccatcaacgaggagacccccagccaggacgaggaggagggcgtgagcgacgtggagagcgagagaagccaggagcagcccgacaagaccgtggacatcagcgacctggccaccaagctgctggacagctggaaggacctgaaggaggtgtacagaatccccaagaagagccagaccgagaaggagaacaccaccaccgagagaggcagagacgccgtgggcttcagagaccagacccccgcccccaagacccccaacagaagcagagagagagaccccgacaagcagacccagaacaaggagaagagaaagagaagaagcagcctgagcccccccagcagcgcctacgagagaggcaccaagagacccgacgacagatacgacacccccaccagcaagaagaaggtgagaatcaaggacagaaacaagctgagcaccgaggagagaagaaagctgttcgagcaggaggtggcccagagagaggcccagaagcagcagcagcagatgcagaacctgggcatgaccagccccctgccctacgacagcctgggctacaacgccccccaccaccccttcgccggctacccccccggctaccccatgcaggcctacgtggaccccagcaaccccaacgccggcaaggtgctgctgcccacccccagcatggaccccgtgtgcagccccgccccctacgaccacgcccagcccctggtgggccacagcaccgagcccctgagcgcccccccccccgtgcccgtggtgccccacgtggccgcccccgtggaggtgagcagcagccagtacgtggcccagagcgacggcgtggtgcaccaggacagcagcgtggccgtgctgcccgtgcccgcccccggccccgtgcagggccagaactacagcgtgtgggacagcaaccagcagagcgtgagcgtgcagcagcagtacagccccgcccagagccaggccaccatctactaccagggccagacctgccccaccgtgtacggcgtgaccagcccctacagccagaccaccccccccatcgtgcagagctacgcccagcccagcctgcagtacatccagggccagcagatcttcaccgcccacccccagggcgtggtggtgcagcccgccgccgccgtgaccaccatcgtggcccccggccagccccagcccctgcagcccagcgagatggtggtgaccaacaacctgctggacctgcccccccccagcccccccaagcccaagaccatcgtgctgccccccaactggaagaccgccagagaccccgagggcaagatctactactaccacgtgatcaccagacagacccagtgggacccccccacctgggagagccccggcgacgacgccagcctggagcacgaggccgagatggacctgggcacccccacctacgacgagaaccccatgaaggccagcaagaagcccaagaccgccgaggccgacaccagcagcgagctggccaagaagagcaaggaggtgttcagaaaggagatgagccagttcatcgtgcagtgcctgaacccctacagaaagcccgactgcaaggtgggcagaatcaccaccaccgaggacttcaagcacctggccagaaagctgacccacggcgtgatgaacaaggagctgaagtactgcaagaaccccgaggacctggagtgcaacgagaacgtgaagcacaagaccaaggagtacatcaagaagtacatgcagaagttcggcgccgtgtacaagcccaaggaggacaccgagctggagtag

SEQ ID NO: 178182 - DNA, 5145 bp, Artificial Sequence
  derived and/or modified sequence
atgaagcagctgcagccccagcccccccccaagatgggcgacttctacgaccccgagcaccccacccccgagaagaaggagagagaggccaagatcgagaacgtgcagaagaccggcttcatcaagggccccatgttcaagggcgtggccagcagcagattcctgcccaagggcaccaagaccaaggtgaacctggaggagcagggcagacagaaggtgagcttcagcttcagcctgaccaagaagaccctgcagaacagattcctgaccgccctgggcaacgagaagcagagcgacacccccaacccccccgccgtgcccctgcaggtggacagcacccccaagatgaagatggagatcggcgacaccctgagcaccgccgaggagagcagcccccccaagagcagagtggagctgggcaagatccacttcaagaagcacctgctgcacgtgaccagcagacccctgctggccaccaccaccgccgtggccagcccccccacccacgccgcccccctgcccgccgtgatcgccgagagcaccaccgtggacagcccccccagcagccccccccccccccccccccccgcccaggccaccaccctgagcagccccgcccccgtgaccgagcccgtggccctgccccacacccccatcaccgtgctgatggccgcccccgtgcccctgcccgtggacgtggccgtgagaagcctgaaggagccccccatcatcatcgtgcccgagagcctggaggccgacaccaagcaggacaccatcagcaacagcctggaggagcacgtgacccagatcctgaacgagcaggccgacatcagcagcaagaaggaggacagccacatcggcaaggacgaggagatccccgacagcagcaagatcagcctgagctgcaagaagaccggcagcaagaagaagagcagccagagcgagggcatcttcctgggcagcgagagcgacgaggacagcgtgagaaccagcagcagccagagaagccacgacctgaagttcagcgccagcatcgagaaggagagagacttcaagaagagcagcgcccccctgaagagcgaggacctgggcaagcccagcagaagcaagaccgacagagacgacaagtacttcagctacagcaagctggagagagacaccagatacgtgagcagcagatgcagaagcgagagagagagaagaagaagcagaagccacagcagaagcgagagaggcagcagaaccaacctgagctacagcagaagcgagagaagccactactacgacagcgacagaagataccacagaagcagcccctacagagagagaaccagatacagcagaccctacaccgacaacagagccagagagagcagcgacagcgaggaggagtacaagaagacctacagcagaagaaccagcagccacagcagcagctacagagacctgagaaccagcagctacagcaagagcgacagagactgcaagaccgagaccagctacctggagatggagagaagaggcaagtacagcagcaagctggagagagagagcaagagaaccagcgagaacgaggccatcaagagatgctgcagcccccccaacgagctgggcttcagaagaggcagcagctacagcaagcacgacagcagcgccagcagatacaagagcaccctgagcaagcccatccccaagagcgacaagttcaagaacagcttctgctgcaccgagctgaacgaggagatcaagcagagccacagcttcagcctgcagaccccctgcagcaagggcagcgagctgagaatgatcaacaagaaccccgagagagagaaggccggcagccccgcccccagcaacagactgaacgacagccccaccctgaagaagctggacgagctgcccatcttcaagagcgagttcatcacccacgacagccacgacagcatcaaggagctggacagcctgagcaaggtgaagaacgaccagctgagaagcttctgccccatcgagctgaacatcaacggcagccccggcgccgagagcgacctggccaccttctgcaccagcaagaccgacgccgtgctgatgaccagcgacgacagcgtgaccggcagcgagctgagccccctggtgaaggcctgcatgctgagcagcaacggcttccagaacatcagcagatgcaaggagaaggacctggacgacacctgcatgctgcacaagaagagcgagagccccttcagagagaccgagcccctggtgagcccccaccaggacaagctgatgagcatgcccgtgatgaccgtggactacagcaagaccgtggtgaaggagcccgtggacaccagagtgagctgctgcaagaccaaggacagcgacatctactgcaccctgaacgacagcaaccccagcctgtgcaacagcgaggccgagaacatcgagcccagcgtgatgaagatcagcagcaacagcttcatgaacgtgcacctggagagcaagcccgtgatctgcgacagcagaaacctgaccgaccacagcaagttcgcctgcgaggagtacaagcagagcatcggcagcaccagcagcgccagcgtgaaccacttcgacgacctgtaccagcccatcggcagcagcggcatcgccagcagcctgcagagcctgccccccggcatcaaggtggacagcctgaccctgctgaagtgcggcgagaacaccagccccgtgctggacgccgtgctgaagagcaagaagagcagcgagttcctgaagcacgccggcaaggagaccatcgtggaggtgggcagcgacctgcccgacagcggcaagggcttcgccagcagagagaacagaagaaacaacggcctgagcggcaagtgcctgcaggaggcccaggaggagggcaacagcatcctgcccgagagaagaggcagacccgagatcagcctggacgagagaggcgagggcggccacgtgcacaccagcgacgacagcgaggtggtgttcagcagctgcgacctgaacctgaccatggaggacagcgacggcgtgacctacgccctgaagtgcgacagcagcggccacgcccccgagatcgtgagcaccgtgcacgaggactacagcggcagcagcgagagcagcaacgacgagagcgacagcgaggacaccgacagcgacgacagcagcatccccagaaacagactgcagagcgtggtggtggtgcccaagaacagcaccctgcccatggaggagaccagcccctgcagcagcagaagcagccagagctacagacactacagcgaccactgggaggacgagagactggagagcagaagacacctgtacgaggagaagttcgagagcatcgccagcaaggcctgcccccagaccgacaagttcttcctgcacaagggcaccgagaagaaccccgagatcagcttcacccagagcagcagaaagcagatcgacaacagactgcccgagctgagccacccccagagcgacggcgtggacagcaccagccacaccgacgtgaagagcgaccccctgggccaccccaacagcgaggagaccgtgaaggccaagatccccagcagacagcaggaggagctgcccatctacagcagcgacttcgaggacgtgcccaacaagagctggcagcagaccaccttccagaacagacccgacagcagactgggcaagaccgagctgagcttcagcagcagctgcgagatcccccacgtggacggcctgcacagcagcgaggagctgagaaacctgggctgggacttcagccaggagaagcccagcaccacctaccagcagcccgacagcagctacggcgcctgcggcggccacaagtaccagcagaacgccgagcagtacggcggcaccagagactactggcagggcaacggctactgggaccccagaagcggcagaccccccggcaccggcgtggtgtacgacagaacccagggccaggtgcccgacagcctgaccgacgacagagaggaggaggagaactgggaccagcaggacggcagccacttcagcgaccagagcgacaagttcctgctgagcctgcagaaggacaagggcagcgtgcaggcccccgagatcagcagcaacagcatcaaggacaccctggccgtgaacgagaagaaggacttcagcaagaacctggagaagaacgacatcaaggacagaggccccctgaagaagagaagacaggagatcgagagcgacagcgagagcgacggcgagctgcaggacagaaagaaggtgagagtggaggtggagcagggcgagaccagcgtgccccccggcagcgccctggtgggccccagctgcgtgatggacgacttcagagacccccagagatggaaggagtgcgccaagcagggcaagatgccctgctacttcgacctgatcgaggagaacgtgtacctgaccgagagaaagaagaacaagagccacagagacatcaagagaatgcagtgcgagtgcacccccctgagcaaggacgagagagcccagggcgagatcgcctgcggcgaggactgcctgaacagactgctgatgatcgagtgcagcagcagatgccccaacggcgactactgcagcaacagaagattccagagaaagcagcacgccgacgtggaggtgatcctgaccgagaagaagggctggggcctgagagccgccaaggacctgcccagcaacaccttcgtgctggagtactgcggcgaggtgctggaccacaaggagttcaaggccagagtgaaggagtacgccagaaacaagaacatccactactacttcatggccctgaagaacgacgagatcatcgacgccacccagaagggcaactgcagcagattcatgaaccacagctgcgagcccaactgcgagacccagaagtggaccgtgaacggccagctgagagtgggcttcttcaccaccaagctggtgcccagcggcagcgagctgaccttcgactaccagttccagagatacggcaaggaggcccagaagtgcttctgcggcagcgccaactgcagaggctacctgggcggcgagaacagagtgagcatcagagccgccggcggcaagatgaagaaggagagaagcagaaagaaggacagctag

SEQ ID NO: 178183 - protein, 175 aa, Artificial Sequence
  derived and/or modified sequence
MGALVIRGIRNFNLENRAEREISKMKPSVAPRHPSTNSLLREQISLYPEVKGEIARKDEKLLSFLKDVYVDSKDPVSSLQVKAAETCQEPKEFRLPKDHHFDMINIKSIPKGKISIVEALTLLNNHKLFPETWTAEKIMQEYQLEQKDVNSLLKYFVTFEVEIFPPEDKKAIRSK

SEQ ID NO: 178184 - DNA, 528 bp, Artificial Sequence
  derived and/or modified sequence
atgggagcattagtcatccgtggcataaggaactttaaccttgagaaccgtgcggaaagggagatatccaaaatgaaaccttctgtggctccgagacatccgagcaccaactcactgctgcgggagcagatttcactttatcccgaggtgaaaggtgaaatagcccggaaagacgagaaactgttgagctttctgaaggatgtctacgtcgactcaaaagatccagtgagttccctgcaggtgaaggctgctgagacttgtcaggaaccaaaggaatttagactgcccaaggaccatcattttgacatgattaacataaagagtattcccaagggtaaaatcagcatagttgaagccctgacccttcttaacaatcacaaactgtttcccgaaacatggaccgctgaaaaaatcatgcaagagtaccaactggagcagaaagacgtcaactccctccttaagtatttcgtcaccttcgaggttgagatctttccaccagaggacaaaaaggcgattcgctccaagtag

SEQ ID NO: 178185 - DNA, 528 bp, Artificial Sequence
  derived and/or modified sequence
atgggcgccctggtgatccggggcatccggaacttcaacctggagaacagagctgagcgggagatcagcaagatgaagcccagcgtggcccccaggcaccccagcaccaacagcctgctgcgggagcagatcagcctgtacccagaggtgaagggggagatcgccaggaaggatgagaagctgctgtccttcctgaaggatgtgtatgtggacagcaaggaccctgtgagcagcctgcaggtgaaggctgctgagacctgccaggagcccaaggagttccggctgcccaaggaccaccactttgacatgatcaacatcaagagcatccccaagggcaagatcagcatcgtggaggccctgaccctgctgaacaaccacaagctgtttcctgagacctggacagctgagaagatcatgcaggagtaccagctggagcagaaggatgtgaacagcctgctgaagtactttgtgacctttgaggtggagatcttccccccagaggacaagaaggccatccgcagcaagtag

SEQ ID NO: 178186 - DNA, 2399 bp, Artificial Sequence
  derived and/or modified sequence
atgctccgggtgtcccggagttgtcctgcgccggtgttcccacgtgcggcctgaacctgagcgcataatgttatgaggagatgggagcactagtgattcgcggtatcaggaatttcaacctagagaaccgagcggaacgggaaatcagcaagatgaagccctctgtcgctcccagacacccctctaccaacagcctcctgcgagagcagattagtctctatccagaagttaaaggagagattgctcgtaaagatgaaaagctgctgtcgtttctaaaagatgtgtatgttgattccaaagatcctgtgtcttccttgcaggtaaaagctgctgaaacatgtcaagagccgaaggaattcagattgccgaaagaccatcattttgatatgataaatattaagagcattcccaaaggcaaaatttccattgtagaagcattgacacttctcaataatcataagcttttcccagaaacctggactgctgagaaaataatgcaggaataccagttagaacagaaagatgtgaattctcttcttaaatattttgttacttttgaagtcgaaatcttccctcctgaagacaagaaagcaatacgatcaaaatgaagaaaatcacagaaatttcctatgtgtactcctcatccctcctgctgtatattttctcattttttgcgtaataaattatgttaattaccaaatatttaatgctctcattgtgagggcatactcttaatatttattgagctccctgacttttcaagattgccatagaatatcttttgttttattttaatttggtttaggcatatttcataagtgcatgtcagcatgactgagcacatctgtacctttattatggtgaaagagttaatttgttattttaggcacatataccaacttttaaattggtcatattaccccttgggaaatgtcctgaatccctcaactgagttttactttccaagttaggtgtttagttcattcttctcatgcgatagtgaaagtaaaagctttcctgacccttaagactgacattttctcgttagggaaagagactcgatagcagggtagactaacagtagttcccaaataaaggcacacaggagaaaatgaatcaatagaatctaattaaaattactactccagggaataagaagtattgaggatttattttattttgaattggttttaagtatggaataattgtctttacagttataaaaagtaattagtggtgtttacaaaatgttgggaatttctgctttgacagataggtaagtcccatgggaatttctgctttgacaaatagttaagtcccatggccttcagagaggcaggaagcagaaactttcaaaaaagtaacatttctctggatttaatgtggaaatagagaaaaatttaaagaataattaaaaaaccatggtagatgaaatttggtgattacatatagtttcggatgttaatgctagttgagagaagagaaaaagatagcaagtagaagcagagaacaggatcattggaagggacctgagaaattgccatttcatccattttagcaaatttaattagcatagcatgtaccagtactaggatcttgagtgagtgtgtgagtttagctctgcctaatatattactacttgggggatctttgggagactatatcttcttggagattgagtttcttctataaaataagcataatgctaccctaaatgtaagggttatcatgaagataaataataaaggactacaaaggaccaagcaaataggaattattttttgcggtggagaaacaagtgcctggggagaatatatgaccgaagattctgtagtttatgacttaaacaggcccagaatttagtttttcaaatcctagtagtgtgttttttctgtcttgccaaaaagcagcacacctcaaagaagggaaaaggtgtgaattgtgggtatattagggttattagtgcttccgagggaagataggcatcactacttcccagagatgcccctggaaatgatatagaggatgttgaagaattcaatgtgatgacggaatgaggcatttgtagtaatgctgagaacagaaaaatggactaagtggaaaatttgtaagcatgactttgaatgtagatttgttatgtgaacaaactacctagtttatttttagttcaatacaataattgttttaagaaaacatgaaataactactcaatataaaatgcattttaaaactgtaaataagtcaaaactttattctttttatcataatggtcactagctgagtcacaaatactagtacactcttctgagccatcttctttattcatatctacattgtgtggttaggcatctgttatgtggtgtcacatgataaaataaagaacttcttcccataccatt

SEQ ID NO: 178187 - DNA, 528 bp, Artificial Sequence
  derived and/or modified sequence
atgggcgccctggtgatccggggcatccggaacttcaacctggagaatagagcagagagagaaattagtaagatgaaaccatcagttgcacccagacatccatccacgaatagcctcctgagggaacagatctccctctatccagaagtgaagggcgagattgccaggaaggacgagaagctgttgagcttcttaaaagacgtgtacgtggactctaaggatccagttagttccctgcaggtgaaggcggctgagacatgtcaggaacccaaggaattcaggctgcctaaagaccatcacttcgatatgattaacatcaaaagcatccccaagggaaaaatctcaattgtcgaagccctgaccctcctcaacaaccacaagctgttccctgaaacgtggacagcggagaagattatgcaggagtaccaactcgaacaaaaagatgtgaactcactcttgaaatacttcgtcacgttcgaggtggagatatttccaccggaggacaaaaaggcaatccgctccaagtag

SEQ ID NO: 178188 - DNA, 528 bp, Artificial Sequence
  derived and/or modified sequence
atgggcgctctggtcattcgaggcatacggaatttcaatctggaaaacagagctgaaagagaaatttcaaagatgaaaccttctgtggcacctaggcacccctccactaactccttattgcgcgagcagatatcgctgtatcccgaagttaaaggggagatagccaggaaagatgagaagctactgtcgtttctgaaggacgtctacgtcgactcaaaggaccctgtgtctagcctgcaagtcaaggcggctgagacctgccaggagccgaaagagttccgtctgcctaaggaccatcacttcgacatgataaatatcaaatctattcccaagggcaagatctctatagtcgaagcccttacattactgaacaaccacaagctgttccctgaaacttggaccgccgaaaaaatcatgcaggagtatcaacttgagcagaaggatgtcaacagcttgctaaagtactttgtaacctttgaggttgaaatttttccgcctgaggacaagaaggccatccgatctaagtag

SEQ ID NO: 178189 - DNA, 528 bp, Artificial Sequence
  derived and/or modified sequence
atgggcgccctggtgatcagaggcatcagaaacttcaacctggagaacagagccgagagagagatcagcaagatgaagcccagcgtggcccccagacaccccagcaccaacagcctgctgagagagcagatcagcctgtaccccgaggtgaagggcgagatcgccagaaaggacgagaagctgctgagcttcctgaaggacgtgtacgtggacagcaaggaccccgtgagcagcctgcaggtgaaggccgccgagacctgccaggagcccaaggagttcagactgcccaaggaccaccacttcgacatgatcaacatcaagagcatccccaagggcaagatcagcatcgtggaggccctgaccctgctgaacaaccacaagctgttccccgagacctggaccgccgagaagatcatgcaggagtaccagctggagcagaaggacgtgaacagcctgctgaagtacttcgtgaccttcgaggtggagatcttcccccccgaggacaagaaggccatcagaagcaagtag

SEQ ID NO: 178190 - protein, 270 aa, Artificial Sequence
  derived and/or modified sequence
MAASSSGEKEKERLGGGLGVAGGNSTRERLLSALEDLEVLSRELIEMLAISRNQKLLQAGEENQVLELLIHRDGEFQELMKLALNQGKIHHEMQVLEKEVEKRDSDIQQLQKQLKEAEQILATAVYQAKEKLKSIEKARKGAISSEEIIKYAHRISASNAVCAPLTWVPGDPRRPYPTDLEMRSGLLGQMNNPSTNGVNGHLPGDALAAGRLPDVLAPQYPWQSNDMSMNMLPPNHSSDFLLEPPGHNKENEDDVEIMSTDSSSSSSESD

SEQ ID NO: 178191 - protein, 224 aa, Artificial Sequence
  derived and/or modified sequence
MLAISRNQKLLQAGEENQVLELLIHRDGEFQELMKLALNQGKIHHEMQVLEKEVEKRDSDIQQLQKQLKEAEQILATAVYQAKEKLKSIEKARKGAISSEEIIKYAHRISASNAVCAPLTWVPGDPRRPYPTDLEMRSGLLGQMNNPSTNGVNGHLPGDALAAGRLPDVLAPQYPWQSNDMSMNMLPPNHSSDFLLEPPGHNKENEDDVEIMSTDSSSSSSESD

SEQ ID NO: 178192 - protein, 248 aa, Artificial Sequence
  derived and/or modified sequence
MKLLWWCDWLPERSHVFTQRELIEMLAISRNQKLLQAGEENQVLELLIHRDGEFQELMKLALNQGKIHHEMQVLEKEVEKRDSDIQQLQKQLKEAEQILATAVYQAKEKLKSIEKARKGAISSEEIIKYAHRISASNAVCAPLTWVPGDPRRPYPTDLEMRSGLLGQMNNPSTNGVNGHLPGDALAAGRLPDVLAPQYPWQSNDMSMNMLPPNHSSDFLLEPPGHNKENEDDVEIMSTDSSSSSSESD

SEQ ID NO: 178193 - protein, 238 aa, Artificial Sequence
  derived and/or modified sequence
MKLLWWCDWLPERSHVFTQRELIEMLAISRNQKLLQAGEENQVLELLIHRDGEFQELMKLALNQGKIHHEMQVLEKEVEKRDSDIQQLQKQLKEAEQILATAVYQAKEKLKSIEKARKGAISSEEIIKYAHRISASNAVCAPLTWVPGDPRRPYPTDLEMRSGLLGQMNNPSTNGVNGHLPGDALAAGRLPDVLAPQYPWQSNDMSMNMLPPNHSSDFLLEPPGHNKENEDDVEIMST

SEQ ID NO: 178194 - DNA, 813 bp, Artificial Sequence
  derived and/or modified sequence
atggccgcttcctcttctggggagaaagaaaaggagagacttggcggggggctcggcgttgccggcgggaattcaactcgcgaacgcttgttaagtgcactggaagatctagaggtcctgagtagggaactgatcgagatgctcgcaatctccagaaaccagaagctcctccaggctggagaggagaaccaagtacttgaattgctgatccatcgggacggcgagttccaagaactgatgaagctcgcgctcaaccagggaaaaatacatcatgaaatgcaggtcctagagaaggaagtggagaagcgagactcagacatccaacagctgcagaagcagttgaaggaagctgagcagattctcgccactgccgtgtatcaggccaaggagaaactgaagagcatagaaaaagcacgaaagggagccatctcatcagaggaaatcataaaatacgcccatcgcatttcggcgagtaatgccgtgtgtgctccactgacgtgggtgccgggcgatcctcgcagaccgtacccaacagaccttgagatgaggagtggactgctgggtcagatgaacaatccttcgacaaacggcgtaaatggccatctccccggcgatgctctggctgctgggcgactgcccgacgtgctagcgccacagtatccctggcagtcaaatgacatgtccatgaatatgctgccccccaaccatagcagcgacttcctactcgagccacctgggcacaacaaagagaatgaagacgatgtggagattatgagtacagatagctcctcctcgtcatctgaatccgactag

SEQ ID NO: 178195 - DNA, 747 bp, Artificial Sequence
  derived and/or modified sequence
atgaaactgctatggtggtgcgactggttgcccgagaggtcccacgtcttcacgcaacgggagctcatcgagatgttggccattagcagaaatcaaaaactactgcaggccggtgaagagaatcaggtgctagagctgctcattcatcgcgacggtgagttccaagagctcatgaagctcgcactcaaccagggtaagatccaccacgaaatgcaggtgctggagaaggaggtggagaaacgtgattctgacattcagcaattgcagaagcagctgaaggaggccgagcagatcctggctaccgccgtatatcaggctaaggagaaacttaagtcgatagagaaggctcgaaagggtgctatttcttccgaggagattattaagtacgcccaccgtatttccgccagcaacgctgtttgcgctcctttgacctgggtgcccggtgacccacgacggccctacccaaccgatcttgaaatgagatcaggcctgcttgggcagatgaacaatccttcgacaaacggggtgaatggacatctacctggagatgcactggctgcgggccgcctcccagatgtcctggctccacaatatccctggcagtctaacgacatgagtatgaacatgctaccccccaatcactcctccgattttctactagagccacccggccacaataaggagaatgaggatgacgtggaaattatgagcaccgactcaagttcctcgtccagtgagagcgattag

SEQ ID NO: 178196 - DNA, 717 bp, Artificial Sequence
  derived and/or modified sequence
atgaagttgctgtggtggtgtgattggctgccagaacgctcacatgttttcacccagcgggaattgatcgagatgttggccatctcccgtaatcagaaactgttgcaggctggtgaggagaatcaggtcctggaactgctgatacatagggatggggagttccaagagcttatgaaactggcactgaaccaaggaaagattcatcatgagatgcaggttttagaaaaagaggtcgaaaaacgtgacagcgacatccagcagctgcagaagcaactgaaggaagcggaacagatcctggccactgccgtgtaccaggcaaaggagaagcttaaaagtatcgagaaagcgaggaagggcgccatatctagcgaagaaatcattaaatacgcccacaggatctcagcgtctaatgccgtgtgcgcgcccttgacttgggtgcccggagatcctcgtaggccgtacccgacagatttggagatgcggtctggattactgggccagatgaataatccatccacaaacggcgtcaacggtcatctgccaggtgatgcattggccgctgggagattaccggatgtgctcgcaccgcagtacccttggcagagtaatgacatgtctatgaatatgttaccacccaaccactcgtctgactttttgttggagcccccagggcataataaagaaaacgaagacgacgtagagatcatgagcacatag

SEQ ID NO: 178197 - DNA, 813 bp, Artificial Sequence
  derived and/or modified sequence
atggccgccagcagcagcggggagaaggagaaggagcggctgggcggcggcctgggcgtggccggcggcaacagcacccgggagcggctgctgagcgccctggaggacctggaggtgctgagccgggagctgattgagatgctggccatcagcaggaaccagaagctgctgcaggccggggaggagaaccaggtgctggagctgctgatccacagagatggagagttccaggagctgatgaagctggccctgaaccagggcaagatccaccacgagatgcaggtgctggagaaggaggtggagaagagggacagcgacatccagcagctgcagaagcagctgaaggaggccgagcagatcctggccacagctgtgtaccaggccaaggagaagctgaagagcattgagaaggccaggaagggggccatcagcagcgaggagatcatcaagtatgcccaccgcatcagcgccagcaatgctgtgtgtgcccccctgacctgggtgcctggggacccccggcggccctaccccacagacctggagatgaggagcggcctgctgggccagatgaacaaccccagcaccaacggggtgaatggccacctgcctggagatgccctggccgccggccgcctgcctgatgtgctggccccccagtacccctggcagagcaatgacatgtccatgaacatgctgccccccaaccacagcagtgacttcctgctggagcccccaggccacaacaaggaaaatgaagatgatgtggagatcatgagcacagacagcagcagcagcagcagcgagagtgactag

SEQ ID NO: 178198 - DNA, 747 bp, Artificial Sequence
  derived and/or modified sequence
atgaagctgctgtggtggtgtgactggctgcctgagaggagccacgtgttcacccagcgggagctgattgagatgctggccatcagcaggaaccagaagctgctgcaggccggggaggagaaccaggtgctggagctgctgatccacagagatggagagttccaggagctgatgaagctggccctgaaccagggcaagatccaccacgagatgcaggtgctggagaaggaggtggagaagagggacagcgacatccagcagctgcagaagcagctgaaggaggccgagcagatcctggccacagctgtgtaccaggccaaggagaagctgaagagcattgagaaggccaggaagggggccatcagcagcgaggagatcatcaagtatgcccaccgcatcagcgccagcaatgctgtgtgtgcccccctgacctgggtgcctggggacccccggcggccctaccccacagacctggagatgaggagcggcctgctgggccagatgaacaaccccagcaccaacggggtgaatggccacctgcctggagatgccctggccgccggccgcctgcctgatgtgctggccccccagtacccctggcagagcaatgacatgtccatgaacatgctgccccccaaccacagcagtgacttcctgctggagcccccaggccacaacaaggaaaatgaagatgatgtggagatcatgagcacagacagcagcagcagcagcagcgagagtgactag

SEQ ID NO: 178199 - DNA, 717 bp, Artificial Sequence
  derived and/or modified sequence
atgaagctgctgtggtggtgtgactggctgcctgagaggagccacgtgttcacccagcgggagctgattgagatgctggccatcagcaggaaccagaagctgctgcaggccggggaggagaaccaggtgctggagctgctgatccacagagatggagagttccaggagctgatgaagctggccctgaaccagggcaagatccaccacgagatgcaggtgctggagaaggaggtggagaagagggacagcgacatccagcagctgcagaagcagctgaaggaggccgagcagatcctggccacagctgtgtaccaggccaaggagaagctgaagagcattgagaaggccaggaagggggccatcagcagcgaggagatcatcaagtatgcccaccgcatcagcgccagcaatgctgtgtgtgcccccctgacctgggtgcctggggacccccggcggccctaccccacagacctggagatgaggagcggcctgctgggccagatgaacaaccccagcaccaacggggtgaatggccacctgcctggagatgccctggccgccggccgcctgcctgatgtgctggccccccagtacccctggcagagcaatgacatgtccatgaacatgctgccccccaaccacagcagtgacttcctgctggagcccccaggccacaacaaggaaaatgaagatgatgtggagatcatgagcacctag

SEQ ID NO: 178200 - DNA, 2022 bp, Artificial Sequence
  derived and/or modified sequence
gcgccggtggcgggactctggggaaaatggctgcgtcttcgagtggtgagaaggagaaggagcggctgggaggcggtttgggagtggcgggtggtaacagcacacgagagcggctgctgtctgcgcttgaggacttggaggtcctgtctagggaacttatagaaatgctggcaatttcaagaaaccaaaagttgttacaggctggagaggaaaaccaggtcctggagttgttaattcaccgagatggggaatttcaagaactaatgaaattggcacttaatcagggaaaaattcatcatgaaatgcaagttttagaaaaagaagtagagaagagagacagtgatattcagcagctacaaaaacagctaaaggaagcagaacaaatactggcaacagctgtttaccaagcgaaggagaaactcaagtcaatagaaaaagcaagaaaaggtgctatctcctctgaagaaataattaagtatgcacataggatcagtgcaagtaatgctgtatgtgctccactgacctgggttccaggggacccccggagaccctacccaactgatttagagatgagaagtgggttactgggtcagatgaacaatccttccactaatggcgtgaatggccatttaccaggagatgcacttgcagcaggaagattgccagatgtccttgctccacagtatccatggcagtcaaatgacatgtcgatgaatatgttaccaccaaatcatagtagtgactttttgttggaacctcctgggcataataaagaaaatgaagatgatgtagagattatgtcaacggactcctcaagcagtagtagtgagtctgattgaaaaaccttaaaagacaatatacagaattgaatactgtagaattctgtttctttaacagtagcagggaaatgtaaactacaggtgacaaaaaatacccaggtaaacactggctttggtagaattgtgcagtcattaaaagtcaaaattttttgactttctttttaaagccaaagaccatagttttagttttaagccactaggtagatatttaggggaatagtcaaaatttactgttgaaaaagcagttgctatgtgctttcttaccctgttctgttccagttttgctggatttgtacatagccattctagaaatagagttgagggaaattatccatatacatatcactaataggcttcttggaattatttagaaaagcatttttaaactggcagtggatgactgaataggcatcatatttctttttgtgtgtcatttaaaagtaacaaaaactgccatttgacagtaaaggctcttggcttctgttggaggcatgggaaattgtctcaatttgtacagtttgtaattgtaatttttgtaaataaatttgtttgtacattgtatgctttttttttagtttaaatatactgtcagtgtaggtaggaaattatttctgtaaatccagttgcattttataatacttgagtgactaactgaattgaaacctattacaattaatagggttctcaaaggcctattcctattagaagaaataattttttttaataattgaaaaaatttaccacagccttgtctgattttaagaatagattgtgtgaagatttagaatggaaagcaaccatttcttcccttcaccttcctcttcttacagttccccaggagtcatttttaaccacttttaatttctgttggtaacctctgtgtttaggtaatatgcttatacaactatttcttgatgtatcagttttagacaatgtatcttctgatttcaaaggtaatacaacatttaatgtgaaacatttagtgaatacagtaaaggagaaaataaaattgttagcattctacccagagataatatcaattcatattgtagtgtagatttttttaaagttcacatacacttttttgtaaaatgagaataatgtttatttcctgagatactgctgtattttttaattgctaatctgtattcttcaaatgaactgagaattccatttttccatc

SEQ ID NO: 178201 - DNA, 931 bp, Artificial Sequence
  derived and/or modified sequence
gcacctgcgtcagctcgctctgcgcgtgcgccggtggcgggactctggggaaaatggctgcgtcttcgagtgggaacttatagaaatgctggcaatttcaagaaaccaaaagttgttacaggctggagaggaaaaccaggtcctggagttgttaattcaccgagatggggaatttcaagaactaatgaaattggcacttaatcagggaaaaattcatcatgaaatgcaagttttagaaaaagaagtagagaagagagacagtgatattcagcagctacaaaaacagctaaaggaagcagaacaaatactggcaacagctgtttaccaagcgaaggagaaactcaagtcaatagaaaaagcaagaaaaggtgctatctcctctgaagaaataattaagtatgcacataggatcagtgcaagtaatgctgtatgtgctccactgacctgggttccaggggacccccggagaccctacccaactgatttagagatgagaagtgggttactgggtcagatgaacaatccttccactaatggcgtgaatggccatttaccaggagatgcacttgcagcaggaagattgccagatgtccttgctccacagtatccatggcagtcaaatgacatgtcgatgaatatgttaccaccaaatcatagtagtgactttttgttggaacctcctgggcataataaagaaaatgaagatgatgtagagattatgtcaacggactcctcaagcagtagtagtgagtctgattgaaaaaccttaaaagacaatatacagaattgaatactgtagaattctgtttctttaacagtagcagggaaatgtaaactacaggtgacaaaaaatacccaggtaaacactggctttggtagaattgtgcagtcattaaaagtcaaaattttttgactttctttttaaagccaa

SEQ ID NO: 178202 - DNA, 1306 bp, Artificial Sequence
  derived and/or modified sequence
atgaagctgctctggtggtgtgactggcttccagaaaggtctcatgtgttcactcagagggaacttatagaaatgctggcaatttcaagaaaccaaaagttgttacaggctggagaggaaaaccaggtcctggagttgttaattcaccgagatggggaatttcaagaactaatgaaattggcacttaatcagggaaaaattcatcatgaaatgcaagttttagaaaaagaagtagagaagagagacagtgatattcagcagctacaaaaacagctaaaggaagcagaacaaatactggcaacagctgtttaccaagcgaaggagaaactcaagtcaatagaaaaagcaagaaaaggtgctatctcctctgaagaaataattaagtatgcacataggatcagtgcaagtaatgctgtatgtgctccactgacctgggttccaggggacccccggagaccctacccaactgatttagagatgagaagtgggttactgggtcagatgaacaatccttccactaatggcgtgaatggccatttaccaggagatgcacttgcagcaggaagattgccagatgtccttgctccacagtatccatggcagtcaaatgacatgtcgatgaatatgttaccaccaaatcatagtagtgactttttgttggaacctcctgggcataataaagaaaatgaagatgatgtagagattatgtcaacggactcctcaagcagtagtagtgagtctgattgaaaaaccttaaaagacaatatacagaattgaatactgtagaattctgtttctttaacagtagcagggaaatgtaaactacaggtgacaaaaaatacccaggtaaacactggctttggtagaattgtgcagtcattaaaagtcaaaattttttgactttctttttaaagccaaagaccatagttttagttttaagccactaggtagatatttaggggaatagtcaaaatttactgttgaaaaagcagttgctatgtgctttcttaccctgttctgttccagttttgctggatttgtacatagccattctagaaatagagttgagggaaattatccatatacatatcactaataggcttcttggaattatttagaaaagcatttttaaactggcagtggatgactgaataggcatcatatttctttttgtgtgtcatttaaaagtaacaaaaactgccatttgacagtaaaggctcttggcttctgttggaggcatgggaaattgtctcaatttgtacagtttgtaattgtaatttttgtaaataaatttgtttgtacattg

SEQ ID NO: 178203 - DNA, 911 bp, Artificial Sequence
  derived and/or modified sequence
cttcgagtggtgagaaggagaaggagcggctgggaggcggtttgggagtggcgggtggtaacagcacacgagagcggctgctgtctgcgcttgaggacttggaggtcctgtctagggccgggtgtggtggctcacgcctataatccgagcactttgggaggccaaggcgggcggatcattggaacttcttcacagaatgaagctgctctggtggtgtgactggcttccagaaaggtctcatgtgttcactcagagggaacttatagaaatgctggcaatttcaagaaaccaaaagttgttacaggctggagaggaaaaccaggtcctggagttgttaattcaccgagatggggaatttcaagaactaatgaaattggcacttaatcagggaaaaattcatcatgaaatgcaagttttagaaaaagaagtagagaagagagacagtgatattcagcagctacaaaaacagctaaaggaagcagaacaaatactggcaacagctgtttaccaagcgaaggagaaactcaagtcaatagaaaaagcaagaaaaggtgctatctcctctgaagaaataattaagtatgcacataggatcagtgcaagtaatgctgtatgtgctccactgacctgggttccaggggacccccggagaccctacccaactgatttagagatgagaagtgggttactgggtcagatgaacaatccttccactaatggcgtgaatggccatttaccaggagatgcacttgcagcaggaagattgccagatgtccttgctccacagtatccatggcagtcaaatgacatgtcgatgaatatgttaccaccaaatcatagtagtgactttttgttggaacctcctgggcataataaagaaaatgaagatgatgtagagattatgtcaacgg

SEQ ID NO: 178204 - DNA, 813 bp, Artificial Sequence
  derived and/or modified sequence
atggccgccagcagcagcggcgagaaggagaaggagcggctgggcggaggcctcggagtggcaggcggaaactccaccagagaaagactactgtcggctctcgaggatctcgaggtgctctccagggagctcatcgagatgttagctatctcccgtaatcagaagctgttacaagccggagaggagaaccaggtcctcgaattgctcattcacagggatggcgagttccaggaactaatgaagcttgcactaaaccagggaaaaatccaccatgaaatgcaggtgctcgagaaagaggtggaaaaacgagactccgacattcagcagctccaaaagcagctgaaggaggctgaacagattctcgccactgctgtctatcaggccaaagagaagctaaagtcaatcgagaaagcaaggaaaggagcaatcagctccgaagagatcattaagtatgctcaccgcataagcgcgagcaatgccgtctgcgctcctctgacttgggttcctggcgacccccgccggccctaccctacggacctggagatgcggtcgggactactcggtcagatgaacaatccctctaccaatggagtcaatgggcatctccctggcgacgctctcgctgccggccgacttcccgatgtgctggcaccccagtatccgtggcagtctaacgatatgagtatgaacatgctgcccccaaatcatagcagtgacttcctcctggagccccctggccataataaggaaaatgaagatgatgtggagataatgagtaccgattcttcttcttctagcagcgaatctgactag

SEQ ID NO: 178205 - DNA, 747 bp, Artificial Sequence
  derived and/or modified sequence
atgaagctgctgtggtggtgcgactggctgcccgagcggagccacgtgttcacccagagagagctgatcgagatgttggccatttctcggaaccagaagctgctacaagcgggtgaagaaaatcaggtgctcgagcttctgattcaccgagatggtgagtttcaagagttgatgaaactggccctgaaccaggggaaaattcaccacgaaatgcaggtgctggagaaggaagttgagaaaagagactccgacatccagcagctccagaagcaactcaaggaagccgagcagatactggctacggcggtataccaggccaaggaaaaattgaagagcatcgaaaaggccaggaaaggtgcaatttcctccgaagaaatcatcaagtacgctcacaggatctctgccagcaacgctgtttgcgcgcccctgacttgggtgccaggtgaccctagacgcccataccccaccgatctggaaatgagaagcggtctgctagggcaaatgaacaacccatctacaaatggcgtaaatggtcatcttccgggggacgcccttgccgctggcaggcttccggatgtcttagcccctcagtatccctggcagtctaatgatatgtccatgaatatgctaccccccaaccattcgagcgactttctgctggagccaccaggccacaataaggagaacgaggacgacgtggagatcatgtccacagatagtagctcgtcctcatcggagagcgactag

SEQ ID NO: 178206 - DNA, 717 bp, Artificial Sequence
  derived and/or modified sequence
atgaagctgctgtggtggtgcgactggctgcccgagcggagccacgtctttactcagcgcgagctcatagagatgctagccatcagtcgtaaccagaaactgctgcaagcaggagaggaaaaccaagtgttggagctcctgatccaccgtgacggggaattccaggagctgatgaagctcgccctcaaccagggaaagattcaccacgaaatgcaagtcctggagaaggaagtcgagaagcgcgactctgacattcagcagctacagaaacaactgaaggaagccgagcagatcctggccactgccgtgtatcaggccaaggaaaaactaaagtcaatcgaaaaagcgcgcaaaggagctatctctagcgaagagatcattaagtatgcacaccggatttctgcctcaaacgcagtctgcgcacctcttacatgggtgccgggagatcctaggcgcccttatcccacggatcttgagatgcggtcagggttactcgggcagatgaacaacccaagcacgaacggtgtgaatggccatctgcctggggatgctttggcagccgggaggcttcccgacgtgctcgctccacagtatccgtggcagtcaaatgacatgagtatgaacatgttgccacctaaccacagctccgatttcctcctcgagccccccgggcataataaagagaacgaagatgatgtcgagattatgagtacatag

SEQ ID NO: 178207 - DNA, 813 bp, Artificial Sequence
  derived and/or modified sequence
atggctgcctccagttccggcgagaaggaaaaagagaggttaggaggtggccttggggtcgccggaggaaattccacccgagaaaggctgctgtcagcgctcgaggacctggaggtgttgtctagagagttgatcgagatgctggcaattagtcgcaaccagaaactgctacaagccggagaggaaaaccaggtactagaactattgatacatcgtgacggggaattccaggaactgatgaagctggctttgaatcagggaaagattcatcacgagatgcaggttctggagaaggaagtcgagaaaagggatagcgatatccagcagctccagaagcagcttaaagaggccgaacagatcctggccaccgccgtctaccaagccaaagagaaactgaagtccatcgagaaggccagaaaaggtgctatctcgagcgaggagatcataaaatatgctcatagaatatcagctagtaatgccgtgtgtgctcccctcacgtgggtgcctggcgatcctcggagaccctatcccaccgacctggagatgagatctgggctgttaggacagatgaataacccgtcaactaacggtgtgaatggacacctgcctggggatgcgttggctgccggacggctacctgatgtcttggcgccacaatacccatggcaatctaatgacatgtcaatgaatatgctgcccccaaaccacagctcagactttttgctggaaccccctgggcataataaagagaacgaggacgatgtggagatcatgtctaccgactcttcatcatcctctagtgaaagtgactag

SEQ ID NO: 178208 - DNA, 747 bp, Artificial Sequence
  derived and/or modified sequence
atgaagctcttatggtggtgtgattggctgcccgagagatcacacgtgttcacacaaagggaactgatcgaaatgctcgctatatctaggaaccaaaagctgctccaagctggggaggagaaccaggttcttgagcttctgattcacagagatggggagttccaagagttaatgaagctcgctctgaaccagggtaaaattcatcatgagatgcaagtcctggaaaaggaggtggagaagagagactccgacattcagcagctccagaagcagctgaaggaggctgaacagatactcgccacagccgtataccaggccaaggagaagctgaaatccatagagaaggcccgtaaaggtgcgatttctagtgaagagattattaaatatgcccaccgcattagcgccagtaatgcagtttgcgctccgctaacgtgggtccccggagaccctcggaggccgtatcccactgatttagagatgcgctctggcttactgggacagatgaacaatcctagtacaaatggtgtgaacggtcatttaccaggcgacgccctggctgccggacgcctgccggatgtcttggcgcctcagtatccatggcagagcaacgacatgtctatgaacatgttgccccctaatcacagctcagacttcctgctggaaccccctgggcataacaaggagaatgaggatgacgttgagatcatgagtaccgattcctccagttccagctctgagtctgactag

SEQ ID NO: 178209 - DNA, 717 bp, Artificial Sequence
  derived and/or modified sequence
atgaagctgttgtggtggtgcgattggctgccagaacgctctcatgtgttcactcagagggagctcatagagatgcttgcaatatcaagaaaccaaaagcttctacaggctggcgaagaaaatcaggtgctggagctattaatccacagagatggtgaattccaagagcttatgaaattagctctgaaccaaggtaaaatccaccatgagatgcaagtactggagaaggaagttgagaagagagattccgacatacagcagttgcagaaacagctgaaagaagccgaacagattctggctaccgccgtctatcaggcaaaggaaaaattaaaatcaattgagaaggcccgtaaaggtgcgatcagcagtgaggagataatcaaatacgcacatcgcatttccgccagcaacgccgtctgcgccccactgacatgggtacccggtgacccaaggaggccatatccaacagatcttgaaatgaggagtggcctacttggacagatgaataatccttccactaatggcgtgaacggccatttgccaggggacgcgttggcggctggcaggttgcccgatgtgttggcccctcagtatccttggcagtctaacgacatgtccatgaatatgctgccccctaaccacagctcagactttttgctggagccaccagggcataataaagagaatgaggacgatgtcgagatcatgtcaacttag

SEQ ID NO: 178210 - DNA, 813 bp, Artificial Sequence
  derived and/or modified sequence
atggccgccagcagcagcggcgagaaggagaaggagagactgggcggcggcctgggcgtggccggcggcaacagcaccagagagagactgctgagcgccctggaggacctggaggtgctgagcagagagctgatcgagatgctggccatcagcagaaaccagaagctgctgcaggccggcgaggagaaccaggtgctggagctgctgatccacagagacggcgagttccaggagctgatgaagctggccctgaaccagggcaagatccaccacgagatgcaggtgctggagaaggaggtggagaagagagacagcgacatccagcagctgcagaagcagctgaaggaggccgagcagatcctggccaccgccgtgtaccaggccaaggagaagctgaagagcatcgagaaggccagaaagggcgccatcagcagcgaggagatcatcaagtacgcccacagaatcagcgccagcaacgccgtgtgcgcccccctgacctgggtgcccggcgaccccagaagaccctaccccaccgacctggagatgagaagcggcctgctgggccagatgaacaaccccagcaccaacggcgtgaacggccacctgcccggcgacgccctggccgccggcagactgcccgacgtgctggccccccagtacccctggcagagcaacgacatgagcatgaacatgctgccccccaaccacagcagcgacttcctgctggagccccccggccacaacaaggagaacgaggacgacgtggagatcatgagcaccgacagcagcagcagcagcagcgagagcgactag

SEQ ID NO: 178211 - DNA, 747 bp, Artificial Sequence
  derived and/or modified sequence
atgaagctgctgtggtggtgcgactggctgcccgagagaagccacgtgttcacccagagagagctgatcgagatgctggccatcagcagaaaccagaagctgctgcaggccggcgaggagaaccaggtgctggagctgctgatccacagagacggcgagttccaggagctgatgaagctggccctgaaccagggcaagatccaccacgagatgcaggtgctggagaaggaggtggagaagagagacagcgacatccagcagctgcagaagcagctgaaggaggccgagcagatcctggccaccgccgtgtaccaggccaaggagaagctgaagagcatcgagaaggccagaaagggcgccatcagcagcgaggagatcatcaagtacgcccacagaatcagcgccagcaacgccgtgtgcgcccccctgacctgggtgcccggcgaccccagaagaccctaccccaccgacctggagatgagaagcggcctgctgggccagatgaacaaccccagcaccaacggcgtgaacggccacctgcccggcgacgccctggccgccggcagactgcccgacgtgctggccccccagtacccctggcagagcaacgacatgagcatgaacatgctgccccccaaccacagcagcgacttcctgctggagccccccggccacaacaaggagaacgaggacgacgtggagatcatgagcaccgacagcagcagcagcagcagcgagagcgactag

SEQ ID NO: 178212 - DNA, 717 bp, Artificial Sequence
  derived and/or modified sequence
atgaagctgctgtggtggtgcgactggctgcccgagagaagccacgtgttcacccagagagagctgatcgagatgctggccatcagcagaaaccagaagctgctgcaggccggcgaggagaaccaggtgctggagctgctgatccacagagacggcgagttccaggagctgatgaagctggccctgaaccagggcaagatccaccacgagatgcaggtgctggagaaggaggtggagaagagagacagcgacatccagcagctgcagaagcagctgaaggaggccgagcagatcctggccaccgccgtgtaccaggccaaggagaagctgaagagcatcgagaaggccagaaagggcgccatcagcagcgaggagatcatcaagtacgcccacagaatcagcgccagcaacgccgtgtgcgcccccctgacctgggtgcccggcgaccccagaagaccctaccccaccgacctggagatgagaagcggcctgctgggccagatgaacaaccccagcaccaacggcgtgaacggccacctgcccggcgacgccctggccgccggcagactgcccgacgtgctggccccccagtacccctggcagagcaacgacatgagcatgaacatgctgccccccaaccacagcagcgacttcctgctggagccccccggccacaacaaggagaacgaggacgacgtggagatcatgagcacctag

SEQ ID NO: 178213 - protein, 265 aa, Artificial Sequence
  derived and/or modified sequence
MSRRRPEDGLGKAGPCVMRHHPPRSKAEVWRTLRGGGGRGELAMSGLGRLFGKGKKEKGPTPEEAIQKLKETEKILIKKQEFLEQKIQQELQTAKKYGTKNKRAALQALRRKKRFEQQLAQTDGTLSTLEFQREAIENATTNAEVLRTMELAAQSMKKAYQDMDIDKVDELMTDITEQQEVAQQISDAISRPMGFGDDVDEDELLEELEELEQEELAQELLNVGDKEEEPSVKLPSVPSTHLPAGPAPKVDEDEEALKQLAEWVS

SEQ ID NO: 178214 - DNA, 798 bp, Artificial Sequence
  derived and/or modified sequence
atgtccagaaggagacctgaagatggactcggtaaagctgggccttgcgtcatgcgccaccaccctccacgctcaaaagcggaagtatggcggaccctgcgtggggggggcggcagaggcgagctcgccatgtccggcctgggccgattgttcggcaagggaaaaaaggagaagggcccaactccggaggaggccatccagaagctcaaggagactgaaaaaattctcatcaaaaagcaggagtttctggaacagaaaatacagcaggaattacagacagccaagaaatacgggaccaagaataagcgagccgccctgcaggccctgcggagaaaaaaacggttcgaacagcaactggctcagacagatggcacattgtctaccttggagttccagcgcgaggcaattgaaaacgctaccacgaacgccgaagtcctgcggactatggaattagcggctcaatcgatgaaaaaggcataccaagatatggacatagataaagtcgatgagctaatgaccgatatcacagagcagcaggaggtggcgcagcagattagtgatgcgatctccagacccatgggcttcggagatgatgtggacgaggacgagcttcttgaggagctggaagagctggagcaagaagaactcgcacaagagctgttaaatgtgggggacaaggaggaagagccttccgttaagctcccgtctgtgcccagcacccacttgcccgctggaccagctccaaaggttgatgaggacgaagaggctctgaaacagctggccgagtgggtgtcttag

SEQ ID NO: 178215 - DNA, 798 bp, Artificial Sequence
  derived and/or modified sequence
atgagcagaagaagaccagaagatggcctgggcaaggccggcccctgtgtgatgaggcaccacccccccaggagcaaggccgaggtgtggaggaccctgcggggcggcggcggccgcggggagctggccatgagcggcctgggccgcctgtttgggaagggcaagaaggagaagggccccaccccagaggaggccatccagaagctgaaggagacagagaagatcctgatcaagaagcaggagttcctggagcagaagatccagcaggagctgcagacagccaagaagtatggcaccaagaacaagagagctgccctgcaggccctgcggaggaagaagagatttgagcagcagctggcccagacagatggcaccctgagcaccctggagttccagcgggaggccattgaaaatgccaccaccaatgctgaggtgctgcggaccatggagctggccgcccagagcatgaagaaggcctaccaggacatggacatcgacaaggtggatgagctgatgacagacatcacagagcagcaggaggtggcccagcagatcagtgatgccatcagccggcccatgggctttggagatgatgtggatgaagatgagctgctggaggagctggaggagctggagcaggaggagctggcccaggagctgctgaatgtgggggacaaggaggaggagcccagcgtgaagctgcccagcgtgcccagcacccacctgcctgctggccctgcccccaaggtggatgaagatgaggaggccctgaagcagctggccgagtgggtgtcctag

SEQ ID NO: 178216 - DNA, 798 bp, Artificial Sequence
  derived and/or modified sequence
atgagccggcggcggcccgaggacggcctgggcaaggccggcccctgtgtcatgcgtcaccatcccccaaggagcaaggcagaggtctggcgtaccctgagagggggaggtgggagaggtgagttagctatgagcggacttggtcggcttttcggaaagggaaagaaggaaaagggaccgacccccgaggaagccatccagaaactgaaggagaccgaaaagattctaataaagaagcaggaatttctcgagcagaagatccagcaagagcttcagacagcgaaaaaatatgggactaagaacaagcgggcagccctgcaagccttgagacgcaagaaacggtttgagcagcagctcgcacagacggatgggactctgagcactctcgaattccaacgagaagctattgagaatgcgaccactaacgctgaagtgctccgcactatggaacttgccgcccaatccatgaagaaagcctaccaggatatggacattgataaggtggatgagctgatgacagacatcaccgagcagcaagaggtagcccagcagattagcgatgcgatctcccgacccatgggattcggggatgacgtggacgaggatgaactccttgaggagctggaagagctcgaacaggaagaactggcccaggagctgctgaacgtcggcgacaaggaagaggagccctccgtgaagctgccatctgtgccatccacccatctcccagccggcccagcccccaaagtcgacgaagacgaagaggctctgaagcagcttgccgagtgggtgtcgtag

SEQ ID NO: 178217 - DNA, 798 bp, Artificial Sequence
  derived and/or modified sequence
atgtccaggcgcagaccagaggatggcctggggaaagccggaccctgcgttatgaggcaccatcccccaaggtctaaagccgaagtttggagaaccctgcgaggaggagggggtcgaggcgagcttgccatgagtggactgggtaggctgtttgggaaggggaagaaggaaaaggggccaacacccgaggaggccatccagaagcttaaagaaaccgaaaagattctcattaagaaacaggaatttctcgagcagaaaattcaacaagagctacagactgccaagaagtatgggaccaaaaacaagagggctgctcttcaagctttgagacggaagaaacggtttgaacagcagctcgcccagacagacggcaccctgtctacgcttgagttccagcgtgaggcgattgaaaacgctacaactaacgcagaggtattaaggaccatggagctcgccgcacagtccatgaagaaggcctaccaggatatggacatagacaaagtcgacgagctgatgacagacattacagaacagcaggaggtggcacagcagatcagcgatgctatctctcgccctatgggcttcggtgacgacgttgatgaggacgagctgttagaagaactcgaagaactcgagcaggaagagctggcccaggagttgctgaacgtgggagacaaggaagaggagccttcggtgaagctcccttctgttcctagcacacatctcccagccggacccgcaccaaaggtcgacgaggacgaggaggcgttaaaacaacttgccgagtgggtttcttag

SEQ ID NO: 178218 - DNA, 1393 bp, Artificial Sequence
  derived and/or modified sequence
atgtgagacattagactgcatcaggtttgccatctaaacttagggcaaccccaagtgcttgaacctataccaccccactttcctgagctctgtaaagagcatgaagttttcccactgaccccatacactgaggtgccatcacactgcacatttccttccggagaacaagcacgtactcaggtggagatagaactgtctttttacttaatagaaaatgatgtggcagctttaagaggagcgcgtcggtctggggctggtggcttgggtcacgtgacaccggtggtctcgtttgcgcctcttgatgtcgcggcggcgccctgaggacggattgggcaaggctggtccctgtgtgatgagacatcaccctcccaggagcaaggcggaagtctggaggacgctgaggggcggaggcgggagaggcgagctcgcgatgagtggtctcggcaggctcttcgggaaggggaagaaggagaaagggccaacccctgaagaagcaatacagaaactgaaggagacagagaagatactgatcaagaaacaggaatttttggagcagaagattcaacaggagctacaaacagccaagaagtatgggaccaagaataagagagctgccctacaggctttgcggaggaagaaaagattcgaacagcagctggcacaaactgacgggacattatccaccctggagtttcagcgtgaggccattgagaatgccactaccaatgcagaagtccttcgtaccatggagcttgctgcccaaagcatgaagaaggcctaccaggacatggacattgacaaggtagatgaactgatgactgacatcacggaacaacaggaggtggcccagcagatctcagatgccatttctcggcctatgggctttggagatgatgtggatgaggatgaactgctggaggagctagaggagctggagcaggaggaattggcccaggagttgttaaatgtgggcgacaaggaagaagaaccctcagtcaaattgcctagtgtaccttctactcatctgccggcagggccagctcccaaagtggatgaagatgaagaagcactaaagcagttggctgagtgggtatcctgataaatctgggcttgtcttcctaatgctacctttgttggtcctttcttccttaagtgccaagtgctgagctaaaggaggataactttttggggaagtcatgctgagggtggtagtgtgaccctgcctgaaaaaagggtctcttaccctcccagccctggctcaactctgaagaaggatcttgctacagaaggagcccttgggctcccttctctttgatagcagttataatgcccttgttcccaataaaactgggcagatggaatcctagtgtctatactgccttgtctacccctg

SEQ ID NO: 178219 - DNA, 798 bp, Artificial Sequence
  derived and/or modified sequence
atgagcagaagaagacccgaggacggcctgggcaaggccggcccctgcgtgatgagacaccacccccccagaagcaaggccgaggtgtggagaaccctgagaggcggcggcggcagaggcgagctggccatgagcggcctgggcagactgttcggcaagggcaagaaggagaagggccccacccccgaggaggccatccagaagctgaaggagaccgagaagatcctgatcaagaagcaggagttcctggagcagaagatccagcaggagctgcagaccgccaagaagtacggcaccaagaacaagagagccgccctgcaggccctgagaagaaagaagagattcgagcagcagctggcccagaccgacggcaccctgagcaccctggagttccagagagaggccatcgagaacgccaccaccaacgccgaggtgctgagaaccatggagctggccgcccagagcatgaagaaggcctaccaggacatggacatcgacaaggtggacgagctgatgaccgacatcaccgagcagcaggaggtggcccagcagatcagcgacgccatcagcagacccatgggcttcggcgacgacgtggacgaggacgagctgctggaggagctggaggagctggagcaggaggagctggcccaggagctgctgaacgtgggcgacaaggaggaggagcccagcgtgaagctgcccagcgtgcccagcacccacctgcccgccggccccgcccccaaggtggacgaggacgaggaggccctgaagcagctggccgagtgggtgagctag

SEQ ID NO: 178220 - protein, 101 aa, Artificial Sequence
  derived and/or modified sequence
MVCEKCEKKLGTVITPDTWKDGARNTTESGGRKLNENKALTSKKARFDPYGKNKFSTCRICKSSVHQPGSHYCQGCAYKKGICAMCGKKVLDTKNYKQTSV

SEQ ID NO: 178221 - DNA, 306 bp, Artificial Sequence
  derived and/or modified sequence
atggtgtgtgagaaatgcgagaaaaaactcggcaccgtgattaccccagacacctggaaggacggggcccgcaacacgacagaatccggtggaagaaagctgaatgaaaataaagccttgacctccaagaaagcacgcttcgacccctacggcaagaataagttttccacatgtaggatctgtaaatcatcagtccaccagcctggaagccactactgtcaaggatgcgcctataaaaagggcatctgcgccatgtgcgggaagaaagtgttggacacaaagaactacaaacagacctccgtgtag

SEQ ID NO: 178222 - DNA, 306 bp, Artificial Sequence
  derived and/or modified sequence
atggtgtgtgagaagtgtgagaagaagctgggcaccgtcatcaccccagacacctggaaggatggagccaggaacaccacagaaagtggcggcaggaagctgaatgaaaacaaggccctgaccagcaagaaggccaggtttgacccctacggcaagaacaagttcagcacctgccgcatctgcaagagctctgtgcaccagcccggcagccactactgccagggctgtgcctacaagaagggcatctgtgccatgtgtgggaagaaggtgctggacaccaagaactacaagcagacctctgtgtag

SEQ ID NO: 178223 - DNA, 306 bp, Artificial Sequence
  derived and/or modified sequence
atggtgtgcgagaagtgcgagaagaagctgggcaccgtgatcaccccagacacgtggaaagacggggcccgcaacacaacagagagtggaggaagaaagctgaacgagaacaaggcactcacttctaagaaagccaggttcgacccctacggaaaaaacaagttctccacatgtcgcatctgcaaatcctcagtccaccagcctggctctcactattgtcagggatgtgcttacaaaaagggtatatgcgctatgtgtgggaaaaaggttcttgatacaaaaaactacaaacaaacctccgtgtag

SEQ ID NO: 178224 - DNA, 1953 bp, Artificial Sequence
  derived and/or modified sequence
gggagtatgggcttagaagccggaagtgggttgacgtagcccggaaggggaatacttccaagttgtagtgttgttgttttcagcctgctgctgctgctgctgttgcggctaggggaaccgtcgtggggaaggatggtgtgcgaaaaatgtgaaaagaaacttggtactgttatcactccagatacatggaaagatggtgctaggaataccacagaaagtggtggaagaaagctgaatgaaaataaagctttgacttcaaaaaaagcaagatttgatccatatggaaagaataagttctccacttgtagaatttgtaaaagttctgtgcaccaaccaggttctcattactgccagggctgtgcctacaaaaaaggcatctgtgcgatgtgtggaaaaaaggttttggataccaaaaactacaagcaaacatctgtctagatgtattgatggaatttctggctttctaaatgattttactttctgccttgaattttcaaggcatagatgtcaacttacagaataacatgttttaagataattaagtttaaaccagagaatttgattgttactcattttgctctcatgttctaaacagcaacagtgtaactagtcttttgttgtaaatggttattttccttataagaattttaagaactaagtggcaaattccatgaaaatatttctcagttctgtatgcacttttatttaacattattcatataattctccccccaccactttatttatagatactgcaaaagtgagaaggagataatagatactttgctctgaatttggcatccagagttaacatttctcccctcactcccttgctggtgtcatagttattagaatcagcagcctcttaactaattgcggtttcataggatatataaatgtttcaagccattattgctgaatggttctttagttattaacctagacccaaatcaaagaccagttggatttatgatattttttatttgttcttgcagccaaagtgccagtttctttaatatgtgaccaagaacacaaggagcatccatatggccaaataaatacactgaattttagaaaaacatattactttgaattcaaattgtcatgaaaaccagaacagtgtttgtccatgttgcatgtaatgaaaataaatccctgctctgagaaaagctctttgaagcaaaaaccaaacttttttttttttttttttacctcctgtcttgccccctaaaagaaataaatagagcaaacatcttgactctccctttttaaaatttgtttgttttttttttttttttttggatacaagagctcactctgttgcccagggtggagtgcagaggtatcatcaggctctctgcagcctccatctgctgggctcaagcaattcttccccctcagcctcctaagtagctggggactacaggcgtgtgccactgtgctcagctagtttttatttttagtagagatgaggactcactatgttgcccaagctgttctcgaacttctgatctcaagcaatcctctggcctcagccttccgaagtgctgggatacaggtgtgagccacagaacttggcctctctcttttttttttttttttttttttttttttaacactacaggtttcaaatgaatacttttcttatgttgccttcagaggttcaggacttctgcttttaaaacctgcagcctaccgtgggaaaccaaaaaagcattccctatttccaactgcagtatgtataaatacatatcactacaaaatgtatagaaagtgtgatgagatacatgaatggcatttttattggtcataacattttgatgaaaagcatttaaagttttaactttataaggcttttcaaaatgtgtttttctgagatacattgttatttattcatatccagaaaaattacaaggataatacagaatataataaataatttatctgagagca

SEQ ID NO: 178225 - DNA, 306 bp, Artificial Sequence
  derived and/or modified sequence
atggtgtgcgaaaagtgcgaaaaaaagctgggtaccgtgatcacacctgatacttggaaggacggggcacggaataccaccgagtctggcggacgcaaacttaatgaaaataaagcactgacatcaaaaaaggcaagatttgatccgtacggcaagaataagtttagtacctgtcggatctgcaaaagtagtgtccatcagcccggttcacattactgccagggatgcgcttataaaaagggaatttgtgcgatgtgtgggaagaaagtgctggacacgaaaaattataagcagacttctgtctag

SEQ ID NO: 178226 - DNA, 306 bp, Artificial Sequence
  derived and/or modified sequence
atggtgtgcgagaagtgcgagaagaagctgggcaccgtgatcacccccgacacctggaaggacggcgccagaaacaccaccgagagcggcggcagaaagctgaacgagaacaaggccctgaccagcaagaaggccagattcgacccctacggcaagaacaagttcagcacctgcagaatctgcaagagcagcgtgcaccagcccggcagccactactgccagggctgcgcctacaagaagggcatctgcgccatgtgcggcaagaaggtgctggacaccaagaactacaagcagaccagcgtgtag

SEQ ID NO: 178227 - protein, 125 aa, Artificial Sequence
  derived and/or modified sequence
MAVADLALIPDVDIDSDGVFKYVLIRVHSAPRSGAPAAESKEIVRGYKWAEYHADIYDKVSGDMQKQGCDCECLGGGRISHQSQDKKIHVYGYSMAYGPAQHAISTEKIKAKYPDYEVTWANDGY

SEQ ID NO: 178228 - DNA, 378 bp, Artificial Sequence
  derived and/or modified sequence
atggcagtggctgacctggcgctcattcccgacgtagacattgactcagatggcgtcttcaagtatgtgctaattagggtacacagcgcgccacggtcaggcgcaccagcagctgagagtaaggaaatagtgcggggctacaaatgggctgaataccatgcggatatatacgataaggtgtctggggacatgcagaaacagggctgtgactgcgagtgcctaggggggggcaggatctctcaccagagtcaggacaaaaagatacacgtgtatggttattcaatggcctatggccctgcacagcacgctatctcaacggagaagatcaaagctaagtatcctgactacgaagtcacctgggctaacgacggctattag

SEQ ID NO: 178229 - DNA, 378 bp, Artificial Sequence
  derived and/or modified sequence
atggctgtggccgacctggccctgatcccagatgtggacatcgacagtgatggagtcttcaagtatgtgctgatccgggtgcacagcgcccccaggtctggggccccagctgctgagagcaaggagatcgtgcggggctacaagtgggccgagtaccacgccgacatctatgacaaggtgtctggggacatgcagaagcagggctgtgactgtgagtgcctgggcggcggccgcatcagccaccagagccaggacaagaagatccacgtgtatggctacagcatggcctacggccctgcccagcacgccatcagcacagagaagatcaaggccaagtacccagactatgaggtgacctgggccaatgatggctactag

SEQ ID NO: 178230 - DNA, 378 bp, Artificial Sequence
  derived and/or modified sequence
atggccgtggccgacctggccctgatccccgacgtggacatcgacagtgatggcgtctttaagtacgtgctgatccgggtgcactccgccccaaggagtggagccccagccgccgagagtaaagagatagtgaggggctacaaatgggccgagtatcatgccgacatctatgataaagtcagcggtgatatgcaaaaacagggttgcgactgtgaatgtctgggcggcggccgcatcagccaccagtcccaggataaaaaaatacacgtgtatgggtattctatggcatatggccctgcacaacatgctatatctaccgagaaaataaaggctaagtaccctgactacgaggtcacctgggcaaatgatggttactag

SEQ ID NO: 178231 - DNA, 890 bp, Artificial Sequence
  derived and/or modified sequence
ctccctcgttgccccagcctcgcgggccgcctaactgccccgttccaagggtgccaccggaccccgctggagaggaacttctccgttggctggatttcatcaccacccattcccgattccacgtttcctttaagcggggctggcggagccgcaaggcggcaaggaactggattgcgattggtcagcacgtgcctcggtcggcggtacaattggctgaggcgctgggccttgggaagcattccccgacgggattggtcgtcgctctcgcagagcccgcctcccgcagtacaagcggcccccgggtcgggtgggaggaggggactccgggaggaggaacatggcggtggcggacctcgctctcattcctgatgtggacatcgactccgacggcgtcttcaagtatgtgctgatccgagtccactcggctccccgctccggggctccggctgcagagagcaaggagatcgtgcgcggctacaagtgggctgagtaccatgcggacatctacgacaaagtgtcgggcgacatgcagaagcaaggctgcgactgtgagtgtctgggcggcgggcgcatctcccaccagagtcaggacaagaagattcacgtgtacggctattccatggcctatggtcctgcccagcacgccatttcaactgagaaaatcaaagccaagtaccccgactacgaggtcacctgggctaacgacggctactgagcactcccagcccggggcctgctgcctccagcagccacttcagagcccccgcctttgcctgcactcctcttgcagggctggccctgcctgctcctgcggcagcctctggtgacgtgctgtccaccaggccttggagacaggctagcctggccacagaattaaacgtgttgccaca

SEQ ID NO: 178232 - DNA, 378 bp, Artificial Sequence
  derived and/or modified sequence
atggccgtggccgatctggcactgatacctgatgtggacatcgacagtgacggcgtttttaagtacgttttgatcagagtccactccgcaccgcgaagcggagcccctgcagccgagagcaaagaaattgtgcggggatacaaatgggctgagtaccacgctgacatctacgacaaggtatctggcgatatgcaaaaacaggggtgcgactgtgaatgccttgggggtggcaggatctcccaccagtcacaggacaaaaagatacacgtgtacggctattcaatggcctacggtcccgcacagcatgccatcagcactgaaaagatcaaagccaaatatccggattatgaggtgacctgggcgaacgacggctattag

SEQ ID NO: 178233 - DNA, 378 bp, Artificial Sequence
  derived and/or modified sequence
atggccgtggccgacctggccctgatccccgacgtggacatcgacagcgacggcgtgttcaagtacgtgctgatcagagtgcacagcgcccccagaagcggcgcccccgccgccgagagcaaggagatcgtgagaggctacaagtgggccgagtaccacgccgacatctacgacaaggtgagcggcgacatgcagaagcagggctgcgactgcgagtgcctgggcggcggcagaatcagccaccagagccaggacaagaagatccacgtgtacggctacagcatggcctacggccccgcccagcacgccatcagcaccgagaagatcaaggccaagtaccccgactacgaggtgacctgggccaacgacggctactag

SEQ ID NO: 178234 - protein, 296 aa, Artificial Sequence [sequence omitted]

SEQ ID NO: 178235 - DNA, 891 bp, Artificial Sequence
  derived and/or modified sequence
atggccgggccgctgcaggggggtggcgctcgggccctcgatctacttcgcggcctcccccgcgtgtcgctcgccaaccttaaacccaatcccggaagtaagaaaccagagcggaggcctcggggacggcggcgggggcgcaaatgcgggcgcgggcacaagggggaaagacagaggggcacccgcccccgccttggcttcgagggggggcagactcccttttacattcgcatccctaagtatggctttaatgaggggcattcattcagacggcagtacaagcccctatcactgaaccgactacagtatctcattgatctgggacgcgtcgacccatcacaacccatcgacctgacacagctagtgaatggaaggggggtgacaattcagccactcaaacgcgattatggcgtccagctggtggaggagggcgcggatacatttactgctaaagttaacatagaggttcagctcgcaagcgaattggctattgctgctatcgaaaagaacggaggggtggttaccactgcattctacgacccccgatccctggatattgtctgcaagccagtaccatttttcttgcggggccagcccataccgaaaagaatgctgccaccagaggagctggtgccatattatacagatgccaagaaccgcggataccttgctgaccccgccaagtttccagaggcccggttggaactcgccaggaagtacgggtacatcctgcctgatataaccaaggatgaactgttcaaaatgctgtgtactagaaaagatcctcgccaaatcttttttggactagctcccggttgggtagttaacatggctgacaaaaagatcctcaagcccaccgatgaaaacctgctgaagtattacacatcctag

SEQ ID NO: 178236 - DNA, 891 bp, Artificial Sequence
  derived and/or modified sequence
atggccggccccctgcagggcggcggggcccgggccctggacctgctgcggggcctgccccgggtgtccctggccaacctgaagcccaaccctggcagcaagaagccagagcggcggccccggggcagaagaagaggaagaaaatgtggccggggccacaagggggagcggcagaggggcacccggccccggctgggctttgaaggaggccagacccccttctacatccgcatccccaagtatggcttcaatgaaggccacagcttccggcggcagtacaagcccctgagcctgaaccggctgcagtacctgattgacctgggccgggtggaccccagccagcccatcgacctgacccagctggtgaatggccggggcgtgaccatccagcccctgaagagggactatggagtgcagctggtggaggagggcgctgacaccttcaccgccaaggtgaacatcgaggtgcagctggccagcgagctggccatcgccgccatcgagaagaatggaggagtggtgaccacagccttctatgaccccaggagcctggacatcgtgtgcaagcctgtgcccttcttcctgcggggccagcccatccccaagaggatgctgcccccagaggagctggtgccctactacacagatgccaagaacagaggctacctggccgaccctgccaagtttcctgaggcccggctggagctggccaggaaatatggctacatcctgcctgacatcaccaaggatgagctgttcaagatgctgtgcaccaggaaggacccccggcagatcttcttcggcctggcccctggctgggtggtgaacatggctgacaagaagatcctgaagcccacagatgagaacctgctgaagtactacaccagctag

SEQ ID NO: 178237 - DNA, 1147 bp, Artificial Sequence
  derived and/or modified sequence
acaaagcagcccccgagaccacgtggcctccgagcagctcagggcgcccttgaaagttcttggatctgcgggttatggccggtcccttgcagggcggtggggcccgggccctggacctactccggggcctgccgcgtgtgagcctggccaacttaaagccgaatcccggctccaagaaaccggagagaagaccaagaggtcggagaagaggtagaaaatgtggcagaggccataaaggagaaaggcaaagaggaacccggccccgcttgggctttgagggaggccagactccattttacatccgaatcccaaaatacgggtttaacgaaggacatagtttcagacgccagtataagcctttgagtctcaatagactgcagtatcttattgatttgggtcgtgttgatcctagtcaacctattgacttaacccagcttgtcaatgggagaggtgtgaccatccagccacttaaaagggattatggtgtccagctggttgaggagggtgctgacacctttacggcaaaagttaatattgaagtacagttggcttcagaactagctattgctgccattgaaaaaaatggtggtgttgttactacagccttctatgatccaagaagtctggacattgtatgcaaacctgttccattctttcttcgtggacaacccattccaaaaagaatgcttccaccagaagaactggtaccatattacactgatgcaaagaaccgtgggtacctggcggatcctgccaaatttcctgaagcacgacttgaactcgccaggaagtatggttatatcttacctgatatcactaaagatgaactcttcaaaatgctctgtactaggaaggatccaaggcagattttctttggtcttgctccaggatgggtggtgaatatggccgataagaaaatcctaaaacctacagatgaaaatctccttaagtattatacctcatgaattcccgtccaaggaagcagagttgttaaagagtactggaataggggctgaaggatctatattcccttattgcattttccttatgtataattttccagatggtgatgttacttttcagtgtactcatatgtctcattttcatctaaaattaaatggcaggaaacaaggactgcatagagaaa

SEQ ID NO: 178238 - DNA, 891 bp, Artificial Sequence
  derived and/or modified sequence
atggccggccccctgcagggcggcggcgcccgggccctggacctgctgcggggactcccccgagtgagcttggctaacctgaagccgaatcctggatccaagaagccagaacgccggcccagaggacgtcggaggggaagaaagtgcggcagggggcacaagggcgagcggcagcgcggcacccgaccccgcttgggtttcgaaggaggtcagacacccttttacattaggataccaaaatacgggttcaacgaaggccactcatttaggcgccagtacaagcccttgtccctgaaccgactacaatatttaatagatctggggagagtggatccaagtcagcctatagatctgactcagctggtgaacggtcgtggggtgaccatccaacctcttaagcgagattacggtgttcaacttgtagaggagggagccgataccttcactgctaaggtcaatatcgaggtccagcttgccagcgagcttgccattgctgccatcgaaaaaaatggcggagtggtcactactgcattctatgaccctagatccctagacatagtgtgcaagcctgtgccatttttccttcgtggccagccgataccaaagaggatgctgccccccgaagagctggtaccctactatacagatgctaaaaatcgggggtatctcgctgatcctgctaaattcccagaagccagactcgagctcgcgaggaaatatggctacatcctgcccgatattacgaaagatgaactgtttaagatgctgtgcacaaggaaggatccacgccagatcttctttggcctggctcccgggtgggtggttaatatggcagataagaagatccttaaacccacggatgaaaacttgcttaaatattacacaagctag

SEQ ID NO: 178239 - DNA, 891 bp, Artificial Sequence
  derived and/or modified sequence
atggcaggcccactgcaggggggaggcgctcgcgcactggacctgcttcgaggcctgcctagagtcagcctagccaatctgaagcccaaccctgggtctaagaaaccagaaagacgcccacggggaaggcggagaggacggaaatgcgggagggggcacaaaggcgaaaggcaacgagggacacggccacggttaggcttcgaagggggtcagacaccgttctatattagaattcctaaatatggcttcaacgaggggcacagcttccgacggcagtacaagcctctttccctcaatcgccttcaatatctgatcgacctcggccgagtcgacccttctcagcccattgacttaacgcagctggtgaacggcaggggcgtgactatccagcccttgaaacgtgactacggggttcaattagtggaggagggcgcagatacgttcacggcaaaggtgaacattgaagtgcagcttgcgtcagagctggctatcgcggctatcgagaagaacggcggagtcgtgactacggccttctatgaccctcgctccctagacatcgtttgcaagccagtgcccttttttttgagagggcagcccatccccaagaggatgctcccccctgaggagctagtgccttattataccgacgccaagaatcgcggttatctggccgaccccgcaaagttcccagaagcacgactggagctcgccagaaaatacggatacatcctgcccgatattacaaaggatgagctgttcaaaatgctatgtacccgtaaagatccgaggcagatcttttttggactggcacctggttgggtggtcaatatggctgacaagaagatcctgaagccgactgatgaaaacttgcttaaatattacacaagctag

SEQ ID NO: 178240 - DNA, 891 bp, Artificial Sequence
  derived and/or modified sequence
atggccggccccctgcagggcggcggcgccagagccctggacctgctgagaggcctgcccagagtgagcctggccaacctgaagcccaaccccggcagcaagaagcccgagagaagacccagaggcagaagaagaggcagaaagtgcggcagaggccacaagggcgagagacagagaggcaccagacccagactgggcttcgagggcggccagacccccttctacatcagaatccccaagtacggcttcaacgagggccacagcttcagaagacagtacaagcccctgagcctgaacagactgcagtacctgatcgacctgggcagagtggaccccagccagcccatcgacctgacccagctggtgaacggcagaggcgtgaccatccagcccctgaagagagactacggcgtgcagctggtggaggagggcgccgacaccttcaccgccaaggtgaacatcgaggtgcagctggccagcgagctggccatcgccgccatcgagaagaacggcggcgtggtgaccaccgccttctacgaccccagaagcctggacatcgtgtgcaagcccgtgcccttcttcctgagaggccagcccatccccaagagaatgctgccccccgaggagctggtgccctactacaccgacgccaagaacagaggctacctggccgaccccgccaagttccccgaggccagactggagctggccagaaagtacggctacatcctgcccgacatcaccaaggacgagctgttcaagatgctgtgcaccagaaaggaccccagacagatcttcttcggcctggcccccggctgggtggtgaacatggccgacaagaagatcctgaagcccaccgacgagaacctgctgaagtactacaccagctag

SEQ ID NO: 178241 - protein, 197 aa, Artificial Sequence
  derived and/or modified sequence
MQRASRLKRELHMLATEPPPGITCWQDKDQMDDLRAQILGGANTPYEKGVFKLEVIIPERYPFEPPQIRFLTPIYHPNIDSAGRICLDVLKLPPKGAWRPSLNIATVLTSIQLLMSEPNPDDPLMADISSEFKYNKPAFLKNARQWTEKHARQKQKADEEEMLDNLPEAGDSRVHNSTQKRKASQLVGIEKKFHPDV

SEQ ID NO: 178242 - DNA, 594 bp, Artificial Sequence
  derived and/or modified sequence
atgcagagagccagcagactgaagagagagctgcacatgctggccaccgagcccccccccggcatcacctgctggcaggacaaggaccagatggacgacctgagagcccagatcctgggcggcgccaacaccccctacgagaagggcgtgttcaagctggaggtgatcatccccgagagataccccttcgagcccccccagatcagattcctgacccccatctaccaccccaacatcgacagcgccggcagaatctgcctggacgtgctgaagctgccccccaagggcgcctggagacccagcctgaacatcgccaccgtgctgaccagcatccagctgctgatgagcgagcccaaccccgacgaccccctgatggccgacatcagcagcgagttcaagtacaacaagcccgccttcctgaagaacgccagacagtggaccgagaagcacgccagacagaagcagaaggccgacgaggaggagatgctggacaacctgcccgaggccggcgacagcagagtgcacaacagcacccagaagagaaaggccagccagctggtgggcatcgagaagaagttccaccccgacgtgtag

SEQ ID NO: 178243 - DNA, 594 bp, Artificial Sequence
  derived and/or modified sequence
atgcaacgtgcctcaaggctcaagcgagaacttcacatgctcgcgaccgagccccctcccggcatcacctgctggcaggataaagatcagatggatgaccttagagcccagattttgggtggcgccaacaccccttacgaaaagggcgtatttaagctggaagtgatcatacccgagcgatacccatttgaaccgccacaaattaggttcctgacccctatctaccaccccaacatcgactctgcggggcgcatctgtcttgacgtacttaagctgccacccaagggcgcctggagaccctctctgaatatcgccaccgtactcacttccatccagctgctcatgagtgaaccaaatcccgacgatcccctgatggcagatatttcgtccgagtttaagtacaacaagcccgccttcttaaagaatgcacgccagtggaccgagaagcacgctcgtcagaaacagaaagcagacgaagaagagatgttggacaacttgccagaagccggggattccagggttcataactctacccagaagcggaaggcgtcccagctagtcggcattgagaaaaagttccaccccgatgtgtag

SEQ ID NO: 178244 - DNA, 594 bp, Artificial Sequence
  derived and/or modified sequence
atgcagagggccagccggctgaagcgggagctgcacatgctggccacagagcccccacctggcatcacctgctggcaggacaaggaccagatggatgacctgcgggcccagatcctgggcggggccaacaccccctatgagaagggcgtcttcaagctggaggtgatcatccctgagcgctacccctttgagcccccccagatccgcttcctgacccccatctaccaccccaacattgattctgctggccgcatctgcctggatgtgctgaagctgccccccaagggggcctggaggcccagcctgaacatcgccaccgtgctgaccagcatccagctgctgatgtctgagcccaacccagatgaccccctgatggctgacatcagcagcgagttcaagtacaacaagccagccttcctgaagaatgcccggcagtggacagagaagcacgcccggcagaagcagaaggcagatgaggaggagatgctggacaacctgcctgaggccggggacagccgggtgcacaacagcacccagaagaggaaggccagccagctggtgggcatcgagaagaagttccacccagatgtgtag

SEQ ID NO: 178245 - DNA, 594 bp, Artificial Sequence
  derived and/or modified sequence
atgcagcgggccagccggctgaagcgggagctgcacatgctggccacagaacctccaccaggcattacctgttggcaggacaaagaccaaatggatgatctgcgggcccagattcttggcggagccaataccccgtacgaaaaaggtgtgtttaagttggaggtgatcatcccagaaaggtacccatttgagcctcctcagatacggttcctgacacctatttaccaccctaatatcgactctgccggtcgcatttgtttagacgtcctgaaactcccaccaaaaggagcttggcggccttctctgaacatcgccacagtactgacctccattcagttgctgatgtcagaaccgaatccagatgatcctcttatggccgacattagctccgagttcaagtacaacaaacctgcctttctgaagaatgccagacagtggacggagaagcacgcccgccaaaaacaaaaggcagacgaggaagaaatgctggacaacctgcctgaagcaggcgacagtcgggttcacaatagtacacaaaagcgaaaggcctcccaactggtcggaattgagaagaaattccatccggacgtgtag

SEQ ID NO: 178246 - DNA, 594 bp, Artificial Sequence
  derived and/or modified sequence
atgcagagggcttccaggctcaagagagagctgcacatgctagctaccgagccacctcctggcattacttgttggcaagacaaggaccagatggacgatttgagagcgcagatcttgggaggagcaaacactccttatgagaagggcgtgttcaagcttgaggtgattattccagaaagatatccctttgagcctccccaaataagattcctgacgcccatttaccatccaaacatagattccgctgggcgaatttgcctggatgtcctgaaattgcctcctaaaggggcatggaggccctccctgaatatcgccacagtcctgactagcatccagctactgatgagcgagccaaatcctgatgacccactgatggctgacatctcatccgagttcaaatacaacaaaccagcattccttaagaacgcacgccaatggacggagaagcacgcgcgtcagaagcagaaggccgacgaggaggaaatgctggataacctgcctgaggctggggactcccgcgtacacaactccacccagaagagaaaagccagccaactcgtcggaattgaaaaaaagttccaccctgacgtgtag

SEQ ID NO: 178247 - DNA, 922 bp, Artificial Sequence
  derived and/or modified sequence
ggagccacgccaacagtcagaggtcgcgcaggcgctggtaccccgttggtccgcgcgttgctgcgttgtgaggggtgtcagctcagtgcatcccaggcagctcttagtgtggagcagtgaactgtgtgtggttccttctacttggggatcatgcagagagcttcacgtctgaagagagagctgcacatgttagccacagagccacccccaggcatcacatgttggcaagataaagaccaaatggatgacctgcgagctcaaatattaggtggagccaacacaccttatgagaaaggtgtttttaagctagaagttatcattcctgagaggtacccatttgaacctcctcagatccgatttctcactccaatttatcatccaaacattgattctgctggaaggatttgtctggatgttctcaaattgccaccaaaaggtgcttggagaccatccctcaacatcgcaactgtgttgacctctattcagctgctcatgtcagaacccaaccctgatgacccgctcatggctgacatatcctcagaatttaaatataataagccagccttcctcaagaatgccagacagtggacagagaagcatgcaagacagaaacaaaaggctgatgaggaagagatgcttgataatctaccagaggctggtgactccagagtacacaactcaacacagaaaaggaaggccagtcagctagtaggcatagaaaagaaatttcatcctgatgtttaggggacttgtcctggttcatcttagttaatgtgttctttgccaaggtgatctaagttgcctaccttgaatttttttttaaatatatttgatgacataatttttgtgtagtttatttatcttgtacatatgtattttgaaatcttttaaacctgaaaaataaatagtcatttaatgttga

SEQ ID NO: 178248 - protein, 248 aa, Artificial Sequence
  derived and/or modified sequence
MICTFLRAVQYTEKLHRSSAKRLLLPYIVLNKACLKTEPSLRCGLQYQKKTLRPRCILGVTQKTIWTQGPSPRKAKEDGSKQVSVHRSQRGGTAVPTSQKVKEAGRDFTYLIVVLFGISITGGLFYTIFKELFSSSSPSKIYGRALEKCRSHPEVIGVFGESVKGYGEVTRRGRRQHVRFTEYVKDGLKHTCVKFYIEGSEPGKQGTVYAQVKENPGSGEYDFRYIFVEIESYPRRTIIIEDNRSQDD

SEQ ID NO: 178249 - DNA, 747 bp, Artificial Sequence
  derived and/or modified sequence
atgatctgcaccttcctgagagccgtgcagtacaccgagaagctgcacagaagcagcgccaagagactgctgctgccctacatcgtgctgaacaaggcctgcctgaagaccgagcccagcctgagatgcggcctgcagtaccagaagaagaccctgagacccagatgcatcctgggcgtgacccagaagaccatctggacccagggccccagccccagaaaggccaaggaggacggcagcaagcaggtgagcgtgcacagaagccagagaggcggcaccgccgtgcccaccagccagaaggtgaaggaggccggcagagacttcacctacctgatcgtggtgctgttcggcatcagcatcaccggcggcctgttctacaccatcttcaaggagctgttcagcagcagcagccccagcaagatctacggcagagccctggagaagtgcagaagccaccccgaggtgatcggcgtgttcggcgagagcgtgaagggctacggcgaggtgaccagaagaggcagaagacagcacgtgagattcaccgagtacgtgaaggacggcctgaagcacacctgcgtgaagttctacatcgagggcagcgagcccggcaagcagggcaccgtgtacgcccaggtgaaggagaaccccggcagcggcgagtacgacttcagatacatcttcgtggagatcgagagctaccccagaagaaccatcatcatcgaggacaacagaagccaggacgactag

SEQ ID NO: 178250 - DNA, 747 bp, Artificial Sequence
  derived and/or modified sequence
atgatttgcacgttcctgagggccgtccagtacacagagaaattgcatcgctcttctgccaagcggttgctgctgccttacatagtgctgaacaaggcttgcttgaaaactgagccgagtctaagatgtgggcttcagtatcagaagaaaaccctgcgccctagatgcatcctcggagttacacagaagacaatctggacccaaggacctagccccaggaaggccaaggaagacggatccaagcaggtgtccgtgcataggtctcagcgagggggcacagctgttcccacctctcagaaggtgaaagaagccggccgcgatttcacctacctgattgtggtgttattcggaatatctattaccggcggactgttctatactatattcaaggaactctttagttctagtagcccctctaaaatctatgggagggcattggagaaatgtagatcacaccctgaggtgatcggcgtctttggggaatccgtgaagggttacggggaagtaacgagacgagggcggcgacagcatgtgcggttcaccgaatatgtgaaagacggtctgaaacacacgtgcgttaaattttacatcgaaggttctgagccaggcaagcaagggaccgtttacgctcaagtgaaagagaaccctggctctggcgaatatgacttccgttatatcttcgtggaaattgagtcatacccccgtaggacgataattattgaggacaacagatcccaggacgactag

SEQ ID NO: 178251 - DNA, 747 bp, Artificial Sequence
  derived and/or modified sequence
atgatctgcaccttcctgcgggctgtgcagtacacagagaagctgcacaggagcagcgccaagaggctgctgctgccctacatcgtgctgaacaaggcctgcctgaagacagagcccagcctgcgctgtggcctgcagtaccagaagaagaccctgcggccccgctgcatcctgggcgtgacccagaagaccatctggacccagggccccagccccaggaaggccaaggaggatggcagcaagcaggtgtctgtgcacaggagccagagaggaggaacagctgtgcccaccagccagaaggtgaaggaggccggccgggacttcacctacctgattgtggtgctgtttggcatcagcatcactggaggcctcttctacaccatcttcaaggagctgttcagcagcagcagccccagcaagatctacggccgggccctggagaagtgccgcagccaccctgaggtgattggagtgtttggagagagcgtgaagggctacggggaggtgacccggcggggccggcggcagcacgtgcgcttcacagaatatgtgaaggatggcctgaagcacacctgtgtgaagttctacatcgagggcagcgagcccgggaagcagggcaccgtgtatgcccaggtgaaggagaaccctggcagcggggagtatgacttccgctacatctttgtggagattgagagctaccccaggaggaccatcatcatcgaggacaacagaagccaggatgactag

SEQ ID NO: 178252 - DNA, 747 bp, Artificial Sequence
  derived and/or modified sequence
atgatctgcaccttcctgcgggccgtgcagtacaccgagaagctgcacagatccagcgcgaagcggttgctgctcccctatattgtcttaaataaagcttgtctcaaaacagagcctagtctcagatgcggcctccagtaccaaaaaaaaacgctacgcccacggtgcattctgggggtgacccagaagacgatatggacacaaggaccctcgcctcgaaaggcaaaagaagacggcagcaagcaggttagtgtgcaccgatcacagagaggtggaacagccgttcctacatcccagaaggtgaaagaagcaggtagagattttacataccttatagttgtgctcttcggaatctctataactggcggactgttctataccatctttaaggagcttttttccagtagcagcccttctaagatctacgggagagccttggagaaatgtcggtcacaccctgaggtgataggagtctttggggagagtgtcaaggggtatggcgaagtgacccgacgcggcagacgccaacacgtcaggttcacggagtatgtgaaggacggtttgaaacacacgtgcgtaaaattttacattgaaggatccgaacccgggaagcaagggactgtgtatgctcaggtgaaagagaaccctggttcaggcgagtatgatttccgatacatttttgtggaaatcgagtcttaccccagacgtaccattatcattgaggataataggagccaagacgattag

SEQ ID NO: 178253 - DNA, 747 bp, Artificial Sequence
  derived and/or modified sequence
atgatctgcacgttcctccgggctgtccaatatacagagaaactgcatcgctcttctgctaagcggcttttgctgccatacatcgttctgaacaaggcctgcctcaagaccgagccttccctccgctgtggtctgcagtatcagaagaaaactttacgaccacgctgtatcctaggagtaacgcaaaaaaccatctggacccaaggaccttccccccgaaaagctaaggaggacggatccaaacaggtgtccgtccaccgaagtcaacggggagggacagctgtccccacgtcacagaaagttaaagaggctggcagggacttcacttaccttatagttgtgctttttggcataagtatcaccggaggcttgttctatacaatctttaaagaacttttttctagctctagcccctcgaagatctacggcagagccctggagaagtgtcgatctcatcctgaggttattggggtgtttggagaatctgtcaagggatacggagaagtgacgcggagaggtcgaaggcagcacgtgcgtttcactgagtacgtcaaggacggcttaaagcacacctgtgttaagttttacatcgagggaagcgagcccggtaagcaaggcacagtgtatgctcaggtcaaggagaatcccggatccggcgaatacgatttcaggtacatcttcgtggagatcgagagttacccacgtagaaccataattatcgaggacaaccgcagccaagacgactag

SEQ ID NO: 178254 - DNA, 747 bp, Artificial Sequence
  derived and/or modified sequence
atgatctgtaccttcttaagggctgtgcagtatacagagaaactgcataggtcctctgccaaaaggcttctactgccatatatcgtcttgaacaaagcctgcctcaaaacggagcccagcttacgttgcggccttcagtatcaaaagaaaacgctccgaccacgttgtatcctaggagtgactcagaaaacaatttggacgcaaggcccgtctccacggaaggcaaaggaagatggttctaaacaagtgtctgtgcatcgcagtcagaggggtggtaccgctgtacccacttcgcagaaagttaaggaggctgggcgagacttcacataccttattgtagtcctgtttggtatctcaatcacgggcggacttttctatacaatttttaaggaacttttctcttcatcatcgccttctaagatctatgggagagcgttagaaaaatgccggtcccatcccgaagtaattggtgtctttggggaaagcgtcaagggatacggagaagtgactaggcgagggagacggcagcacgtgagatttaccgagtacgttaaggacggcctgaagcatacctgcgttaagttctatatcgagggatcagagccagggaaacagggaaccgtttacgcacaggtgaaagaaaacccaggatccggcgagtacgacttccgatacatcttcgtggagatcgagtcatatccccggcggacgattatcatcgaagacaatagaagtcaggatgattag

SEQ ID NO: 178255 - DNA, 747 bp, Artificial Sequence
  derived and/or modified sequence
atgatttgcacattcctgagagccgttcagtacaccgagaagctacatagatcctccgcaaagaggctgcttctgccatatattgttttgaacaaagcgtgtcttaagaccgaaccgtccctccggtgtggcctgcaatatcagaaaaaaaccttgaggccaaggtgtatcctcggagttacgcagaaaactatctggacacagggccctagtcccaggaaagctaaagaggatgggtccaaacaagtaagcgtgcacaggagtcaaagggggggcactgccgtgcctacgagccagaaagtgaaagaagctggacgggactttacatatctgattgtagtcctcttcggaatatcaataacagggggtctcttttatacgatttttaaagaactattctcttcctcttcaccctccaagatctatgggagggcactcgagaaatgcagatcccatcctgaagtaatcggcgtgtttggggagtcagttaagggctatggggaggtcaccagacgcgggcggaggcagcacgttagattcactgagtatgtaaaagacggactaaagcacacatgtgtgaagttttatattgagggctctgaaccaggaaagcagggcaccgtctacgcccaggtgaaagagaatccaggatccggagaatacgactttaggtacatttttgtcgagattgaaagctaccctaggcggaccatcatcatcgaggacaatagatctcaagacgactag

SEQ ID NO: 178256 - DNA, 1527 bp, Artificial Sequence
  derived and/or modified sequence
cgggggtttcccaggtgactttgcgaaggcatggcggggacactgtgaatgtcagcccagaaggtgatcagagcctgttaattaaaatggaaagaagacagaagggaaggtagacatcaggttctccctggagacttttcgttttcatttacgctgcggaaactgacgtttttgcctaacaccccatgtaatgtaaacgtataggcttgagtacgtgtccggccgcatgtgtagtgaaccctaaagctttcctaattgtagttagcatcgtccctaagcggaacgattttccgtgaacatgatttgtacttttctacgagccgtacagtatacggagaagctgcacaggtcctcggcaaagcgattgcttttgccatacatcgtgcttaacaaagcgtgcttgaagactgagcccagtttgagatgtgggcttcaatatcaaaagaaaacgctgcgacctagatgtattcttggagtcacccagaaaaccatctggacgcagggaccgagcccccgaaaagcaaaggaggatggcagcaaacaagtgtctgtgcacaggagtcagagagggggaaccgccgtcccaacatcacaaaaagtgaaagaagccggaagagattttacctatttaatagtggtgctttttggaatcagcattacaggtggcttgttttacacgattttcaaagaacttttttcttcatccagtcctagcaagatatatgggagagccttagaaaaatgcagatcacatcctgaggtgatcggtgtctttggtgagtctgttaaaggctatggggaggtgacaaggcggggtcgccggcagcatgtcaggttcactgaatatgtaaaagatgggctgaaacacacgtgtgtgaaattctacattgagggctctgagccagggaagcaaggaacggtgtatgcgcaagtgaaagagaacccaggaagtggtgaatatgattttcgatatatatttgtagaaattgaatcttatcctagaagaactattatcattgaagataatcgatcccaagatgattaaaatagggtttctgatggatgttgaatggcgtggactcgctactccgttcttcacagctgccttccagaatgtgttcaaaagaaagacaagaaggagtgtatggcttataaagtgaatctaatacagtatttgttgcatttaaacaaactagacattttcttacggaaaaattatgaaatacagcatattttatgttctcccattgactcaatcatgacaatatttctgctttaacaccatctttcatgattagaaatgtttgttattggaaatgttacaccatgtaaataaaggaaatagattttagtattgtattcattttatattatagaactgcataatgtctgcagaataaaattaaaactaacaaatatgtcattagcagctgccctccgcatactttggaatctgacttgagataagcatgtgaaaatggttgagggccatagggaaccagatggtaaatacattcttcaaaattg

SEQ ID NO: 178257 - RNA, 747 nt, Artificial Sequence
  derived and/or modified sequence
augaucuguaccuucuuaagggcugugcaguauacagagaaacugcauagguccucugccaaaaggcuucuacugccauauaucgucuugaacaaagccugccucaaaacggagcccagcuuacguugcggccuucaguaucaaaagaaaacgcuccgaccacguuguauccuaggagugacucagaaaacaauuuggacgcaaggcccgucuccacggaaggcaaaggaagaugguucuaaacaagugucugugcaucgcagucagaggggugguaccgcuguacccacuucgcagaaaguuaaggaggcugggcgagacuucacauaccuuauuguaguccuguuugguaucucaaucacgggcggacuuuucuauacaauuuuuaaggaacuuuucucuucaucaucgccuucuaagaucuaugggagagcguuagaaaaaugccggucccaucccgaaguaauuggugucuuuggggaaagcgucaagggauacggagaagugacuaggcgagggagacggcagcacgugagauuuaccgaguacguuaaggacggccugaagcauaccugcguuaaguucuauaucgagggaucagagccagggaaacagggaaccguuuacgcacaggugaaagaaaacccaggauccggcgaguacgacuuccgauacaucuucguggagaucgagucauauccccggcggacgauuaucaucgaagacaauagaagucaggaugauuag

SEQ ID NO: 178258 - RNA, 747 nt, Artificial Sequence
  derived and/or modified sequence
augauuugcacauuccugagagccguucaguacaccgagaagcuacauagauccuccgcaaagaggcugcuucugccauauauuguuuugaacaaagcgugucuuaagaccgaaccgucccuccgguguggccugcaauaucagaaaaaaaccuugaggccaagguguauccucggaguuacgcagaaaacuaucuggacacagggcccuagucccaggaaagcuaaagaggauggguccaaacaaguaagcgugcacaggagucaaagggggggcacugccgugccuacgagccagaaagugaaagaagcuggacgggacuuuacauaucugauuguaguccucuucggaauaucaauaacagggggucucuuuuauacgauuuuuaaagaacuauucucuuccucuucacccuccaagaucuaugggagggcacucgagaaaugcagaucccauccugaaguaaucggcguguuuggggagucaguuaagggcuauggggaggucaccagacgcgggcggaggcagcacguuagauucacugaguauguaaaagacggacuaaagcacacaugugugaaguuuuauauugagggcucugaaccaggaaagcagggcaccgucuacgcccaggugaaagagaauccaggauccggagaauacgacuuuagguacauuuuugucgagauugaaagcuacccuaggcggaccaucaucaucgaggacaauagaucucaagacgacuag

SEQ ID NO: 178259 - protein, 172 aa, Artificial Sequence
  derived and/or modified sequence
MAGSVADSDAVVKLDDGHLNNSLSSPVQADVYFPRLIVPFCGHIKGGMRPGKKVLVMGIVDLNPESFAISLTCGDSEDPPADVAIELKAVFTDRQLLRNSCISGERGEEQSAIPYFPFIPDQPFRVEILCEHPRFRVFVDGHQLFDFYHRIQTLSAIDTIKINGDLQITKLG

SEQ ID NO: 178260 - DNA, 519 bp, Artificial Sequence
  derived and/or modified sequence
atggccggcagcgtggccgacagcgacgccgtggtgaagctggacgacggccacctgaacaacagcctgagcagccccgtgcaggccgacgtgtacttccccagactgatcgtgcccttctgcggccacatcaagggcggcatgagacccggcaagaaggtgctggtgatgggcatcgtggacctgaaccccgagagcttcgccatcagcctgacctgcggcgacagcgaggacccccccgccgacgtggccatcgagctgaaggccgtgttcaccgacagacagctgctgagaaacagctgcatcagcggcgagagaggcgaggagcagagcgccatcccctacttccccttcatccccgaccagcccttcagagtggagatcctgtgcgagcaccccagattcagagtgttcgtggacggccaccagctgttcgacttctaccacagaatccagaccctgagcgccatcgacaccatcaagatcaacggcgacctgcagatcaccaagctgggctag

SEQ ID NO: 178261 - DNA, 519 bp, Artificial Sequence
  derived and/or modified sequence
atggccggctccgtggccgactctgacgccgttgtgaaactggatgacgggcatctgaacaactctctgtccagccccgtgcaggcggatgtgtactttccccgcttgatcgttcccttttgtgggcatatcaaagggggcatgcgccccggaaagaaggtgttagtaatgggcatcgtggacttgaatcctgagtcctttgccatcagcctgacttgcggggattccgaggatccaccagctgatgtcgctatcgagctcaaagccgtgtttacggataggcaactgttgcgcaactcctgcatctccggcgagcggggggaggagcagtccgccatcccttacttcccatttattcccgaccaaccatttagagttgagatcctgtgcgagcacccacgatttcgggtctttgtagatgggcaccagctgtttgacttttatcatagaatccagacattgtcagccatagatacgattaaaataaatggggacctccagataacaaaactgggctag

SEQ ID NO: 178262 - DNA, 519 bp, Artificial Sequence
  derived and/or modified sequence
atggccggctctgtggccgacagtgatgctgtggtgaagctggatgatggccacctgaacaacagcctgagcagccctgtgcaggctgatgtgtacttcccccggctgattgtgcccttctgtggccacatcaagggcggcatgaggcctgggaagaaggtgctggtgatgggcatcgtggacctgaaccctgagagctttgccatcagcctgacctgtggggacagtgaagatcctccagcagatgtggccatcgagctgaaggctgtgttcacagaccggcagctgctgaggaacagctgcatctctggagagcggggggaggagcagagcgccatcccctacttccccttcatcccagaccagcccttccgggtggagatcctgtgtgagcacccccgcttccgggtgtttgtggatggccaccagctgtttgacttctaccaccgcatccagaccctgagcgccatcgacaccatcaagatcaatggagacctgcagatcaccaagctgggctag

SEQ ID NO: 178263 - DNA, 3539 bp, Artificial Sequence
  derived and/or modified sequence
gcaggacagccccgggatccccgcccgcgcgccgcgtcccacgtaccccgccgcgccgggcaagaagatggcgggatcagtggccgacagcgatgccgtggtgaaactagatgatggccatttaaacaactctttgagctctccagttcaagcggacgtgtacttcccacgactgatagttccattttgtgggcacattaaaggtggcatgagaccaggcaagaaggtgttagtgatgggcatcgtagacctcaacccagagagctttgcaatcagcttgacctgtggggactcagaagaccctcctgccgatgtggcaatcgaactcaaagctgtgttcacagatcggcagctactcagaaattcttgtatatctggggagaggggtgaagaacagtcagcaatcccttactttccattcattccagaccagccattcagggtggaaattctttgtgagcacccacgtttccgagtgtttgtggatggacaccaactttttgatttttaccatcgcattcaaacgttatctgcaattgacaccataaagataaatggagacctccagatcaccaagcttggctgatttaaaccacctctatttcaaataggatcacgtgccacaactatctgactgttggtctggaagaagtgtcctagcaagatctggagacttaaaaagaaaacaaaaacaaatggcaagtttcacttaagggtggtttgcccttaagaagaaagctgttgggacaaagacaccgagccattatacccagaataaaataatacatttatgctggattttattcagaccaaactaaaatggatttgtgatgatttgtgatttggtagcaaattattcatcttttcaaagcaaggcaatgcttagaaacagaagtgctaaagacacttaaaaagccaacaacaacggtacagtgaaatcaatgcatttctgcactaaagtggaattgtgtagcacaaccaatattttagtcagggtatttacatagaatgtaggttgttcaaggtttgactttttttttgttttttgtttttgtttttgtttttgttttgcacagcataatgttaattcagattgttgaagctttcttgtagttatttatttatactcaatgtatgtattaaagaatgaacaatgtctcaagaacagcaagttgtaaacttttgaatgtataaatatcttaggtccaaggggagaaaattacatattacaattatgaaacaggtgaatttctgctttaaagaattgagattctccatacccctaaacttaggatctcttgatataaactgctgtaagtgcttttgggaaacctttgcaaaaccattttgataaaactgctttccaagttattgttggttatgtaaaattctatttacattgctttttctccttactgggaattagcacattattggcttccttaagactaattatttctctcttgatttatataatagctcattaagttgttattaatcaaaaacacaaagaggtgattgcttagacaatttttaaagtgactatagtataaacttttaaaagaataatatgaaaatgactgtggaatgcagtgtaaagcagaagcaaacggccctgaataacttacttggaagtaatttatatcaacttaagctgttagctcattgtataacttttcttatgtgaccctcaccaatatccctaagtaatgcctttggaagcttcagagtagaagatgcttcctactgtgttggctctgaggagatagtaggattagataggatccagattaggaaatgatccagttagtttatctgaaaggttaactcccaggactccaggtctttgaatccagccagtagagtgaatgcttccaattaagctgtaggtgttaccctgcacttacggaactgatcaaacaggtgactccaacaggaggttgcagtactgtaaacgtcaccgcaaggcaagggatgcttaaagtcctgggttctggactttaaaagctacattggccctggagggagggacccttggcattgctttgatcaggtagtgagggaagacagggttctggggtgggggtgtatttatatataatttaggttttgtttgtacagcatactgtgtcttgtaatgacacatccttgtcctgctttccttttttgagttttttttttttttttacacaacatgcagaggcactgaagtgaccatgtcattttcaagtgtcaagaatgtagacagtgtttcagtaccaaagtctaaaataaactaaaattatgaattttttataggtgatacatttggattcttctcaactttgaaactgtttagcacagttccattgtattatataagaagacactgtatccaacaagactggctgtacattgaaaagctttatgtaccagccaacttatttaaccatattcagcctgttccgtgggggctgttctgtggttccaggtattttcaagcctgtgattaacttctcatggcttgtcacttaaaagtccctaaatttgagagacttaaagggcaccttgaaatacatttgtggagttttgatccaacttatggtggaagagccccataggaagactgttttgagtggccaaccattcccacccactgcataattcagcagaaactagaggagcagggcgtgtactgattggaattgacacgcttattctgtctacctatcagctaactcattagcagccaagcccttaggcagcttagtgtgaaaatacaatgttaactgtttgtttctctgtgaggttagtgggaaccgcttggataagcctattgggattaatctaaatgatgtgatgatttgattcaggtatagcccaaattagtaaggggctttagctgtaaactgaaaacaatattcacaccctctcctgggcctgtaaggtctaaggtgagaatttcaggatggaaaatgcaatgtaaagcttccacaggaaagtattcgggtatgtaaggtgttatttctgaccagagccctagttctgcaataaccaaaaccaaggagtataaataacaatcaggctctgggggaatagaaagcaggctttagacaatctgtccatttctacagtaaaattggagtgagtgtgtatatctacttaaaacttaatagaagtgacttctactttttgggctattccagaagtattttaaaattattatttaaaattttgaagccccatttcaaatcttgccgaccttagttcaaagccccctgagagatcacttttagaattgaggatttgttaaaatggcaagtcatttcatttgtgttaaaaagaaaatacccaaaaggaaggagggagccctgtttgccttgagataaacggccttggcattttctggcattaatgtagaaataatgttcctatgatgacatattttcaaagaaacactttcttatttactgtgtggtgtaaaatgttgctaaatgtgttgttacattatgtcactgctgaaagtaatttgcactataataaaggaattttctacaaaa

SEQ ID NO: 178264 - DNA, 519 bp, Artificial Sequence
  derived and/or modified sequence
atggccggcagcgtggccgacagcgacgccgtggtgaagctggacgacgggcaccttaataactctttgtcaagccccgtgcaagctgatgtttatttcccccgcctgatcgtgccattctgcgggcacatcaagggtggaatgcgtcccggaaagaaggtactcgtgatgggcatagtggatctcaatcctgaatcatttgctatctcattgacttgcggcgacagcgaggatcccccagcagacgtagccatcgagctcaaagccgtatttacggaccgccagctgcttcggaacagctgtattagcggggagaggggcgaggaacagagcgcaatcccatactttcctttcatccctgatcagccctttcgtgtggagatattatgcgagcatccacgattcagagtatttgttgacgggcaccagctgttcgatttctaccaccgcattcagacgctctctgctatcgatacgattaagatcaatggagacctgcagataacgaaacttggatag

SEQ ID NO: 178265 - DNA, 519 bp, Artificial Sequence
  derived and/or modified sequence
atggctggctccgttgccgattctgatgctgttgtgaagctcgacgacggacacttgaacaattccctctcctcacccgtccaggccgatgtgtatttccctcggttgattgtgcccttttgcgggcacataaagggtggcatgaggcccggaaaaaaggtgctggtgatgggcatcgtggacctgaatcctgagtcttttgcaatctcactcacatgtggagatagcgaggacccccctgctgatgtggcgattgagttaaaggctgtcttcactgataggcaacttctgcgtaactcatgcatctctggagagcgaggagaagagcagtccgcaataccttatttcccttttattcctgatcagccctttagggttgagattctatgcgagcacccgcgattccgtgtgttcgtagacggccatcagctcttcgatttctaccaccgaattcaaaccctctccgccatcgatacaattaagatcaatggtgaccttcagattacaaagctgggttag

SEQ ID NO: 178266 - protein, 47 aa, Artificial Sequence
  derived and/or modified sequence
MAEVEETLKRLQSQKGVQGIIVVNTEGGWEPLGHCGDRSRPPAQGCP

SEQ ID NO: 178267 - protein, 96 aa, Artificial Sequence
  derived and/or modified sequence
MAEVEETLKRLQSQKGVQGIIVVNTEGIPIKSTMDNPTTTQYASLMHSFILKARSTVRDIDPQNDLTFLRIRSKKNEIMVAPDKDYFLIVIQNPTE

SEQ ID NO: 178268 - DNA, 144 bp, Artificial Sequence
  derived and/or modified sequence
atggccgaagtggaggagaccctgaagagactgcaaagccaaaagggcgtgcaaggtattatagtggtgaacaccgagggtggttgggagcccctgggtcattgcggagatcggtctagacctcctgctcagggctgtccctag

SEQ ID NO: 178269 - DNA, 291 bp, Artificial Sequence
  derived and/or modified sequence
atggcagaggtcgaggagactctgaagagactgcagtctcagaagggagttcagggcattattgtcgtgaataccgagggaattcctatcaagagcacaatggataacccaacaactacccagtatgcctctctcatgcactcgtttattctgaaggctagatcgaccgtgagggatattgacccacaaaatgatctgacatttctcaggatccgctctaaaaagaatgagatcatggtcgcccccgacaaggattatttcttaattgtcatacaaaaccccactgagtag

SEQ ID NO: 178270 - DNA, 144 bp, Artificial Sequence
  derived and/or modified sequence
atggccgaggtggaggagaccctgaagaggctgcagagccagaagggcgtgcagggcatcatcgtggtgaacacagaaggaggctgggagcccctgggccactgtggggacaggagccggcccccagcccagggctgcccctag

SEQ ID NO: 178271 - DNA, 291 bp, Artificial Sequence
  derived and/or modified sequence
atggccgaggtggaggagaccctgaagaggctgcagagccagaagggcgtgcagggcatcatcgtggtgaacacagagggcatccccatcaagagcaccatggacaaccccaccaccacccagtatgccagcctgatgcacagcttcatcctgaaggcccggagcacagtgcgggacatcgacccccagaatgacctgaccttcctgcgcatccgcagcaagaagaatgagatcatggtggccccagacaaggactacttcctgattgtcatccagaaccccacagaatag

SEQ ID NO: 178272 - DNA, 144 bp, Artificial Sequence
  derived and/or modified sequence
atggccgaggtggaggagaccctgaagcggctgcagagccagaagggggtacagggcattattgtggtcaataccgaaggaggatgggaacccctgggccactgcggcgacaggtcgagacccccagcgcagggctgtccttag

SEQ ID NO: 178273 - DNA, 291 bp, Artificial Sequence
  derived and/or modified sequence
atggccgaggtggaggagaccctgaagcggctgcagagccagaagggggtccagggcatcatagtggttaacactgagggtatccccataaaaagtaccatggacaaccctaccacgacacagtatgcatctctgatgcacagcttcatactgaaagcgagaagtacagtgcgcgatattgaccctcaaaacgatctgacgttcctcaggattcggtctaaaaaaaatgagatcatggtcgcccctgacaaggactacttcctgatcgtgatccagaaccctactgaatag

SEQ ID NO: 178274 - DNA, 144 bp, Artificial Sequence
  derived and/or modified sequence
atggctgaagtggaggagacattgaagcggctgcagagtcagaagggtgtgcaaggcatcatcgtcgtaaacacagaagggggatgggaaccactggggcattgcggagaccggtcccggcctcccgctcagggttgtccgtag

SEQ ID NO: 178275 - DNA, 291 bp, Artificial Sequence
  derived and/or modified sequence
atggctgaggttgaagaaacattgaaacgcctgcagagccaaaaaggggtacaggggattatcgttgtgaacactgagggcatcccaatcaagtctaccatggacaatcctacaactacccagtatgcatcacttatgcactcatttattctcaaagcgaggtcaaccgttcgggatattgatccccaaaatgacctgacttttttgcgcatcaggtctaaaaagaacgagatcatggtggccccagacaaggactactttcttattgtcattcagaatccaacggagtag

SEQ ID NO: 178276 - DNA, 144 bp, Artificial Sequence
  derived and/or modified sequence
atggccgaggtggaggagaccctgaagagactgcagagccagaagggcgtgcagggcatcatcgtggtgaacaccgagggcggctgggagcccctgggccactgcggcgacagaagcagaccccccgcccagggctgcccctag

SEQ ID NO: 178277 - DNA, 291 bp, Artificial Sequence
  derived and/or modified sequence
atggccgaggtggaggagaccctgaagagactgcagagccagaagggcgtgcagggcatcatcgtggtgaacaccgagggcatccccatcaagagcaccatggacaaccccaccaccacccagtacgccagcctgatgcacagcttcatcctgaaggccagaagcaccgtgagagacatcgacccccagaacgacctgaccttcctgagaatcagaagcaagaagaacgagatcatggtggcccccgacaaggactacttcctgatcgtgatccagaaccccaccgagtag

SEQ ID NO: 178278 - DNA, 675 bp, Artificial Sequence
  derived and/or modified sequence
cacaggactcgctaagtgttcgctacgcggggctaccggatcggtcggaaatggcagaggtggaggagacactgaagcgactgcagagccagaagggagtgcagggaatcatcgtcgtgaacacagaaggcattcccatcaagagcaccatggacaaccccaccaccacccagtatgccagcctcatgcacagcttcatcctgaaggcacggagcaccgtgcgtgacatcgacccccagaacgatctcaccttccttcgaattcgctccaagaaaaatgaaattatggttgcaccagataaagactatttcctgattgtgattcagaatccaaccgaataagccactctcttggctccctgtgtcattccttaatttaatgccccccaagaatgttaatgtcaatcatgtcagtggactagcacatggcagtcgcttggaacccactcacaccaatccagtgaccgtgtgtgggctggcggctcttctcccccaccaacggaacccctgtgtgcaccaaccttccccagagctccggagcgccctctcctcacttccaggttttggagcaagagcttgcaggaagcccgcacccagcttccttctgaccttcagttcactttgtcgcccttggagaaagctgtttttctttaactaaaaataaccaaaatgctta

SEQ ID NO: 178279 - protein, 768 aa, Artificial Sequence
  derived and/or modified sequence
MNGDSRAAVVTSPPPTTAPHKERYFDRVDENNPEYLRERNMAPDLRQDFNMMEQKKRVSMILQSPAFCEELESMIQEQFKKGKNPTGLLALQQIADFMTTNVPNVYPAAPQGGMAALNMSLGMVTPVNDLRGSDSIAYDKGEKLLRCKLAAFYRLADLFGWSQLIYNHITTRVNSEQEHFLIVPFGLLYSEVTASSLVKINLQGDIVDRGSTNLGVNQAGFTLHSAIYAARPDVKCVVHIHTPAGAAVSAMKCGLLPISPEALSLGEVAYHDYHGILVDEEEKVLIQKNLGPKSKVLILRNHGLVSVGESVEEAFYYIHNLVVACEIQVRTLASAGGPDNLVLLNPEKYKAKSRSPGSPVGEGTGSPPKWQIGEQEFEALMRMLDNLGYRTGYPYRYPALREKSKKYSDVEVPASVTGYSFASDGDSGTCSPLRHSFQKQQREKTRWLNSGRGDEASEEGQNGSSPKSKTKVWTNITHDHVKPLLQSLSSGVCVPSCITNCLWTKEDGHRTSTSAVPNLFVPLNTNPKEVQEMRNKIREQNLQDIKTAGPQSQVLCGVVMDRSLVQGELVTASKAIIEKEYQPHVIVSTTGPNPFTTLTDRELEEYRREVERKQKGSEENLDEAREQKEKSPPDQPAVPHPPPSTPIKLEEDLVPEPTTGDDSDAATFKPTLPDLSPDEPSEALGFPMLEKEEEAHRPPSPTEAPTEASPEPAPDPAPVAEEAAPSAVEEGAAADPGSDGSPGKSPSKKKKKFRTPSFLKKSKKKSDS

SEQ ID NO: 178280 - protein, 444 aa, Artificial Sequence
  derived and/or modified sequence
  misc_feature (1)..(1): Xaa can be any naturally occurring amino acid
XVLILRNHGLVSVGESVEEAFYYIHNLVVACEIQVRTLASAGGPDNLVLLNPEKYKAKSRSPGSPVGEGTGSPPKWQIGEQEFEALMRMLDNLGYRTGYPYRYPALREKSKKYSDVEVPASVTGYSFASDGDSGTCSPLRHSFQKQQREKTRWLNSGRGDEASEEGQNGSSPKSKTKVWTNITHDHVKPLLQSLSSGVCVPSCITNCLWTKEDGHRTSTSAVPNLFVPLNTNPKEVQEMRNKIREQNLQDIKTAGPQSQVLCGVVMDRSLVQGELVTASKAIIEKEYQPHVIVSTTGPNPFTTLTDRELEEYRREVERKQKGSEENLDEAREQKEKSPPDQPAVPHPPPSTPIKLEEDLVPEPTTGDDSDAATFKPTLPDLSPDEPSEALGFPMLEKEEEAHRPPSPTEAPTEASPEPAPDPAPVAEEAAPSAVEEGAAADPGS

SEQ ID NO: 178281 - DNA, 2307 bp, Artificial Sequence
  derived and/or modified sequence
atgaacggtgattctcgcgccgctgttgtgacgtcgcccccccctactaccgctccacataaagaacgctacttcgacagggtggatgaaaacaacccagaatacttgcgggaacgtaatatggcgcccgaccttcgccaggactttaatatgatggagcaaaagaagcgtgttagtatgattctgcagtcccccgcattctgcgaggagctggagtctatgatccaggagcagttcaaaaagggcaaaaaccccaccgggttattggctcttcagcaaatcgctgacttcatgactaccaatgtgccgaatgtttatccagcagcccctcagggcggtatggccgccctgaatatgagtttgggcatggtcaccccagtcaatgacctcaggggatcagactccatagcgtacgacaagggcgagaagctgttaaggtgtaaactggctgcattctaccgattagccgaccttttcggctggagccagctcatctacaaccacatcaccactcgcgtcaactcagagcaagagcacttcctgattgtgccatttggacttctctacagcgaggtcaccgcaagttcattagtgaagatcaacctgcagggtgatatagtggatagaggctctacgaacttaggagtgaatcaggccggatttacgttgcatagtgccatctatgccgcgagaccagatgtgaagtgtgtagtacatatccatactccagccggagcagctgtatctgcgatgaaatgcggtcttttgcctatctctccagaggctctcagtctgggcgaggttgcttatcacgactatcacgggattctagttgacgaggaggagaaagtgttgatccaaaagaatctgggaccaaaatcaaaagtgctcattctgcggaaccacgggctagtgtccgtgggtgaatcagtggaggaggcgttttactacattcacaacttggttgtcgcatgcgaaatccaggtgcgtacactggccagtgccggtggcccggacaatctcgtgctcctcaatccagagaagtacaaggctaagtcacgaagccctggcagtccagtgggcgagggaactggttctccgccaaaatggcagatcggagagcaggagttcgaggcattgatgcgcatgcttgacaatcttggataccgaacagggtatccttacagataccccgcccttcgggagaaatccaagaaatatagcgatgtggaagtcccggcgtcggtcaccggctacagctttgcctcagatggggactcaggcacttgttcccccctaaggcacagcttccagaagcaacaacgagaaaaaaccaggtggttgaactctggacgcggagacgaagcctcggaagaaggacaaaatggcagctctcccaaaagcaagactaaggtctggacaaatattactcacgatcatgttaagccactcttacagagcctttcatctggcgtgtgcgtgccctcctgcatcactaactgcctttggactaaagaggacggccatagaacgtccactagtgccgttccaaatctcttcgttccattgaacactaatcctaaggaggtgcaagaaatgagaaataagattcgcgagcagaacctgcaggacatcaaaacagccgggcctcagtctcaggtgctgtgcggggtagtgatggacagaagtctcgtccaaggcgagcttgtgacagcctcaaaggccatcatcgagaaggagtatcaaccccatgtcattgtgagcaccacaggccctaacccattcactacgctgaccgatcgtgaactggaagaataccgacgcgaagttgagcggaaacaaaagggatctgaggagaatttagatgaagccagggaacagaaggaaaagtcaccaccggaccagccagcggttccgcatccccctccaagcactccaattaagctggaggaggatctggtccctgaacctaccactggtgatgactctgacgctgccacttttaagcccacactcccagatttgagtcctgatgagccgagcgaagccctggggttcccaatgctcgagaaagaagaggaggcccaccggccaccatctcccaccgaggctccaacagaagctagcccagagcctgcaccagacccagcccctgttgcagaggaggccgcaccctctgccgtggaagagggggcagccgccgaccctggtagcgatggatctccagggaagtctccatcaaagaagaagaagaagttccggaccccttcctttctcaaaaaaagtaaaaagaagtccgattcttag

SEQ ID NO: 178282 - DNA, 1335 bp, Artificial Sequence
  derived and/or modified sequence
taagtcttgatccttcggaaccacgggctggtttctgttggagaatcagttgaagaggcattctattatattcacaacctggttgtcgcctgcgagatccaggtgcgcacattggcctcggccggggggcctgacaacctcgttctgttgaatcccgagaaatataaggccaagagcaggtctcctggctctcccgtgggagagggaaccggatcaccacctaagtggcagatcggggagcaggaattcgaggccttgatgagaatgctggataacctgggatatcgtaccgggtacccttataggtaccccgcccttcgggaaaagtcaaaaaagtattccgacgtggaagtgcccgcttcagtcactggttatagctttgccagcgacggggattcaggcacttgcagtccccttcgccattcctttcagaaacagcagagagaaaagacaagatggctgaatagcggaaggggggatgaggccagtgaggaaggacagaatggtagcagtccaaagagcaagacaaaggtctggacgaatatcacccatgaccacgtgaaaccactgttgcaatcacttagtagcggcgtgtgtgtaccatcatgcattactaattgtctctggaccaaagaagatggacaccgaaccagcacttctgctgttcctaatttatttgtgcccctgaacactaacccaaaggaagtccaggagatgcggaataagatcagagagcaaaacctgcaggatatcaagaccgctggaccccaaagccaggtgctctgcggcgtggtcatggataggtccctggtgcaaggggagctggtcaccgcctccaaggccatcatcgaaaaggaataccagcctcacgttatcgttagcaccacaggccctaatcccttcacaacactcacagacagggagctggaagaataccgccgtgaggtggaacgaaagcaaaaggggtcggaagaaaacctggatgaagcaagggagcagaaagaaaagtcccctccagatcagcctgccgttccccaccctccgccgagtactcctattaaactggaggaggacttggtccccgaacccactacgggagatgattcagacgctgccacttttaagcctacgctacctgatctgtcacctgatgagcccagcgaggcactggggttcccaatgcttgaaaaagaggaagaagcgcataggccgcctagccctaccgaggcgcccaccgaggcctcaccagaacctgcacccgacccggctccagtagccgaagaagctgcacccagtgccgttgaggaaggcgccgcagcagacccgggctcctag

SEQ ID NO: 178283 - DNA, 4032 bp, Artificial Sequence
  derived and/or modified sequence
gcacccaggtcgggcggtgggggcgagcggaggggctgaggggcggagaggcctggcgggccgctgctgcgggccaggggacgggggcggagccggagccggagccgacgggcggtggccgcactgggaccccggaatcccgcgcgctgcccacgattcgcttctgaggaacctagaaagattgtacaatgaatggtgattctcgtgctgcggtggtgacctcaccacccccgaccacagcccctcacaaggagaggtacttcgaccgagtagatgagaacaacccagagtacttgagggagaggaacatggcaccagaccttcgccaggacttcaacatgatggagcaaaagaagagggtgtccatgattctgcaaagccctgctttctgtgaagaattggaatcaatgatacaggagcaatttaagaaggggaagaaccccacaggcctattggcattacagcagattgcagattttatgaccacgaatgtaccaaatgtctacccagcagctccgcaaggagggatggctgccttaaacatgagtcttggtatggtgactcctgtgaacgatcttagaggatctgattctattgcgtatgacaaaggagagaagttattacggtgtaaattggcagcgttttatagactagcagatctctttgggtggtctcagcttatctacaatcatatcacaaccagagtgaactccgagcaggaacacttcctcattgtcccttttgggcttctttacagtgaagtgactgcatccagtttggttaagatcaatctacaaggagatatagtagatcgtggaagcactaatctgggagtgaatcaggccggcttcaccttacactctgcaatttatgctgcacgcccggacgtgaagtgcgtcgtgcacattcacaccccagcaggggctgcggtctctgcaatgaaatgtggcctcttgccaatctccccggaggcgctttcccttggagaagtggcttatcatgactaccatggcattctggttgatgaagaggaaaaagttttgattcagaaaaatctggggcctaaaagcaaggttcttattctccggaaccatgggctcgtgtcagttggagagagcgttgaggaggccttctattacatccataaccttgtggttgcctgtgagatccaggttcgaactctggccagtgcaggaggaccagacaacttagtcctgctgaatcctgagaagtacaaagccaagtcccgttccccagggtctccggtaggggaaggcactggatcgcctcccaagtggcagattggtgagcaggaatttgaagccctcatgcggatgctcgataatctgggctacagaactggctacccttatcgataccctgctctgagagagaagtctaaaaaatacagcgatgtggaggttcctgctagtgtcacaggttactcctttgctagtgacggtgattcgggcacttgctccccactcagacacagttttcagaagcagcagcgggagaagacaagatggctgaactctggccggggcgacgaagcttccgaggaagggcagaatggaagcagtcccaagtcgaagactaaggtgtggacgaacattacacacgatcacgtgaaacccttgctgcagtctctctcgtccggtgtctgcgtgccaagctgtattaccaactgcttgtggactaaagaggatggacatagaacttccacctctgctgtccctaacctgtttgttccattgaacactaacccaaaagaggtccaggagatgaggaacaagatccgagagcagaatttacaggacattaagacggctggccctcagtcccaggttttgtgtggtgtagtgatggacaggagcctcgtccagggagagctggtgacggcctccaaggccatcattgaaaaggagtaccagccccacgtcattgtgagcaccacgggccccaaccccttcaccacactcacagaccgtgagctggaggagtaccgcagggaggtggagaggaagcagaagggctctgaagagaatctggacgaggctagagaacagaaagaaaagagtcctccagaccagcctgcggtcccccacccgcctcccagcactcccatcaagctggaggaagaccttgtgccggagccgactactggagatgacagtgatgctgccacctttaagccaactctccccgatctgtcccctgatgaaccttcagaagcactcggcttcccaatgttagagaaggaggaggaagcccatagacccccaagccccactgaggcccctactgaggccagccccgagccagccccagacccagccccggtggctgaagaggctgccccctcagctgtcgaggagggggccgccgcggaccctggcagcgatgggtctccaggcaagtccccgtccaaaaagaagaagaagttccgtaccccgtcctttctgaagaagagcaagaagaagagtgactcctgaaagccctgcgctaacactgtcctgtccggagcgaccctggctctgccagcgtccccggccacgtctgtgctctgtccttgtgtaatggaatgcaaaaaagccaagccctccgcctagaggtcccctcacgtgaccagccccgtgtagccccgggctgacccagtgtgtgctcagcagccccaccccaccctgccccttgtcctctcagagcctcagcttctgggggagacatgctctccccacaggggggaggcactaagtcatggtcctggctggaaggtactgaaggcttctgcagctttggctgcacgtcaccctcctgagcctcacctttcctgccgtccctcctgttgtgaaatcaccacattctgtctctgcttggcttcccctccaccctaaagtctcaggtgacggactcagactcctggcttcatgtggcattctctctgctcagtgatctcacttaaatctatatacaaagccttggtcccgtgaaaacactcgtgtgcccaccagcggccttgaagaggcaggtctgggccagatgctgggcaggaaaccccagcggcagatgggcctgtgtgcacccaacgtgatgctatgcatgtctgaccgacgatccctcgaccagaatcagattcaggagctcagtttctttttcacttgggtctctggattcctgtcatagggaaggtatatcaggaggggaagaggcctttctagaattttctttgagcaggtttacaatttagcttacatttttcgactgtgaacgtgaataggctgctttttgctttcttctttccagaccccacagtagagcacttttcacttatttgggggaggcttcaggggactgttctcaccttaactcagccagaaagatgccctagttgtgatcaaaggtaactcgaggtggagggtagccctggggcccctcgacatcaccgtcattgatggagcctgaaccgtgtgctcctcggcagatgctgttgttgttacttccctccaagaggctggaaaagggctcagagctgctgagcaggaaccggagggtgacccatttcaggaggtgccggtaccagcctgactaggtacaggcaagcttgtgtgggcccaacaggcccttggtagagctggtgccagatgtgggctcagatcctgggcatgatgggccgagccacctcggatcccactgattggccagccgagcgagaaccaggctgctgcatggcactgaccgccgcttccagcttcctctgagccgcagggcctgctacgcgggcaagcgtgctgcctctcttctgtgtcgttttgttgccaaggcagaatgaaaagtccttaaccgtggactcttcctttatcccctcctttaccccacatatgcaatgacttttaattttcacttttgtagtttaatcctttgtattacaacatgaaatatagttgcatatatggacaccgacttgggaggacaggtcctgaatgtcctttctccagtgtaacatgttttactcacaaataaaattctttcagc

SEQ ID NO: 178284 - DNA, 1332 bp, Artificial Sequence
  derived and/or modified sequence
aggttcttattctccggaaccatgggctcgtgtcagttggagagagcgttgaggaggccttctattacatccataaccttgtggttgcctgtgagatccaggttcgaactctggccagtgcaggaggaccagacaacttagtcctgctgaatcctgagaagtacaaagccaagtcccgttccccagggtctccggtaggggaaggcactggatcgcctcccaagtggcagattggtgagcaggaatttgaagccctcatgcggatgctcgataatctgggctacagaactggctacccttatcgataccctgctctgagagagaagtctaaaaaatacagcgatgtggaggttcctgctagtgtcacaggttactcctttgctagtgacggtgattcgggcacttgctccccactcagacacagttttcagaagcagcagcgggagaagacaagatggctgaactctggccggggcgacgaagcttccgaggaagggcagaatggaagcagtcccaagtcgaagactaaggtgtggacgaacattacacacgatcacgtgaaacccttgctgcagtctctctcgtccggtgtctgcgtgccaagctgtattaccaactgcttgtggactaaagaggatggacatagaacttccacctctgctgtccctaacctgtttgttccattgaacactaacccaaaagaggtccaggagatgaggaacaagatccgagagcagaatttacaggacattaagacggctggccctcagtcccaggttttgtgtggtgtagtgatggacaggagcctcgtccagggagagctggtgacggcctccaaggccatcattgaaaaggagtaccagccccacgtcattgtgagcaccacgggccccaaccccttcaccacactcacagaccgtgagctggaggagtaccgcagggaggtggagaggaagcagaagggctctgaagagaatctggacgaggctagagaacagaaagaaaagagtcctccagaccagcctgcggtcccccacccgcctcccagcactcccatcaagctggaggaagaccttgtgccggagccgactactggagatgacagtgatgctgccacctttaagccaactctccccgatctgtcccctgatgaaccttcagaagcactcggcttcccaatgttagagaaggaggaggaagcccatagacccccaagccccactgaggcccctactgaggccagccccgagccagccccagacccagccccggtggctgaagaggctgccccctcagctgtcgaggagggggccgccgcggaccctggcagcg

SEQ ID NO: 178285 - DNA, 2307 bp, Artificial Sequence
  derived and/or modified sequence
atgaatggagacagcagagctgctgtggtgaccagccccccacccaccacagccccccacaaggagcgctactttgacagagtggatgagaacaaccctgagtacctgcgggagaggaacatggccccagacctgcggcaggacttcaacatgatggagcagaagaagagggtgtccatgatcctgcagagccctgccttctgtgaggagctggagagcatgatccaggagcagttcaagaagggcaagaaccccaccggcctgctggccctgcagcagattgctgacttcatgaccaccaacgtgcccaacgtgtacccagctgccccccagggcggcatggccgccctgaacatgagcctgggcatggtgacccctgtgaatgacctgcggggcagtgacagcatcgcctatgacaagggggagaagctgctgcgctgcaagctggccgccttctaccgcctggccgacctgtttggctggagccagctgatctacaaccacatcaccaccagggtgaacagcgagcaggagcacttcctgattgtgcccttcggcctgctgtacagcgaggtgacagccagcagcctggtgaagatcaacctgcagggcgacatcgtggaccggggcagcaccaacctgggcgtgaaccaggccggcttcaccctgcacagcgccatctatgctgcccggccagatgtgaagtgtgtggtgcacatccacaccccagctggagctgctgtgtctgccatgaagtgtggcctgctgcccatcagccctgaggccctgagcctgggggaggtggcctaccatgactaccacggcatcctggtggatgaggaggagaaggtgctgatccagaagaacctgggccccaagagcaaggtgctgatcctgaggaaccacggcctggtgtctgtgggggagagcgtggaggaggccttctactacatccacaacctggtggtggcctgtgagatccaggtgaggaccctggccagcgctgggggccctgacaacctggtgctgctgaaccctgagaagtacaaggccaagagccgcagccctggcagccctgtgggggagggcaccggcagcccccccaagtggcagatcggggagcaggagtttgaggccctgatgaggatgctggacaacctgggctacagaacaggctacccctaccgctacccagccctgcgggagaagagcaagaagtacagtgatgtggaggtgcctgcctctgtgacaggctacagctttgccagtgatggagacagcggcacctgcagccccctgcggcacagcttccagaagcagcagcgggagaagacccgctggctgaacagcggcagaggagatgaggccagcgaggagggccagaatggcagcagccccaagagcaagaccaaggtgtggaccaacatcacccatgaccacgtgaagcccctgctgcagagcctgagcagcggcgtgtgtgtgcccagctgcatcaccaactgcctgtggaccaaggaggatggccacaggaccagcaccagcgctgtgcccaacctgtttgtgcccctgaacaccaaccccaaggaggtgcaggagatgaggaacaagatccgggagcagaacctgcaggacatcaagacagctggcccccagagccaggtgctgtgtggggtggtgatggacaggagcctggtgcagggcgagctggtgacagccagcaaggccatcatcgagaaggagtaccagccccacgtgattgtgtccaccaccggccccaaccccttcaccaccctgacagaccgggagctggaggagtacagaagagaggtggagaggaagcagaagggcagcgaggagaacctggatgaggcccgggagcagaaggagaagagccccccagaccagcctgctgtgccccaccccccacccagcacccccatcaagctggaggaggacctggtgcctgagcccaccactggagatgacagtgatgctgccaccttcaagcccaccctgcctgacctgagcccagatgagcccagcgaggccctgggcttccccatgctggagaaggaggaggaggcccaccggccccccagccccacagaggcccccacagaggccagccctgagcccgccccagaccctgcccctgtggccgaggaggccgcccccagcgctgtggaggagggcgctgctgctgaccccggcagtgatggcagccctgggaagagccccagcaagaagaagaagaagttccgcacccccagcttcctgaagaagagcaagaagaagagtgacagctag

SEQ ID NO: 178286 - DNA, 1335 bp, Artificial Sequence
  derived and/or modified sequence
tgagtgctgatcctgaggaaccacggcctggtgtctgtgggggagagcgtggaggaggccttctactacatccacaacctggtggtggcctgtgagatccaggtgaggaccctggccagcgctgggggccctgacaacctggtgctgctgaaccctgagaagtacaaggccaagagccgcagccctggcagccctgtgggggagggcaccggcagcccccccaagtggcagatcggggagcaggagtttgaggccctgatgaggatgctggacaacctgggctacagaacaggctacccctaccgctacccagccctgcgggagaagagcaagaagtacagtgatgtggaggtgcctgcctctgtgacaggctacagctttgccagtgatggagacagcggcacctgcagccccctgcggcacagcttccagaagcagcagcgggagaagacccgctggctgaacagcggcagaggagatgaggccagcgaggagggccagaatggcagcagccccaagagcaagaccaaggtgtggaccaacatcacccatgaccacgtgaagcccctgctgcagagcctgagcagcggcgtgtgtgtgcccagctgcatcaccaactgcctgtggaccaaggaggatggccacaggaccagcaccagcgctgtgcccaacctgtttgtgcccctgaacaccaaccccaaggaggtgcaggagatgaggaacaagatccgggagcagaacctgcaggacatcaagacagctggcccccagagccaggtgctgtgtggggtggtgatggacaggagcctggtgcagggcgagctggtgacagccagcaaggccatcatcgagaaggagtaccagccccacgtgattgtgtccaccaccggccccaaccccttcaccaccctgacagaccgggagctggaggagtacagaagagaggtggagaggaagcagaagggcagcgaggagaacctggatgaggcccgggagcagaaggagaagagccccccagaccagcctgctgtgccccaccccccacccagcacccccatcaagctggaggaggacctggtgcctgagcccaccactggagatgacagtgatgctgccaccttcaagcccaccctgcctgacctgagcccagatgagcccagcgaggccctgggcttccccatgctggagaaggaggaggaggcccaccggccccccagccccacagaggcccccacagaggccagccctgagcccgccccagaccctgcccctgtggccgaggaggccgcccccagcgctgtggaggagggcgctgctgctgaccccggcagctag

SEQ ID NO: 178287 - DNA, 2307 bp, Artificial Sequence
  derived and/or modified sequence
atgaacggcgacagccgggccgccgtggtgaccagccccccccccactacggcgcctcataaggagcgatacttcgaccgcgtcgacgagaacaacccagagtacctccgtgagcgcaacatggctcccgacctgcgtcaggactttaatatgatggagcaaaaaaagagggtaagcatgattctgcagtcaccagcgttttgtgaagagctggaatccatgatccaggagcagtttaagaaggggaaaaaccccactggactgttagcactccagcagatcgccgacttcatgacgacaaatgtacctaacgtttacccagccgcccctcagggcggtatggctgccctcaatatgtcgctcggcatggtaacccctgtgaatgatctaagaggctccgattccattgcctacgacaagggcgagaagcttctccggtgtaaactcgccgccttttacagactcgcagatctgtttggctggagtcaactgatttacaaccacatcactacccgggtgaacagcgagcaggaacattttctgattgtcccctttggcctgctttactccgaagtcaccgccagctccctcgtgaagataaaccttcagggggatatcgtcgatcgggggtcgacgaatctcggagtgaaccaagcaggattcaccctccactcagccatctacgcagcgcggccggatgtgaagtgcgtggtccacatccacacaccagctggcgctgccgtcagtgcgatgaaatgcggcctgctgccaatttctcccgaagccctgtctctgggagaggttgcataccatgactaccacgggattctggtggatgaagaggagaaggtgctgatacaaaagaacctgggccccaagagcaaggtgctcatactcaggaatcacggcctggtcagcgttggagaatctgtggaagaggccttttactacatccacaacttagtggttgcttgcgaaattcaggtgagaactcttgcttctgcaggcgggcctgacaacctcgtactgctcaatcccgagaagtacaaagcgaagtcccgctcacctgggagtcctgtaggcgaaggcacaggatccccacctaagtggcagatcggtgagcaggagtttgaagcgctcatgaggatgctggacaatctgggctatcggacgggctacccatatcggtaccccgctcttcgggagaaatccaagaaatattctgatgttgaagttcccgcttccgtcaccgggtacagctttgcctctgatggcgactcaggaacatgctctccactccggcattcctttcagaaacagcagagggaaaagacacggtggctgaattcaggccgcggggacgaggcttcagaggaggggcaaaacggctccagtccaaagtccaaaacaaaagtgtggaccaacattactcacgatcacgtaaaacccctgctgcaatcccttagttcaggagtttgtgttccttcttgcatcacaaattgtctgtggacaaaagaggacggtcataggacaagcacctctgctgtgccgaatttgtttgtcccgctgaacacaaacccaaaagaggtgcaggaaatgaggaacaaaattcgggaacagaacttgcaggacatcaagactgcaggcccccagagtcaggttctgtgtggtgtggtgatggataggtcccttgtccagggcgagctggtcaccgccagcaaggctatcattgaaaaggagtaccagccacacgtcatcgtatcaacaaccggccctaaccccttcactactctgactgatagagagctcgaagaatacaggcgggaggtcgagcgaaaacagaaaggcagtgaagagaacctggatgaggctagggagcagaaggagaagagccccccagaccagcccgccgtgcctcacccacctccatctacccccataaaactggaggaagacctggtgcccgagccaactacaggcgatgactctgacgctgcgaccttcaagcctaccctgccagacctgagccccgacgaaccatccgaagccctggggttcccaatgctggaaaaagaagaagaggcacataggcccccgagccctactgaagcccccacagaagcaagtcccgaacctgctccggatcccgctcccgtggcggaggaagcagccccttctgccgtggaagagggcgctgccgccgacccgggatctgacgggagcccggggaagtcaccaagtaaaaaaaaaaagaagttcaggaccccaagttttctcaaaaagtcaaagaagaagtccgatagttag

SEQ ID NO: 178288 - DNA, 1335 bp, Artificial Sequence
  derived and/or modified sequence
tgagtgctgatcctgcggaaccacggcctggtgagcgtgggcgagtctgtcgaggaagctttctactatatccataatctggtcgtggcatgcgagatacaagtccgcacactcgcatccgctggcggaccggataacctggtgctcctgaatccggagaagtataaggcgaagtctagatcacctgggtcgccggttggagaaggtacgggctccccccctaagtggcagataggagaacaagagtttgaagcattgatgagaatgttggataaccttgggtaccgaacgggatatccctaccggtaccccgcattgcgggaaaaatctaagaagtattctgatgtagaggttcccgcaagtgtcaccggatactccttcgcctctgacggggactctgggacatgcagcccgttaagacacagctttcagaagcagcagagagagaagaccagatggctcaattcaggtcggggcgatgaggccagtgaagagggccagaatggcagtagcccgaagtccaaaaccaaggtgtggacaaacatcacccacgatcacgtgaagcctctgctgcagtctctcagctcaggagtgtgcgtgccttcctgcatcaccaactgtctgtggaccaaagaggacggacaccggacgtccacctccgcagtcccaaacctcttcgttcctttgaacactaaccccaaagaggtgcaagaaatgagaaacaaaattcgggaacagaacctgcaggatattaagactgccggaccacagtctcaagtgttatgtggcgttgtaatggaccggtcacttgtccagggggagttagttaccgcatccaaagccatcatcgagaaggaatatcagccccacgtgatcgtgagcacaactggcccaaacccctttactactctgacggaccgcgaacttgaggagtaccggagggaggtggagcgtaaacagaaaggctcggaagaaaatctagacgaggcccgtgagcagaaggagaaaagtcctcctgaccagcctgccgtacctcacccgcccccgtccacacccatcaagctggaagaagatctcgttccggaacccaccactggcgatgatagtgatgctgccaccttcaagccgacccttccagatctgtctcccgatgaacctagcgaagcgctcggcttcccaatgcttgagaaagaggaagaagctcacaggcccccgagtcccaccgaagccccaactgaggcttcgccggaacccgccccagatccagcccctgtcgccgaagaggccgctccttcagcagttgaggaaggtgccgccgccgatcccggctcatag

SEQ ID NO: 178289 - DNA, 2307 bp, Artificial Sequence
  derived and/or modified sequence
atgaatggcgactctcgagcagcagtggtgacaagcccccctcccaccaccgcccctcataaggaacggtacttcgatcgtgtggatgaaaacaaccccgagtacctgagggagagaaacatggctccggacctcaggcaggattttaacatgatggaacagaagaaaagggtgtccatgatcctgcagtcccccgcattctgtgaagagctcgagagtatgatccaggaacagtttaaaaagggtaagaatcctaccggattgctggcactgcagcagatagccgatttcatgactacaaatgtgcctaacgtttaccccgcagcccctcagggcggtatggccgctctgaacatgagtctcggcatggtgacccctgtgaatgatcttcggggatccgacagcatagcttacgataagggagagaagctacttaggtgtaaactggccgcattttacaggctggctgacctgttcggatggagccagttgatctacaatcatattactacaagagtgaactcagagcaggagcactttcttatcgttcctttcggcctgttgtacagcgaagtgaccgcatcaagtctggtgaagattaatctgcaaggggatattgtggaccgtggttcgacaaacctgggcgtcaaccaggccggatttacgctgcattccgccatctacgctgctaggccagacgtcaaatgcgttgtccatattcacacacccgcaggcgctgccgtcagcgctatgaagtgtgggctgctgcctatttcccctgaggccctaagtctgggagaggtggcttaccacgactatcacggaatattggttgacgaggaagagaaggtactgattcagaagaacctgggcccaaaaagcaaagtcttgatcctgcgcaaccatggtcttgtgagcgtgggcgaaagtgtcgaagaagcattctattatattcacaacctggtagtagcctgcgaaattcaggtgcgtaccctggccagtgctggtgggcctgataaccttgtgctgctgaatcctgagaaatacaaagccaaaagccgctctcctggctcacccgttggagaaggaaccggaagtccaccgaagtggcagattggcgagcaagagttcgaggcgctgatgagaatgctggacaacctgggttatcggacgggttacccatataggtacccagcactgcgggaaaagtccaagaagtacagcgacgtagaagttcccgcaagtgtcaccggatatagcttcgcctcagatggagattctggcacctgctctcccctgcgccattccttccagaagcagcagagagagaagacccgctggttaaatagtggcagaggcgacgaagcatccgaggaagggcagaatggttccagtcctaaatccaaaactaaggtgtggacaaacatcacacacgaccacgtgaaaccactactgcaatctctgagttccggagtgtgcgttccttcatgtatcactaactgtctatggacaaaagaagatggccacagaacgagtacgtccgccgtgccaaatcttttcgtccctctgaatacgaaccccaaggaagtccaggagatgagaaacaagattcgggagcaaaacttacaagatatcaagacagctggtcctcagtctcaagttctttgtggcgttgtgatggaccggagtctggtgcagggcgaactggtaactgcttcaaaagccatcattgagaaggaataccagccccacgtgatcgtgtctacaactgggccaaacccttttaccaccctcacggacagagaactggaggaatacaggcgcgaggtggaacggaagcagaaggggtcagaagaaaatctggatgaagccagggagcaaaaagagaaaagtcccccagatcagccggcagtgcctcacccacctccaagcactccaattaagttggaagaagacctggtaccagagcccacaacaggagatgattccgacgcagcaacctttaagcctaccctacccgatctgtctccagacgagccctcggaggccctcggtttccccatgctcgagaaagaggaggaagcccatcgcccacccagccctaccgaggccccaacagaggctagtcccgaaccagctcctgaccccgctcctgtggcagaggaagccgctccatcagccgtggaagagggcgctgcagctgacccaggtagtgacggctctccaggaaagtcacctagtaaaaagaagaagaaattccgcaccccctcctttctgaagaagtccaaaaaaaagtcagatagttag

SEQ ID NO: 178290 - DNA, 1335 bp, Artificial Sequence
  derived and/or modified sequence
taggtacttatcctaaggaatcacggccttgtgtcggtcggcgagagtgtggaggaggctttttactatatccacaacctcgttgtcgcatgcgaaatacaggtgaggaccctggcctcagctgggggacccgacaacttagtcctgctgaaccccgagaagtacaaggctaaatctaggagtccaggaagccctgtgggtgaggggaccgggagtccgccaaagtggcagattggcgagcaggaattcgaggctttaatgcggatgcttgataacttgggatacaggaccggttacccttacagatatcctgctctgcgagaaaagtctaaaaaatatagtgatgtggaggtcccagcaagtgtgaccggctactcattcgcctcggacggtgacagcggaacctgctcccctctgcgccactcatttcaaaagcaacagcgtgagaaaaccaggtggcttaatagcggtagaggagatgaggcttccgaagaaggccaaaatggaagcagtccaaaaagcaagaccaaggtgtggacaaacattacacacgatcacgtgaaaccgctgctgcagagcctgagcagcggagtgtgtgtaccatcttgcatcacaaattgcttatggactaaggaagatggccacagaacgagcacgagtgctgtgcccaacttatttgtcccattgaatacgaatccgaaagaagtccaggagatgaggaacaaaatcagggagcagaacttacaggacattaagacagcgggaccacagtcccaggtgttatgcggggtcgtgatggacaggtcattggttcaaggtgagctcgtaacagcctcaaaggcgatcattgagaaggagtaccagccacatgttattgttagcacaaccggacccaatcccttcactactctgaccgatcgcgagctggaggaatacagacgagaagtggaacgcaaacagaaaggtagcgaggagaatcttgatgaggctagggagcagaaagagaagtctccaccggaccaacctgcagttccacatcctcccccaagtacccctattaaactggaagaggacctcgttccagagcctaccacgggcgacgatagcgacgccgcaacctttaaaccaacgctgccagacctgagcccggatgagccatctgaagcactgggcttccccatgctggagaaggaggaggaggcccaccgacctccgtctcccacagaagccccaactgaggctagtcctgagcctgcgccagaccccgcacccgtggctgaagaggcggcacctagcgcagtggaggagggcgcagcagcagaccccggtagttag

SEQ ID NO: 178291 - DNA, 2307 bp, Artificial Sequence
  derived and/or modified sequence
atgaacggcgacagcagagccgccgtggtgaccagccccccccccaccaccgccccccacaaggagagatacttcgacagagtggacgagaacaaccccgagtacctgagagagagaaacatggcccccgacctgagacaggacttcaacatgatggagcagaagaagagagtgagcatgatcctgcagagccccgccttctgcgaggagctggagagcatgatccaggagcagttcaagaagggcaagaaccccaccggcctgctggccctgcagcagatcgccgacttcatgaccaccaacgtgcccaacgtgtaccccgccgccccccagggcggcatggccgccctgaacatgagcctgggcatggtgacccccgtgaacgacctgagaggcagcgacagcatcgcctacgacaagggcgagaagctgctgagatgcaagctggccgccttctacagactggccgacctgttcggctggagccagctgatctacaaccacatcaccaccagagtgaacagcgagcaggagcacttcctgatcgtgcccttcggcctgctgtacagcgaggtgaccgccagcagcctggtgaagatcaacctgcagggcgacatcgtggacagaggcagcaccaacctgggcgtgaaccaggccggcttcaccctgcacagcgccatctacgccgccagacccgacgtgaagtgcgtggtgcacatccacacccccgccggcgccgccgtgagcgccatgaagtgcggcctgctgcccatcagccccgaggccctgagcctgggcgaggtggcctaccacgactaccacggcatcctggtggacgaggaggagaaggtgctgatccagaagaacctgggccccaagagcaaggtgctgatcctgagaaaccacggcctggtgagcgtgggcgagagcgtggaggaggccttctactacatccacaacctggtggtggcctgcgagatccaggtgagaaccctggccagcgccggcggccccgacaacctggtgctgctgaaccccgagaagtacaaggccaagagcagaagccccggcagccccgtgggcgagggcaccggcagcccccccaagtggcagatcggcgagcaggagttcgaggccctgatgagaatgctggacaacctgggctacagaaccggctacccctacagataccccgccctgagagagaagagcaagaagtacagcgacgtggaggtgcccgccagcgtgaccggctacagcttcgccagcgacggcgacagcggcacctgcagccccctgagacacagcttccagaagcagcagagagagaagaccagatggctgaacagcggcagaggcgacgaggccagcgaggagggccagaacggcagcagccccaagagcaagaccaaggtgtggaccaacatcacccacgaccacgtgaagcccctgctgcagagcctgagcagcggcgtgtgcgtgcccagctgcatcaccaactgcctgtggaccaaggaggacggccacagaaccagcaccagcgccgtgcccaacctgttcgtgcccctgaacaccaaccccaaggaggtgcaggagatgagaaacaagatcagagagcagaacctgcaggacatcaagaccgccggcccccagagccaggtgctgtgcggcgtggtgatggacagaagcctggtgcagggcgagctggtgaccgccagcaaggccatcatcgagaaggagtaccagccccacgtgatcgtgagcaccaccggccccaaccccttcaccaccctgaccgacagagagctggaggagtacagaagagaggtggagagaaagcagaagggcagcgaggagaacctggacgaggccagagagcagaaggagaagagcccccccgaccagcccgccgtgccccaccccccccccagcacccccatcaagctggaggaggacctggtgcccgagcccaccaccggcgacgacagcgacgccgccaccttcaagcccaccctgcccgacctgagccccgacgagcccagcgaggccctgggcttccccatgctggagaaggaggaggaggcccacagaccccccagccccaccgaggcccccaccgaggccagccccgagcccgcccccgaccccgcccccgtggccgaggaggccgcccccagcgccgtggaggagggcgccgccgccgaccccggcagcgacggcagccccggcaagagccccagcaagaagaagaagaagttcagaacccccagcttcctgaagaagagcaagaagaagagcgacagctag

SEQ ID NO: 178292 - DNA, 1335 bp, Artificial Sequence
  derived and/or modified sequence
tgagtgctgatcctgagaaaccacggcctggtgagcgtgggcgagagcgtggaggaggccttctactacatccacaacctggtggtggcctgcgagatccaggtgagaaccctggccagcgccggcggccccgacaacctggtgctgctgaaccccgagaagtacaaggccaagagcagaagccccggcagccccgtgggcgagggcaccggcagcccccccaagtggcagatcggcgagcaggagttcgaggccctgatgagaatgctggacaacctgggctacagaaccggctacccctacagataccccgccctgagagagaagagcaagaagtacagcgacgtggaggtgcccgccagcgtgaccggctacagcttcgccagcgacggcgacagcggcacctgcagccccctgagacacagcttccagaagcagcagagagagaagaccagatggctgaacagcggcagaggcgacgaggccagcgaggagggccagaacggcagcagccccaagagcaagaccaaggtgtggaccaacatcacccacgaccacgtgaagcccctgctgcagagcctgagcagcggcgtgtgcgtgcccagctgcatcaccaactgcctgtggaccaaggaggacggccacagaaccagcaccagcgccgtgcccaacctgttcgtgcccctgaacaccaaccccaaggaggtgcaggagatgagaaacaagatcagagagcagaacctgcaggacatcaagaccgccggcccccagagccaggtgctgtgcggcgtggtgatggacagaagcctggtgcagggcgagctggtgaccgccagcaaggccatcatcgagaaggagtaccagccccacgtgatcgtgagcaccaccggccccaaccccttcaccaccctgaccgacagagagctggaggagtacagaagagaggtggagagaaagcagaagggcagcgaggagaacctggacgaggccagagagcagaaggagaagagcccccccgaccagcccgccgtgccccaccccccccccagcacccccatcaagctggaggaggacctggtgcccgagcccaccaccggcgacgacagcgacgccgccaccttcaagcccaccctgcccgacctgagccccgacgagcccagcgaggccctgggcttccccatgctggagaaggaggaggaggcccacagaccccccagccccaccgaggcccccaccgaggccagccccgagcccgcccccgaccccgcccccgtggccgaggaggccgcccccagcgccgtggaggagggcgccgccgccgaccccggcagctag

SEQ ID NO: 178293 - protein, 632 aa, Artificial Sequence
  derived and/or modified sequence
MNGDSRAAVVTSPPPTTAPHKERYFDRVDENNPEYLRERNMAPDLRQDFNMMEQKKRVSMILQSPAFCEELESMIQEQFKKGKNPTGLLALQQIADFMTTNVPNVYPAAPQGGMAALNMSLGMVTPVNDLRGSDSIAYDKGEKLLRCKLAAFYRLADLFGWSQLIYNHITTRVNSEQEHFLIVPFGLLYSEVTASSLVKINLQGDIVDRGSTNLGVNQAGFTLHSAIYAARPDVKCVVHIHTPAGAAVSAMKCGLLPISPEALSLGEVAYHDYHGILVDEEEKVLIQKNLGPKSKVLILRNHGLVSVGESVEEAFYYIHNLVVACEIQVRTLASAGGPDNLVLLNPEKYKAKSRSPGSPVGEGTGSPPKWQIGEQEFEALMRMLDNLGYRTGYPYRYPALREKSKKYSDVEVPASVTGYSFASDGDSGTCSPLRHSFQKQQREKTRWLNSGRGDEASEEGQNGSSPKSKTKWTKEDGHRTSTSAVPNLFVPLNTNPKEVQEMRNKIREQNLQDIKTAGPQSQVLCGVVMDRSLVQGELVTASKAIIEKEYQPHVIVSTTGPNPFTTLTDRELEEYRREVERKQKGSEENLDEAREQKEKSPPDQPAVPHPPPSTPIKLEEAGDGCAREYLLP

SEQ ID NO: 178294 - DNA, 1203 bp, Artificial Sequence
  derived and/or modified sequence
atgaacggggactctcgcgccgccgtggtgacatccccaccaccaactaccgcccctcataaggaacgctactttgaccgcgtggacgaaaacaaccctgagtacctcagagagagaaatatggcacccgatctccgccaggatttcaacatgatggaacagaagaagcgtgtatctatgattctgcagtctcctgccttttgcgaggaattggaatccatgatccaggagcaattcaaaaaaggtaaaaaccccacagggctgttggccttgcagcagattgccgactttatgacaaccaatgtcccaaatgtttaccctgcggcgccccagggggggatggctgctctgaacatgtctctgggaatggtaacgcctgtcaacgatctcagaggttccgactctattgcctacgacaagggtgaaaaactgttgaggtgcaaactggcagccttctatcggctggccgatctcttcggttggagtcaacttatttacaatcatataacgacccgagtcaatagcgagcaagagcactttctaattgtgcctttcggacttctgtattctgaggttaccgcatcctctttagtaaaaatcaacctccaaggcgatatcgtggacagaggcagcacaaacttaggagtcaatcaggcagggtttaccctgcacagcgccatctatgctgccagaccggatgtcaaatgcgtggtccatattcacacacctgctggagcagctgtgtccgctatgaaatgcggcctgcttcctatcagcccagaagccctcagtctcggtgaagtcgcgtaccacgattatcatgggatactcgtcgacgaagaggagaaagtcctcatccagaagaatctgggaccaaaaagtaaggtgctaatcctgcggaaccacgggctggtgtctgtgggtgaaagtgtcgaggaggccttctactacatccacaatttagtggtcgcttgtgaaatccaggtgcggacacttgcctcagccggtggaccggacaacctggtgctgcttaacccggagaaatacaaggccaaatctcgctctcccggcagtcctgtgggagagggaaccgggagccctcctaagtggcagattggggagcaggagttcgaggcccttatgagaatgcttgacaacttggggtatcggactagcagctctggcagaagacaagatggatag

SEQ ID NO: 178295 - DNA, 414 bp, Artificial Sequence
  derived and/or modified sequence
atgaatggcgattccagagctgccgtggtaacgagccccccacctaccaccgccccacataaagagaggtatttcgatagagtcgacgaaaacaatcctgaatatttgcgagaaaggaatatggccccagacctgcggcaggactttaatatgatggagcagaagaagagagtgtccatgattctgcagagtcccgcattctgtgaagagttggagtcaatgatccaggaacaatttaaaaaaggtaagaaccccactggacttctggccctgcaacagatcgctgacttcatgacaaccaacgttccgaacgtctacccagccgcaccacaggggggtatggccgctctcaatatgagcttggggatggtgactcctgtgaacgatctgcgcggtagcgactccattgcctag

SEQ ID NO: 178296 - DNA, 1899 bp, Artificial Sequence
  derived and/or modified sequence
atgaatggtgactccagagcagccgtagtaactagcccaccaccaaccaccgccccacacaaggagaggtacttcgaccgtgtggacgaaaacaatcccgagtacttgagggaaagaaacatggcccccgacctgaggcaagactttaatatgatggaacaaaaaaaacgggtgagcatgattctccaatcccctgccttttgcgaagagctggaatctatgattcaagaacagtttaaaaaaggcaagaacccaactggcctgctggccctgcagcagatcgcagatttcatgactaccaatgtgcccaatgtttatcccgctgcaccacagggtggaatggccgccctgaatatgtccttaggaatggtcactccagtgaatgacctgcgagggagcgactctatcgcttacgacaagggggagaaactgctcaggtgtaagctcgcagcattttatcggttggcagatctctttggctggtcacagctaatctacaatcacatcaccactagagtgaactccgaacaggaacacttccttatcgttccgttcggcctcttatactcagaggtcacagcctctagcctggtgaagatcaacctgcagggcgatatcgtagaccgagggagtaccaatctgggagtcaaccaggctggttttacgttacattccgccatttacgctgcaaggcccgacgtaaagtgtgtcgttcatattcacacacctgccggcgccgccgttagcgccatgaagtgtggccttttgcctatttcccccgaggccctctccttgggggaagtagcttaccatgactaccatggcattctggtggatgaagaggagaaagtgttaatacaaaagaacttgggccctaagagcaaggtgctgattctccggaatcacggtctggtatcagtgggagagagtgtggaagaagcgttctactatattcacaatcttgtagtggcctgtgagattcaggtgaggactctagccagcgctggcgggcccgacaacctggtcctgcttaaccccgagaaatataaggctaagtccagaagcccgggatcaccagtgggcgaggggaccggctctccccctaagtggcaaattggcgaacaggaatttgaggcgctgatgcgaatgctagacaacttagggtaccgcaccggctacccataccgctaccctgccctgcgcgaaaaatccaagaagtactccgacgtcgaggtgcctgctagcgtgacaggttattctttcgcctcggatggtgattccggaacgtgctcccctctaagacattctttccagaagcagcagcgggaaaaaacaagatggctgaactctggcaggggggatgaggcgtccgaagaaggtcagaacggctcttcccctaaaagcaagacaaagtggacgaaggaagacgggcaccgaacgtcaaccagtgcagtcccgaatctgtttgttcccctcaatactaaccctaaggaagtacaggaaatgaggaataagattcgcgagcagaatctgcaagacattaaaacagccgggccccagtctcaggtgctttgtggagtggtcatggaccggtccctggtccaaggggagctcgtcaccgcttctaaagctattatcgagaaggagtaccagccccatgtaatagtttccactactggtcccaatccctttacaacactgactgatagggagctggaggaatatcggagggaggtggagcggaaacagaagggctctgaggaaaacctggacgaagctcgcgagcagaaggagaagtcacccccggatcagcctgccgtgccacaccccccgccgtcaacacctatcaaactggaggaggccggagacgggtgcgctagagaatacctgctcccttag

SEQ ID NO: 178297 - DNA, 1391 bp, Artificial Sequence
  derived and/or modified sequence
gcacccaggtcgggcggtgggggcgagcggaggggctgaggggcggagaggcctggcgggccgctgctgcgggccaggggacgggggcggagccggagccggagccgacgggcggtggccgcactgggaccccggaatcccgcgcgctgcccacgattcgcttctgaggaacctagaaagattgtacaatgaatggtgattctcgtgctgcggtggtgacctcaccacccccgaccacagcccctcacaaggagaggtacttcgaccgagtagatgagaacaacccagagtacttgagggagaggaacatggcaccagaccttcgccaggacttcaacatgatggagcaaaagaagagggtgtccatgattctgcaaagccctgctttctgtgaagaattggaatcaatgatacaggagcaatttaagaaggggaagaaccccacaggcctattggcattacagcagattgcagattttatgaccacgaatgtaccaaatgtctacccagcagctccgcaaggagggatggctgccttaaacatgagtcttggtatggtgactcctgtgaacgatcttagaggatctgattctattgcgtatgacaaaggagagaagttattacggtgtaaattggcagcgttttatagactagcagatctctttgggtggtctcagcttatctacaatcatatcacaaccagagtgaactccgagcaggaacacttcctcattgtcccttttgggcttctttacagtgaagtgactgcatccagtttggttaagatcaatctacaaggagatatagtagatcgtggaagcactaatctgggagtgaatcaggccggcttcaccttacactctgcaatttatgctgcacgcccggacgtgaagtgcgtcgtgcacattcacaccccagcaggggctgcggtctctgcaatgaaatgtggcctcttgccaatctccccggaggcgctttcccttggagaagtggcttatcatgactaccatggcattctggttgatgaagaggaaaaagttttgattcagaaaaatctggggcctaaaagcaaggttcttattctccggaaccatgggctcgtgtcagttggagagagcgttgaggaggccttctattacatccataaccttgtggttgcctgtgagatccaggttcgaactctggccagtgcaggaggaccagacaacttagtcctgctgaatcctgagaagtacaaagccaagtcccgttccccagggtctccggtaggggaaggcactggatcgcctcccaagtggcagattggtgagcaggaatttgaagccctcatgcggatgctcgataatctgggctacagaacaagcagcagcgggagaagacaagatggctga

SEQ ID NO: 178298 - DNA, 671 bp, Artificial Sequence
  derived and/or modified sequence
ggagccggagccggagccgacgggcggtggccgcactgggaccccggaatcccgcgcgctgcccacgattcgcttctgaggggccttttgagcagctgcttctgcaagaggacatccggagacacaggaatagaaatgatccgatcagagtaattaaaggcttttaactgagctctgaggtcccaaacagggcacactccgtcagcctaaagctgtgaagaagaaccttcaacataaggaacctagaaagattgtacaatgaatggtgattctcgtgctgcggtggtgacctcaccacccccgaccacagcccctcacaaggagaggtacttcgaccgagtagatgagaacaacccagagtacttgagggagaggaacatggcaccagaccttcgccaggacttcaacatgatggagcaaaagaagagggtgtccatgattctgcaaagccctgctttctgtgaagaattggaatcaatgatacaggagcaatttaagaaggggaagaaccccacaggcctattggcattacagcagattgcagattttatgaccacgaatgtaccaaatgtctacccagcagctccgcaaggagggatggctgccttaaacatgagtcttggtatggtgactcctgtgaacgatcttagaggatctgattctattgcgta

SEQ ID NO: 178299 - DNA, 3107 bp, Artificial Sequence
  derived and/or modified sequence
ggccgcactgggaccccggaatcccgcgcgctgcccacgattcgcttctgaggaacctagaaagattgtacaatgaatggtgattctcgtgctgcggtggtgacctcaccacccccgaccacagcccctcacaaggagaggtacttcgaccgagtagatgagaacaacccagagtacttgagggagaggaacatggcaccagaccttcgccaggacttcaacatgatggagcaaaagaagagggtgtccatgattctgcaaagccctgctttctgtgaagaattggaatcaatgatacaggagcaatttaagaaggggaagaaccccacaggcctattggcattacagcagattgcagattttatgaccacgaatgtaccaaatgtctacccagcagctccgcaaggagggatggctgccttaaacatgagtcttggtatggtgactcctgtgaacgatcttagaggatctgattctattgcgtatgacaaaggagagaagttattacggtgtaaattggcagcgttttatagactagcagatctctttgggtggtctcagcttatctacaatcatatcacaaccagagtgaactccgagcaggaacacttcctcattgtcccttttgggcttctttacagtgaagtgactgcatccagtttggttaagatcaatctacaaggagatatagtagatcgtggaagcactaatctgggagtgaatcaggccggcttcaccttacactctgcaatttatgctgcacgcccggacgtgaagtgcgtcgtgcacattcacaccccagcaggggctgcggtctctgcaatgaaatgtggcctcttgccaatctccccggaggcgctttcccttggagaagtggcttatcatgactaccatggcattctggttgatgaagaggaaaaagttttgattcagaaaaatctggggcctaaaagcaaggttcttattctccggaaccatgggctcgtgtcagttggagagagcgttgaggaggccttctattacatccataaccttgtggttgcctgtgagatccaggttcgaactctggccagtgcaggaggaccagacaacttagtcctgctgaatcctgagaagtacaaagccaagtcccgttccccagggtctccggtaggggaaggcactggatcgcctcccaagtggcagattggtgagcaggaatttgaagccctcatgcggatgctcgataatctgggctacagaactggctacccttatcgataccctgctctgagagagaagtctaaaaaatacagcgatgtggaggttcctgctagtgtcacaggttactcctttgctagtgacggtgattcgggcacttgctccccactcagacacagttttcagaagcagcagcgggagaagacaagatggctgaactctggccggggcgacgaagcttccgaggaagggcagaatggaagcagtcccaagtcgaagactaagtggactaaagaggatggacatagaacttccacctctgctgtccctaacctgtttgttccattgaacactaacccaaaagaggtccaggagatgaggaacaagatccgagagcagaatttacaggacattaagacggctggccctcagtcccaggttttgtgtggtgtagtgatggacaggagcctcgtccagggagagctggtgacggcctccaaggccatcattgaaaaggagtaccagccccacgtcattgtgagcaccacgggccccaaccccttcaccacactcacagaccgtgagctggaggagtaccgcagggaggtggagaggaagcagaagggctctgaagagaatctggacgaggctagagaacagaaagaaaagagtcctccagaccagcctgcggtcccccacccgcctcccagcactcccatcaagctggaggaagcaggagacggatgcgctagagagtacctgttaccctaaccttgtgccggagccgactactggagatgacagtgatgctgccacctttaagccaactctccccgatctgtcccctgatgaaccttcagaagcactcggcttcccaatgttagagaaggaggaggaagcccatagacccccaagccccactgaggcccctactgaggccagccccgagccagccccagacccagccccggtggctgaagaggctgccccctcagctgtcgaggagggggccgccgcggaccctggcagcgatgggtctccaggcaagtccccgtccaaaaagaagaagaagttccgtaccccgtcctttctgaagaagagcaagaagaagagtgactcctgaaagccctgcgctaacactgtcctgtccggagcgaccctggctctgccagcgtccccggccacgtctgtgctctgtccttgtgtaatggaatgcaaaaaagccaagccctccgcctagaggtcccctcacgtgaccagccccgtgtagccccgggctgacccagtgtgtgctcagcagccccaccccaccctgccccttgtcctctcagagcctcagcttctgggggagacatgctctccccacaggggggaggcactaagtcatggtcctggctggaaggtactgaaggcttctgcagctttggctgcacgtcaccctcctgagcctcacctttcctgccgtccctcctgttgtgaaatcaccacattctgtctctgcttggcttcccctccaccctaaagtctcaggtgacggactcagactcctggcttcatgtggcattctctctgctcagtgatctcacttaaatctatatacaaagccttggtcccgtgaaaacactcgtgtgcccaccagcggccttgaagaggcaggtctgggccagatgctgggcaggaaaccccagcggcagatgggcctgtgtgcacccaacgtgatgctatgcatgtctgaccgacgatccctcgaccagaatcagattcaggagctcagtttctttttcacttgggtctctggattcctgtcatagggaaggtatatcaggaggggaagaggcctttctagaattttctttgagcaggtttacaatttagcttacatttttcgactgtgaacgtgaataggc

SEQ ID NO: 178300 - DNA, 1203 bp, Artificial Sequence
  derived and/or modified sequence
atgaatggagacagcagagctgctgtggtgaccagccccccacccaccacagccccccacaaggagcgctactttgacagagtggatgagaacaaccctgagtacctgcgggagaggaacatggccccagacctgcggcaggacttcaacatgatggagcagaagaagagggtgtccatgatcctgcagagccctgccttctgtgaggagctggagagcatgatccaggagcagttcaagaagggcaagaaccccaccggcctgctggccctgcagcagattgctgacttcatgaccaccaacgtgcccaacgtgtacccagctgccccccagggcggcatggccgccctgaacatgagcctgggcatggtgacccctgtgaatgacctgcggggcagtgacagcatcgcctatgacaagggggagaagctgctgcgctgcaagctggccgccttctaccgcctggccgacctgtttggctggagccagctgatctacaaccacatcaccaccagggtgaacagcgagcaggagcacttcctgattgtgcccttcggcctgctgtacagcgaggtgacagccagcagcctggtgaagatcaacctgcagggcgacatcgtggaccggggcagcaccaacctgggcgtgaaccaggccggcttcaccctgcacagcgccatctatgctgcccggccagatgtgaagtgtgtggtgcacatccacaccccagctggagctgctgtgtctgccatgaagtgtggcctgctgcccatcagccctgaggccctgagcctgggggaggtggcctaccatgactaccacggcatcctggtggatgaggaggagaaggtgctgatccagaagaacctgggccccaagagcaaggtgctgatcctgaggaaccacggcctggtgtctgtgggggagagcgtggaggaggccttctactacatccacaacctggtggtggcctgtgagatccaggtgaggaccctggccagcgctgggggccctgacaacctggtgctgctgaaccctgagaagtacaaggccaagagccgcagccctggcagccctgtgggggagggcaccggcagcccccccaagtggcagatcggggagcaggagtttgaggccctgatgaggatgctggacaacctgggctaccgcaccagcagcagcggccggcggcaggatggatag

SEQ ID NO: 178301 - DNA, 414 bp, Artificial Sequence
  derived and/or modified sequence
atgaatggagacagcagagctgctgtggtgaccagccccccacccaccacagccccccacaaggagcgctactttgacagagtggatgagaacaaccctgagtacctgcgggagaggaacatggccccagacctgcggcaggacttcaacatgatggagcagaagaagagggtgtccatgatcctgcagagccctgccttctgtgaggagctggagagcatgatccaggagcagttcaagaagggcaagaaccccaccggcctgctggccctgcagcagattgctgacttcatgaccaccaacgtgcccaacgtgtacccagctgccccccagggcggcatggccgccctgaacatgagcctgggcatggtgacccctgtgaatgacctgcggggcagtgacagcatcgcctag

SEQ ID NO: 178302 - DNA, 1899 bp, Artificial Sequence
  derived and/or modified sequence
atgaatggagacagcagagctgctgtggtgaccagccccccacccaccacagccccccacaaggagcgctactttgacagagtggatgagaacaaccctgagtacctgcgggagaggaacatggccccagacctgcggcaggacttcaacatgatggagcagaagaagagggtgtccatgatcctgcagagccctgccttctgtgaggagctggagagcatgatccaggagcagttcaagaagggcaagaaccccaccggcctgctggccctgcagcagattgctgacttcatgaccaccaacgtgcccaacgtgtacccagctgccccccagggcggcatggccgccctgaacatgagcctgggcatggtgacccctgtgaatgacctgcggggcagtgacagcatcgcctatgacaagggggagaagctgctgcgctgcaagctggccgccttctaccgcctggccgacctgtttggctggagccagctgatctacaaccacatcaccaccagggtgaacagcgagcaggagcacttcctgattgtgcccttcggcctgctgtacagcgaggtgacagccagcagcctggtgaagatcaacctgcagggcgacatcgtggaccggggcagcaccaacctgggcgtgaaccaggccggcttcaccctgcacagcgccatctatgctgcccggccagatgtgaagtgtgtggtgcacatccacaccccagctggagctgctgtgtctgccatgaagtgtggcctgctgcccatcagccctgaggccctgagcctgggggaggtggcctaccatgactaccacggcatcctggtggatgaggaggagaaggtgctgatccagaagaacctgggccccaagagcaaggtgctgatcctgaggaaccacggcctggtgtctgtgggggagagcgtggaggaggccttctactacatccacaacctggtggtggcctgtgagatccaggtgaggaccctggccagcgctgggggccctgacaacctggtgctgctgaaccctgagaagtacaaggccaagagccgcagccctggcagccctgtgggggagggcaccggcagcccccccaagtggcagatcggggagcaggagtttgaggccctgatgaggatgctggacaacctgggctacagaacaggctacccctaccgctacccagccctgcgggagaagagcaagaagtacagtgatgtggaggtgcctgcctctgtgacaggctacagctttgccagtgatggagacagcggcacctgcagccccctgcggcacagcttccagaagcagcagcgggagaagacccgctggctgaacagcggcagaggagatgaggccagcgaggagggccagaatggcagcagccccaagagcaagaccaagtggaccaaggaggatggccacaggaccagcaccagcgctgtgcccaacctgtttgtgcccctgaacaccaaccccaaggaggtgcaggagatgaggaacaagatccgggagcagaacctgcaggacatcaagacagctggcccccagagccaggtgctgtgtggggtggtgatggacaggagcctggtgcagggcgagctggtgacagccagcaaggccatcatcgagaaggagtaccagccccacgtgattgtgtccaccaccggccccaaccccttcaccaccctgacagaccgggagctggaggagtaccgccgggaggtggagaggaagcagaagggcagcgaggagaacctggatgaggcccgggagcagaaggagaagagccccccagaccagcctgctgtgccccaccccccacccagcacccccatcaagctggaggaggccggagatggctgtgcccgggagtacctgctgccctag

SEQ ID NO: 178303 - DNA, 1203 bp, Artificial Sequence
  derived and/or modified sequence
atgaacggcgacagccgggccgccgtggtgaccagccccccccccacgaccgctccccataaggaacgatacttcgacagggtggacgagaataatcccgaatatctgagggagaggaacatggctccagatcttcggcaggatttcaatatgatggagcagaagaagagagtaagtatgatcctccaatctcccgccttttgcgaggaacttgagtctatgatccaggagcaattcaaaaagggcaaaaacccaaccggtctgctcgccctccagcagatcgctgactttatgacaactaatgtcccaaacgtctatcctgctgctcctcaggggggtatggccgctttaaacatgagccttgggatggttaccccagtaaacgacctacggggtagcgacagcatcgcctatgacaaaggcgagaagctcctccgctgcaagctggccgcattttaccggttagcagacctgttcggatggagccagttgatttacaaccatattaccactagggttaattcagagcaggagcattttttaatcgtcccctttggtcttttatattccgaagtcactgcttcatctcttgttaaaattaacttgcagggagatatcgtcgaccgcgggagcaccaatctgggggtgaaccaggccggctttactttgcactctgccatatacgccgcgcggccagacgtaaaatgcgtggttcatattcatacaccagcgggagctgctgtgtccgcaatgaaatgtgggttgctcccaatttctcctgaggcccttagccttggtgaggtggcttatcatgattatcatgggatcctggtggacgaggaagaaaaggtgctgatccagaagaacctggggccaaagtccaaagtcctgattctcagaaatcatgggctagtgtcagtcggtgaatccgtggaagaggccttttactacattcacaatctggtcgtggcatgcgaaatccaggttaggaccctggcttctgctggaggtccagataatctggtgcttctgaatccagaaaaatacaaagccaagtctagatccccgggatccccagtaggggagggcactgggtctccgccgaaatggcagatcggagagcaggaattcgaagcgctcatgcgcatgctggataacttgggctatcggacatccagctcaggccgcagacaggacggctag

SEQ ID NO: 178304 - DNA, 414 bp, Artificial Sequence
  derived and/or modified sequence
atgaacggcgacagccgggccgccgtggtgaccagccccccccccacaacggctccacacaaggaacgctacttcgaccgggtggacgaaaataacccagagtacctgagggagcggaacatggcccccgatctgagacaggatttcaatatgatggagcagaagaaacgggtctctatgatactgcagagccctgctttttgtgaggagctggaaagtatgattcaagagcagtttaaaaaggggaagaacccgaccggcttgctcgccctgcaacagatcgcggatttcatgacgaccaatgtgccaaacgtttatcctgcagctccccagggaggtatggccgccctgaatatgtccttgggaatggtcacaccagtcaatgatttgaggggctctgacagtatcgcgtag

SEQ ID NO: 178305 - DNA, 1899 bp, Artificial Sequence
  derived and/or modified sequence
atgaacggcgacagccgggccgccgtggtgaccagccccccccccactactgctccacataaagagagatatttcgaccgagtggatgagaacaacccagagtacctccgcgagaggaacatggctcccgaccttcgccaggatttcaacatgatggagcagaaaaagcgggtttccatgatccttcaaagtccggccttctgcgaggaactggagtccatgatccaggagcaattcaagaaggggaagaaccccaccgggctgcttgccctccaacagatcgccgatttcatgacgactaatgtgccgaacgtgtaccctgcagctccccagggaggcatggctgcactcaatatgtccctggggatggtgacaccagtgaacgatcttcgcggctccgatagcattgcgtacgataagggtgagaagcttctgaggtgtaaattagccgcattttatagattggccgacttatttgggtggtcccagctgatatacaatcatatcaccacaagagttaattctgagcaagaacactttctgattgtcccatttggtttgctatactctgaagtaacggcatctagccttgttaagataaaccttcagggtgatatcgtggatcgggggagtacaaatttaggggtaaaccaagcggggtttaccctgcactctgcgatttacgctgctagacccgacgtgaaatgcgtggtacacatccacacgccggctggcgccgcagtgtcagccatgaagtgtggcctgttgccaatctcccctgaggccttgtctcttggcgaagtagcctaccatgattaccacggcatattggtggacgaggaggaaaaggtcctgattcagaagaatctcgggcctaagtccaaggtacttatcctgcgcaaccacgggctggtttctgtgggcgagagcgtcgaagaagctttctactatattcacaatctcgtggtcgcatgcgaaatccaagtccggaccctggcttccgctggaggaccagacaacttggttctcctgaatccagaaaaatataaggcgaaatcccgcagcccgggaagtccagtcggagagggtacggggtctccccctaagtggcagatcggcgaacaggagtttgaggccctcatgcgaatgctcgataacctgggatatcgtaccggctatccatacaggtatcctgctctgcgggagaagtccaagaaatactcagatgtggaggttcccgcatcagtgaccggctattcttttgcctcagacggagactcagggacctgctcaccgctgaggcattccttccagaaacaacaacgcgaaaagactcggtggctaaactccggtcgtggtgacgaggcttccgaagagggccagaatggaagcagtcccaaaagcaagaccaagtggacaaaagaagacggacatcgaacctccacgtctgccgtgccgaatctgttcgttcccttgaacactaaccccaaggaggtgcaagagatgcgcaacaagattcgggaacagaatttgcaagacatcaagaccgccggaccacagtctcaagttctctgcggagtcgtcatggatcgctctcttgtacagggagagctcgtgaccgcttctaaagctatcatcgagaaggagtaccagccacacgtaatcgtgagcacaaccggtcctaacccctttaccacactgaccgaccgggaactagaggagtatagacgcgaagttgaacgcaaacaaaagggatctgaggaaaacttagatgaagctagagagcaaaaagaaaaatcaccccccgatcaaccagcagtgccccatccgcccccatcgacccctatcaagctggaagaagccggcgacggatgcgcgcgagagtacctcttgccttag

SEQ ID NO: 178306 - DNA, 1203 bp, Artificial Sequence
  derived and/or modified sequence
atgaatggcgattcccgggcagcggttgttacctcccctcctccaaccaccgccccacataaggagcgatattttgacagagtggatgagaacaacccggagtacctccgcgagcgaaatatggccccagatctccggcaagactttaacatgatggagcagaagaagcgcgtctccatgattctccagtcccccgcattctgtgaggagctagaaagcatgatccaggagcagtttaagaaaggcaagaatccgacaggcctcctggccctgcagcaaattgctgacttcatgaccacgaacgtccccaatgtctatcccgctgcccctcagggcggtatggctgctcttaacatgagcctcggcatggtaactcctgtaaacgatttacgaggtagtgactctatagcatacgacaaaggagagaagctgttgaggtgcaagttagcagccttctatcggctggctgatctgttcggttggagccagctgatctataaccacattaccacaagggtcaacagcgagcaggaacattttctgatcgtgccatttggactcctgtatagcgaggtgaccgcctcatccctcgtaaagattaaccttcagggggacatcgttgatcgaggctccaccaaccttggagtcaatcaggcaggcttcaccctgcacagtgctatctatgctgcccgaccagatgtcaaatgtgtggtccacatacatacgccggctggtgccgctgtttctgcgatgaaatgcggcctattgcccatttcacccgaggccctctctcttggcgaggttgcgtaccacgactatcacgggattctggtggatgaagaggagaaggttctgatacagaaaaacttaggtcctaagtccaaggtgttaattttgcggaaccacgggctggttagcgtcggggagagtgtggaggaggcattttattatatacataatctcgtggtggcttgcgaaatccaggtgaggacactggcttcagccggaggcccagacaacttggtactgctcaaccccgagaaatacaaagccaagagccggtcgcccggttctccggtaggcgagggcaccggaagtccgccaaagtggcagattggcgaacaggaattcgaagccctcatgcgaatgctggacaacctaggctatcgcacaagtagctccggccgacgccaggatggctag

SEQ ID NO: 178307 - DNA, 414 bp, Artificial Sequence
  derived and/or modified sequence
atgaatggggactcacgggcagcggtggtcacctctccaccgccaaccacagccccacataaggaaaggtattttgatcgcgttgacgagaataacccagaatacttgcgggagcggaatatggcaccggaccttcgtcaagattttaatatgatggagcagaagaagagagttagtatgatactccagtctcccgcattctgcgaggaactagaatcaatgatccaggagcagtttaagaagggtaagaaccctacggggctgctagccctgcagcagatcgccgactttatgaccactaacgtacctaatgtgtaccccgcagcaccacaagggggtatggcagccttgaatatgagcctgggcatggtaacccctgttaatgatctccggggatcagatagtatcgcctag

SEQ ID NO: 178308 - DNA, 1899 bp, Artificial Sequence
  derived and/or modified sequence
atgaacggtgactccagagcggcagtggttacatccccccctcccaccaccgcacctcacaaagagagatactttgatagagtcgacgaaaacaacccagagtacttgcgagaacgaaatatggcaccagacttgcggcaggacttcaatatgatggaacagaaaaagcgggtgagtatgatcttgcagtctccagccttctgcgaagaactggaatctatgatccaggagcagtttaaaaaaggcaaaaatccaaccggtcttctggcactgcagcagatcgcggacttcatgacaaccaacgtcccaaatgtgtaccccgcagccccacagggcggaatggccgctttaaatatgtctctcggaatggttactcctgtgaacgacctccgtgggagcgatagtatagcttacgataagggtgagaagctgctccgttgcaagctggcagccttctaccgactcgctgatctgttcggatggtctcagctgatatacaaccacatcacaaccagggtgaattcagaacaggaacacttcctcatcgttccttttggcctgctatattccgaggtgaccgcctcaagcctcgtgaagatcaacctccagggcgatattgtagacaggggatctaccaatttgggcgtgaaccaggccggtttcacactccactcagccatttatgctgcccgacctgacgtgaagtgtgtggtccacattcatacacccgctggcgcagcagttagcgcaatgaagtgtggcctcctgccaatcagcccagaagcgctctcgctgggggaggtggcataccatgactaccacgggatcttggtggacgaagaggagaaagtgctgattcaaaagaacttgggccctaagtctaaggtgctgatccttaggaaccacggactggtttccgtgggagagtcagtggaggaggccttttattacatccacaatctggtcgtcgcctgtgaaattcaggtaagaaccctggcctctgccggaggaccggacaacctggtgttgctgaatccagagaagtacaaggcaaagagtcgaagcccagggtcccctgtcggcgaaggaacgggctcaccccctaagtggcagattggcgaacaggagtttgaagctctgatgagaatgctcgacaatctgggctaccggactggatatccatataggtacccagccttgagggaaaaaagtaaaaaatacagtgacgtggaagtgcctgcgtcagttactggctattcctttgcttcagatggagactcagggacttgttcgccactgagacactcctttcagaagcaacagcgggaaaagactcgctggcttaattccggtcggggtgacgaagcttcagaggagggccagaatgggtcttcccccaagagtaagacaaagtggaccaaagaggatggtcaccgtacctctacctcagctgttccgaacctgttcgtgcctcttaatacaaatcccaaagaggtgcaggaaatgcgcaataaaatccgggagcagaatctgcaggacatcaagacagcgggtccacagtcccaggtcctgtgcggagtggtgatggacagatcactggttcagggggaactggtaaccgcttccaaggcaatcatagaaaaggagtatcagcctcacgtgatcgtgtctactaccggtcctaatccattcaccaccctgaccgacagagagcttgaagagtaccggagagaggtggagagaaagcagaaaggctccgaagaaaaccttgacgaggctagagaacagaaggagaaatcacccccagaccagccggctgtgccacaccctccaccatcaacacctattaaattggaagaggccggagatggctgcgccagagaatacctcttaccctag

SEQ ID NO: 178309 - DNA, 1203 bp, Artificial Sequence
  derived and/or modified sequence
atgaacggcgacagcagagccgccgtggtgaccagccccccccccaccaccgccccccacaaggagagatacttcgacagagtggacgagaacaaccccgagtacctgagagagagaaacatggcccccgacctgagacaggacttcaacatgatggagcagaagaagagagtgagcatgatcctgcagagccccgccttctgcgaggagctggagagcatgatccaggagcagttcaagaagggcaagaaccccaccggcctgctggccctgcagcagatcgccgacttcatgaccaccaacgtgcccaacgtgtaccccgccgccccccagggcggcatggccgccctgaacatgagcctgggcatggtgacccccgtgaacgacctgagaggcagcgacagcatcgcctacgacaagggcgagaagctgctgagatgcaagctggccgccttctacagactggccgacctgttcggctggagccagctgatctacaaccacatcaccaccagagtgaacagcgagcaggagcacttcctgatcgtgcccttcggcctgctgtacagcgaggtgaccgccagcagcctggtgaagatcaacctgcagggcgacatcgtggacagaggcagcaccaacctgggcgtgaaccaggccggcttcaccctgcacagcgccatctacgccgccagacccgacgtgaagtgcgtggtgcacatccacacccccgccggcgccgccgtgagcgccatgaagtgcggcctgctgcccatcagccccgaggccctgagcctgggcgaggtggcctaccacgactaccacggcatcctggtggacgaggaggagaaggtgctgatccagaagaacctgggccccaagagcaaggtgctgatcctgagaaaccacggcctggtgagcgtgggcgagagcgtggaggaggccttctactacatccacaacctggtggtggcctgcgagatccaggtgagaaccctggccagcgccggcggccccgacaacctggtgctgctgaaccccgagaagtacaaggccaagagcagaagccccggcagccccgtgggcgagggcaccggcagcccccccaagtggcagatcggcgagcaggagttcgaggccctgatgagaatgctggacaacctgggctacagaaccagcagcagcggcagaagacaggacggctag

SEQ ID NO: 178310 - DNA, 414 bp, Artificial Sequence
  derived and/or modified sequence
atgaacggcgacagcagagccgccgtggtgaccagccccccccccaccaccgccccccacaaggagagatacttcgacagagtggacgagaacaaccccgagtacctgagagagagaaacatggcccccgacctgagacaggacttcaacatgatggagcagaagaagagagtgagcatgatcctgcagagccccgccttctgcgaggagctggagagcatgatccaggagcagttcaagaagggcaagaaccccaccggcctgctggccctgcagcagatcgccgacttcatgaccaccaacgtgcccaacgtgtaccccgccgccccccagggcggcatggccgccctgaacatgagcctgggcatggtgacccccgtgaacgacctgagaggcagcgacagcatcgcctag

SEQ ID NO: 178311 - DNA, 1899 bp, Artificial Sequence
  derived and/or modified sequence
atgaacggcgacagcagagccgccgtggtgaccagccccccccccaccaccgccccccacaaggagagatacttcgacagagtggacgagaacaaccccgagtacctgagagagagaaacatggcccccgacctgagacaggacttcaacatgatggagcagaagaagagagtgagcatgatcctgcagagccccgccttctgcgaggagctggagagcatgatccaggagcagttcaagaagggcaagaaccccaccggcctgctggccctgcagcagatcgccgacttcatgaccaccaacgtgcccaacgtgtaccccgccgccccccagggcggcatggccgccctgaacatgagcctgggcatggtgacccccgtgaacgacctgagaggcagcgacagcatcgcctacgacaagggcgagaagctgctgagatgcaagctggccgccttctacagactggccgacctgttcggctggagccagctgatctacaaccacatcaccaccagagtgaacagcgagcaggagcacttcctgatcgtgcccttcggcctgctgtacagcgaggtgaccgccagcagcctggtgaagatcaacctgcagggcgacatcgtggacagaggcagcaccaacctgggcgtgaaccaggccggcttcaccctgcacagcgccatctacgccgccagacccgacgtgaagtgcgtggtgcacatccacacccccgccggcgccgccgtgagcgccatgaagtgcggcctgctgcccatcagccccgaggccctgagcctgggcgaggtggcctaccacgactaccacggcatcctggtggacgaggaggagaaggtgctgatccagaagaacctgggccccaagagcaaggtgctgatcctgagaaaccacggcctggtgagcgtgggcgagagcgtggaggaggccttctactacatccacaacctggtggtggcctgcgagatccaggtgagaaccctggccagcgccggcggccccgacaacctggtgctgctgaaccccgagaagtacaaggccaagagcagaagccccggcagccccgtgggcgagggcaccggcagcccccccaagtggcagatcggcgagcaggagttcgaggccctgatgagaatgctggacaacctgggctacagaaccggctacccctacagataccccgccctgagagagaagagcaagaagtacagcgacgtggaggtgcccgccagcgtgaccggctacagcttcgccagcgacggcgacagcggcacctgcagccccctgagacacagcttccagaagcagcagagagagaagaccagatggctgaacagcggcagaggcgacgaggccagcgaggagggccagaacggcagcagccccaagagcaagaccaagtggaccaaggaggacggccacagaaccagcaccagcgccgtgcccaacctgttcgtgcccctgaacaccaaccccaaggaggtgcaggagatgagaaacaagatcagagagcagaacctgcaggacatcaagaccgccggcccccagagccaggtgctgtgcggcgtggtgatggacagaagcctggtgcagggcgagctggtgaccgccagcaaggccatcatcgagaaggagtaccagccccacgtgatcgtgagcaccaccggccccaaccccttcaccaccctgaccgacagagagctggaggagtacagaagagaggtggagagaaagcagaagggcagcgaggagaacctggacgaggccagagagcagaaggagaagagcccccccgaccagcccgccgtgccccaccccccccccagcacccccatcaagctggaggaggccggcgacggctgcgccagagagtacctgctgccctag

SEQ ID NO: 178312 - protein, 1980 aa, Artificial Sequence
  derived and/or modified sequence
MAARLLAPPGPDSFKPFTPESLANIERRIAESKLKKPPKADGSHREDDEDSKPKPNSDLEAGKSLPFIYGDIPQGLVAVPLEDFDPYYLTQKTFVVLNRGKTLFRFSATPALYILSPFNLIRRIAIKILIHSVFSMIIMCTILTNCVFMTFSNPPDWSKNVEYTFTGIYTFESLVKIIARGFCIDGFTFLRDPWNWLDFSVIMMAYITEFVNLGNVSALRTFRVLRALKTISVIPGLKTIVGALIQSVKKLSDVMILTVFCLSVFALIGLQLFMGNLRNKCVVWPINFNESYLENGTKGFDWEEYINNKTNFYTVPGMLEPLLCGNSSDAGQCPEGYQCMKAGRNPNYGYTSFDTFSWAFLALFRLMTQDYWENLYQLTLRAAGKTYMIFFVLVIFVGSFYLVNLILAVVAMAYEEQNQATLEEAEQKEAEFKAMLEQLKKQQEEAQAAAMATSAGTVSEDAIEEEGEEGGGSPRSSSEISKLSSKSAKERRNRRKKRKQKELSEGEEKGDPEKVFKSESEDGMRRKAFRLPDNRIGRKFSIMNQSLLSIPGSPFLSRHNSKSSIFSFRGPGRFRDPGSENEFADDEHSTVEESEGRRDSLFIPIRARERRSSYSGYSGYSQGSRSSRIFPSLRRSVKRNSTVDCNGVVSLIGGPGSHIGGRLLPEATTEVEIKKKGPGSLLVSMDQLASYGRKDRINSIMSVVTNTLVEELEESQRKCPPCWYKFANTFLIWECHPYWIKLKEIVNLIVMDPFVDLAITICIVLNTLFMAMEHHPMTPQFEHVLAVGNLVFTGIFTAEMFLKLIAMDPYYYFQEGWNIFDGFIVSLSLMELSLADVEGLSVLRSFRLLRVFKLAKSWPTLNMLIKIIGNSVGALGNLTLVLAIIVFIFAVVGMQLFGKSYKECVCKINQDCELPRWHMHDFFHSFLIVFRVLCGEWIETMWDCMEVAGQAMCLIVFMMVMVIGNLVVLNLFLALLLSSFSADNLAATDDDGEMNNLQISVIRIKKGVAWTKLKVHAFMQAHFKQREADEVKPLDELYEKKANCIANHTGADIHRNGDFQKNGNGTTSGIGSSVEKYIIDEDHMSFINNPNLTVRVPIAVGESDFENLNTEDVSSESDPEGSKDKLDDTSSSEGSTIDIKPEVEEVPVEQPEEYLDPDACFTEGCVQRFKCCQVNIEEGLGKSWWILRKTCFLIVEHNWFETFIIFMILLSSGALAFEDIYIEQRKTIRTILEYADKVFTYIFILEMLLKWTAYGFVKFFTNAWCWLDFLIVAVSLVSLIANALGYSELGAIKSLRTLRALRPLRALSRFEGMRVVVNALVGAIPSIMNVLLVCLIFWLIFSIMGVNLFAGKYHYCFNETSEIRFEIEDVNNKTECEKLMEGNNTEIRWKNVKINFDNVGAGYLALLQVATFKGWMDIMYAAVDSRKPDEQPKYEDNIYMYIYFVIFIIFGSFFTLNLFIGVIIDNFNQQKKKFGGQDIFMTEEQKKYYNAMKKLGSKKPQKPIPRPLNKIQGIVFDFVTQQAFDIVIMMLICLNMVTMMVETDTQSKQMENILYWINLVFVIFFTCECVLKMFALRHYYFTIGWNIFDFVVVILSIVGMFLADIIEKYFVSPTLFRVIRLARIGRILRLIKGAKGIRTLLFALMMSLPALFNIGLLLFLVMFIFSIFGMSNFAYVKHEAGIDDMFNFETFGNSMICLFQITTSAGWDGLLLPILNRPPDCSLDKEHPGSGFKGDCGNPSVGIFFFVSYIIISFLIVVNMYIAIILENFSVATEESADPLSEDDFETFYEIWEKFDPDATQFIEYCKLADFADALEHPLRVPKPNTIELIAMDLPMVSGDRIHCLDILFAFTKRVLGDSGELDILRQQMEERFVASNPSKVSYEPITTTLRRKQEEVSAVVLQRAYRGHLARRGFICKKTTSNKLENGGTHREKKESTPSTASLPSYDSVTKPEKEKQQRAEEGRRERAKRQKEVRESKC

SEQ ID NO: 178313 - protein, 1195 aa, Artificial Sequence
  derived and/or modified sequence
FLSPQTFVVLNRGKTLFRFSATPALYILSPFNLIRRIAIKILIHSLFSMIIMCTILTNCVFMTFSNPPDWSKNVEYTFTGIYTFESLVKIIARGFCIDGFTFLRDPWNWLDFSVIMMAYITEFVNLGNVSALRTFRVLRALKTISVIPGLKTIVGALIQSVKKLSDVMILTVFCLSVFALIGLQLFMGNLRNKCVVWPINFNESYLENGTKGFDWEEYINNKTNFYTVPGMLEPLLCGNSSDAGQCPEGYQCMKAGRNPNYGYTSFDTFSWAFLALFRLMTQDYWENLYQLTLRAAGKTYMIFFVLVIFVGSFYLVNLILAVVAMAYEEQNQATLEEAEQKEAEFKAMLEQLKKQQEEAQAAAMATSAGTVSEDAIEEEGEEGGGSPRSSSEISKLSSKSAKERRNRRKKRKQKELSEGEEKGDPEKVFKSESEDGMRRKAFRLPDNRIGRKFSIMNQSLLSIPGSPFLSRHNSKSSIFSFRGPGRFRDPGSENEFADDEHSTVEESEGRRDSLFIPIRARERRSSYSGYSGYSQGSRSSRIFPSLRRSVKRNSTVDCNGVVSLIGGPGSHIGGRLLPEATTEVEIKKKGPGSLLVSMDQLASYGRKDRINSIMSVVTNTLVEELEESQRKCPPCWYKFANTFLIWECHPYWIKLKEIVNLIVMDPFVDLAITICIVLNTLFMAMEHHPMTPQFEHVLAVGNLVFTGIFTAEMFLKLIAMDPYYYFQEGWNIFDGFIVSLSLMELSLADVEGLSVLRSFRLLRVFKLAKSWPTLNMLIKIIGNSVGALGNLTLVLAIIVFIFAVVGMQLFGKSYKECVCKINQDCELPRWHMHDFFHSFLIVFRVLCGEWIETMWDCMEVAGQAMCLIVFMMVMVIGNLVVLNLFLALLLSSFSADNLAATDDDGEMNNLQISVIRIKKGVAWTKLKVHAFMQAHFKQREADEVKPLDELYEKKANCIANHTGADIHRNGDFQKNGNGTTSGIGSSVEKYIIDEDHMSFINNPNLTVRVPIAVGESDFENLNTEDVSSESDPEGSKDKLDDTSSSEGSTIDIKPEVEEVPVEQPEEYLDPDACFTEGCVQRFKCCQVNIEEGLGKSWWILRKTCFLIVEHNWFETFIIFMILLSSGALAFEDIYIEQRKTIRTILEYADKVFTYIFILEMLLKWTAYGFVKFFTNAWCWLDFLIVAVPLNLSGLI

SEQ ID NO: 178314 - DNA, 5943 bp, Artificial Sequence
  derived and/or modified sequence
atggcagcaagactcctagctcccccgggacccgacagtttcaagccatttacgccggagtccctagccaacattgaacggcgcattgccgagtctaagctgaagaagccaccaaaagctgacgggagccacagagaagatgacgaggactctaaaccaaagccaaactcggatctagaggctgggaagagtctgcctttcatttatggcgacattccacagggactggtggccgttcccctcgaagattttgacccttactacctgactcagaaaaccttcgttgtgcttaaccgaggaaaaacattattcaggtttagtgctactccagctctttacattctttcgcccttcaatctgatcaggcgcatcgccatcaaaattctgatccactctgtgtttagtatgatcatcatgtgtaccatcctgaccaactgtgtgtttatgaccttttccaatcctccggactggtctaaaaacgtggaatatacattcactggcatctacacttttgaatccctggttaaaatcatcgccagggggttctgcattgacgggtttaccttcctgcgggacccatggaattggctggacttcagcgtgataatgatggcgtatattacagagtttgttaacttgggcaacgtgtcagcactaaggacttttagagtgttgcgggccctcaaaaccataagtgtcatccccggcttgaaaaccattgttggagccttaattcaatccgtcaagaaattgtctgacgtgatgatattaactgtgttctgtctttcggtcttcgctttgataggacttcaactcttcatgggtaatttaagaaataaatgcgtcgtctggcctatcaattttaacgaatcatatttagaaaatgggacaaaaggattcgattgggaagaatacatcaataacaaaaccaacttctatactgttcccggcatgctggaaccgctcctttgtggtaactcatccgacgccgggcaatgtccggaagggtaccaatgtatgaaggcgggaaggaaccctaattatggctacacctcctttgatactttttcttgggctttccttgctctgttcaggcttatgacccaggactattgggaaaacctgtaccagctgacgctgagggcagctgggaaaacctatatgatattctttgtgctcgtcatctttgttggcagtttctacctagtgaatctcatcttagcagtagtcgccatggcctacgaagaacaaaaccaggcaacattggaagaggctgagcagaaggaggccgagtttaaggcaatgctggagcaacttaagaaacaacaggaagaagcacaagctgccgccatggcaacttccgcgggaaccgtttccgaagatgctattgaggaagagggggaagagggcggagggagccccagaagttcttccgaaataagcaagttaagcagtaaaagtgcaaaggagcgccggaataggcgtaagaaacgaaagcagaaggagctgtcagaaggtgaagagaaaggggatcctgagaaagtattcaaaagcgaaagcgaggacgggatgcggcgcaaagccttcagactgcccgacaacagaatcggaagaaagttttcaataatgaaccagtctctcctgtcgatacccgggtctccgtttctgtccagacataattccaagtcatccattttctccttccgtggtccaggaaggttccgtgaccccggctctgaaaacgaattcgccgatgatgagcattcaacagtggaagagtccgagggaagacgcgacagcctgtttatccccattcgggcccgggaacggcgatccagctatagcggatacagtgggtattcgcaaggttcccgctcttccagaattttccccagcctgaggcgctcagtgaagcgaaactcgactgtggactgcaacggtgtcgtgagcctgatagggggccctggctctcatatcggtggtcggttactccccgaggcaacgacagaggttgagatcaagaaaaagggtcctgggagcctcctggtttctatggaccagctggccagttatggtcggaaggaccggattaattctattatgtctgtggtgaccaatactctggtggaggaactggaagagagccagagaaaatgccctccctgttggtataagtttgccaacacttttctgatctgggagtgccacccatactggatcaaactcaaagaaatcgtaaatctcatagtcatggatccgttcgtggacctggccataacaatctgtattgttctgaatacactgtttatggccatggaacatcaccctatgactcctcagttcgaacacgttctcgcagtagggaatctagttttcacgggtattttcaccgccgaaatgttcctgaagctaatagcaatggacccttactactacttccaggagggctggaacattttcgatggcttcatagtgagtctgtctctcatggagttgagcctggcagacgtagagggtctcagcgtgctgaggagcttcagactcctgcgcgtttttaaactcgccaaaagctggcctacgctgaacatgctcattaagatcataggcaattcagttggagccttaggaaacctgaccttggtgctggccatcattgtcttcattttcgcagtggtaggtatgcagcttttcggtaagagttataaggagtgtgtctgcaagatcaatcaggactgcgaactgccgagatggcatatgcacgacttcttccattctttcctgattgtgttccgggtgctgtgcggagagtggatcgaaaccatgtgggactgcatggaggtcgccgggcaagctatgtgtcttattgtctttatgatggtgatggtgatcggtaaccttgtggtactaaacttgtttctggcgctgctccttagcagtttcagtgcagataatcttgccgcaaccgatgatgatggcgagatgaataatttgcaaatcagtgtcatacggatcaagaaaggcgtggcctggacaaagctgaaggtgcacgccttcatgcaggcccacttcaagcagcgagaggccgatgaagtcaagcctctcgacgagctgtacgaaaaaaaggccaactgtatcgcgaaccataccggggctgacattcacagaaacggcgacttccagaagaatgggaacgggaccacctccggaatcggatccagtgtcgaaaagtacattatcgatgaggaccatatgtccttcatcaataacccaaacctaacagttcgggtgcccatagcagtgggagagtcagattttgagaatttgaatacagaggatgtaagttcagaaagcgatccagaaggcagcaaggacaagctggatgacacatctagtagcgagggatctaccatagatatcaagcctgaggtcgaagaggtgccagtggagcaacctgaggagtacctcgacccagatgcctgcttcacggagggctgcgtgcaaagatttaagtgctgccaagtcaatatcgaagaggggctgggcaaatcatggtggatactgagaaagacttgttttttgattgtggagcataactggtttgaaacattcataatcttcatgattctattgtcctcgggtgctctggccttcgaggatatttacatcgaacagaggaaaaccatcaggacgattctggagtacgccgataaagttttcacatatatttttatcttggagatgctgctcaaatggactgcatacggcttcgtgaagttttttacgaacgcatggtgctggctggattttctgatcgtggcagtgtcactcgtatctctgatcgcaaacgccctcggctacagcgagctcggcgcgattaaatcgttgaggactcttagggctctcagacccctgagagccttgagcagatttgagggaatgcgcgttgtggtgaatgccctagtgggcgccatccctagcattatgaacgttctattggtgtgtctgattttctggctgattttctcaatcatgggtgtgaatttgttcgccggcaaatatcattattgctttaatgagacgagcgagattcggttcgagatagaggacgtaaacaacaaaacggagtgtgagaagctgatggaagggaacaataccgaaatacgatggaaaaacgtcaagataaacttcgataatgtgggagccgggtatttggcattgctgcaggtagctactttcaaaggctggatggatatcatgtatgccgcagtggactctaggaagccagacgaacagccaaagtatgaagacaacatctacatgtatatttatttcgttatatttatcatcttcggatcttttttcacgctaaacctgtttatcggcgtgatcatcgacaattttaaccagcagaaaaagaagtttgggggccaagatatttttatgacagaggaacagaagaaatattataacgccatgaaaaagttaggctcgaagaaaccacagaaacccattcctcggccactcaataaaattcagggaattgtttttgactttgttacacagcaagcgttcgatattgtcattatgatgttaatttgtttgaacatggtgacaatgatggtggaaaccgatactcagtctaaacaaatggagaacattctctactggatcaacttggtttttgttattttttttacgtgtgagtgtgtcctgaaaatgtttgccctcaggcactattattttacaattggctggaatatcttcgacttcgtggtagtgattctttcgatcgtggggatgttcttggctgatatcattgaaaaatacttcgtctctccgactctcttcagggtcattagactcgcacgcattggcaggattctcagactgatcaaaggtgccaagggcatcagaacgctattgtttgccctcatgatgagtctgcctgctctctttaatattggattgttattatttctcgttatgttcatcttctcgatattcgggatgtccaactttgcttatgtcaaacatgaagccggcatcgacgacatgttcaattttgagacctttggaaacagtatgatctgcctgttccagatcacaacgtccgctggctgggacggcctccttcttccaatacttaaccggccgcccgattgttcattggacaaggagcatcctggaagcggattcaaaggagattgcggcaatccctcggtgggcattttctttttcgtgtcatatatcatcatatccttcttgattgtggtgaatatgtacattgccatcatcctcgaaaacttcagcgtggcaacagaagaatctgcagatcccctcagtgaggatgatttcgagacattttacgaaatctgggaaaagtttgatcctgatgcaacccagtttattgagtattgcaagctggccgatttcgccgacgctctggagcacccgcttcgcgtacctaagccaaatacaatagagctgattgcgatggacctgccaatggtctctggagatcgcattcattgcctcgatatcttgttcgcgtttaccaaaagggtgttgggtgatagcggagagctggatatccttcgtcagcagatggaagagcgcttcgtggcctctaatcccagcaaagttagttacgagccaatcaccacaacacttcggcggaagcaggaagaggtgtctgcagtcgtgttgcagcgagcttacagagggcacctcgcaaggcgcggttttatctgcaagaaaacaacaagtaataagctggaaaacggcggaacccacagggaaaagaaagaatccactccctccacggcaagtttgcccagttatgattcagttacaaaacctgaaaaggaaaagcagcagagggctgaggaaggaaggcgagagcgggcaaagaggcagaaggaggtgagagaatccaaatgttag

SEQ ID NO: 178315 - DNA, 5943 bp, Artificial Sequence
  derived and/or modified sequence
atggccgcccggctgctggcccctcctggccctgacagcttcaagcccttcaccccagagagcctggccaacattgaaagaagaattgctgagagcaagctgaagaagccacccaaggcagatggcagccaccgggaggatgatgaggacagcaagcccaagcccaacagcgacctggaggccggcaagagcctgcccttcatctatggagacatcccccagggcctggtggccgtgcccctggaggactttgacccctactacctgacccagaagacctttgtggtgctgaacagaggcaagaccctcttccgcttcagcgccaccccagccctgtacatcctgagccccttcaacctgatccgccgcatcgccatcaagatcctgatccacagcgtcttctccatgatcatcatgtgcaccatcctgaccaactgtgtgttcatgaccttcagcaaccccccagactggagcaagaatgtggagtacaccttcaccggcatctacacctttgagagcctggtgaagatcatcgcccggggcttctgcattgatggcttcaccttcctgcgggacccctggaactggctggacttcagcgtcatcatgatggcctacatcacagaatttgtgaacctgggcaatgtgtctgccctgcggaccttccgggtgctgcgggccctgaagaccatcagcgtcatccctggcctgaagaccatcgtgggcgccctgatccagagcgtgaagaagctgagtgatgtgatgatcctgaccgtcttctgcctgtctgtgtttgccctgattggcctgcagctgttcatgggcaacctgaggaacaagtgtgtggtgtggcccatcaacttcaatgaaagctacctggagaatggcaccaagggctttgactgggaggagtacatcaacaacaagaccaacttctacacagtgcccggcatgctggagcccctgctgtgtggcaacagcagtgatgctggccagtgcccagagggctaccagtgcatgaaggccggcaggaaccccaactacggctacaccagctttgacaccttctcctgggccttcctggccctcttccggctgatgacccaggactactgggagaacctgtaccagctgaccctgcgggctgctgggaagacctacatgatcttctttgtgctggtgatctttgtgggcagcttctacctggtgaacctgatcctggccgtggtggccatggcctatgaggagcagaaccaggccaccctggaggaggccgagcagaaggaggccgagttcaaggccatgctggagcagctgaagaagcagcaggaggaggcccaggccgccgccatggccaccagcgctggcaccgtgtctgaagatgccatcgaggaggagggggaggagggcggcggcagccccaggagcagcagcgagatcagcaagctgagcagcaagagcgccaaggagaggaggaacagaaggaagaagaggaagcagaaggagctgtctgagggggaggagaagggggaccctgagaaggtgttcaagtctgagagtgaagatggcatgaggaggaaggccttccggctgcctgacaaccgcatcggcaggaagttcagcatcatgaaccagagcctgctgagcatccctggcagccccttcctgagccgccacaacagcaagagcagcatcttctccttccggggccctggccgcttccgggaccccggctctgaaaatgaatttgctgatgatgagcacagcacagtggaggagagcgagggcagaagagacagcctcttcatccccatccgggcccgggagcggcgcagcagctacagcggctacagcggctacagccagggcagccgcagcagccgcatcttccccagcctgcggcgctctgtgaagaggaacagcacagtggactgcaatggagtggtgtccctcatcggcggccctggcagccacatcggcggccgcctgctgcctgaggccaccacagaggtggagatcaagaagaagggccctggcagcctgctggtgtccatggaccagctggccagctatggcaggaaggaccgcatcaacagcatcatgtctgtggtgaccaacaccctggtggaggagctggaggagagccagaggaagtgccccccctgctggtacaagtttgccaacaccttcctgatctgggagtgccacccctactggatcaagctgaaggagatcgtgaacctgattgtgatggacccctttgtggacctggccatcaccatctgcatcgtgctgaacaccctcttcatggccatggagcaccaccccatgaccccccagtttgaacatgtgctggccgtgggcaacctggtgttcaccggcatcttcaccgctgagatgttcctgaagctgattgccatggacccctactactacttccaggagggctggaacatctttgatggcttcatcgtgtccctgagcctgatggagctgagcctggctgatgtggagggcctgtctgtgctgcgctccttccggctgctgcgggtcttcaagctggccaagtcctggcccaccctgaacatgctgatcaagatcatcggcaacagcgtgggcgccctgggcaacctgaccctggtgctggccatcatcgtgttcatctttgctgtggtgggcatgcagctgtttgggaagagctacaaggaatgtgtgtgcaagatcaaccaggactgtgagctgccccgctggcacatgcatgacttcttccacagcttcctgattgtgttccgggtgctgtgtggggagtggattgagaccatgtgggactgcatggaggtggccggccaggccatgtgcctgattgtgttcatgatggtgatggtgattggcaacctggtggtgctgaacctcttcctggccctgctgctgagcagcttctctgctgacaacctggccgccacagatgatgatggagagatgaacaacctgcagatcagcgtcatccgcatcaagaagggcgtggcctggaccaagctgaaggtgcacgccttcatgcaggcccacttcaagcagcgggaggctgatgaggtgaagcccctggatgagctgtatgagaagaaggccaactgcatcgccaaccacactggagctgacatccacagaaatggagacttccagaagaatggaaatggcaccaccagcggcatcggcagctctgtggagaagtacatcattgatgaggaccacatgtccttcatcaacaaccccaacctgactgtgcgggtgcccatcgctgtgggggagagtgactttgagaacctgaacacagaagatgtgtcctctgagagtgaccctgagggcagcaaggacaagctggatgacaccagcagcagcgagggcagcaccatcgacatcaagccagaggtggaggaggtgcctgtggagcagcctgaggagtacctggaccctgatgcctgcttcacagagggctgtgtgcagcgcttcaagtgctgccaggtgaacatcgaggagggcctgggcaagtcctggtggatcctgaggaagacctgcttcctgattgtggagcacaactggtttgagaccttcatcatcttcatgatcctgctgagcagcggggccctggcctttgaggacatctacatcgagcagaggaagaccatccgcaccatcctggagtatgctgacaaggtgttcacctacatcttcatcctggagatgctgctgaagtggacagcctacggctttgtgaagttcttcaccaatgcctggtgctggctggacttcctgattgtggccgtgtccctggtgtccctcatcgccaatgccctgggctacagcgagctgggcgccatcaagagcctgcggaccctgcgggccctgcggcccctgcgggccctgagcagatttgagggcatgagggtggtggtgaatgccctggtgggcgccatccccagcatcatgaatgtgctgctggtgtgcctgatcttctggctgatcttcagcatcatgggcgtgaacctgtttgctgggaagtaccactactgcttcaatgagaccagcgagatccgctttgaaattgaagatgtgaacaacaagacagaatgtgagaagctgatggagggcaacaacacagagatccgctggaagaatgtgaagatcaactttgacaacgtgggcgccggctacctggccctgctgcaggtggccaccttcaagggctggatggacatcatgtatgctgctgtggacagcaggaagccagatgagcagcccaagtatgaggacaacatctacatgtacatctacttcgtcatcttcatcatcttcggcagcttcttcaccctgaacctcttcatcggggtcatcatcgacaacttcaaccagcagaagaagaagtttggaggccaggacatcttcatgacagaggagcagaagaagtactacaatgccatgaagaagctgggcagcaagaagccccagaagcccatcccccggcccctgaacaagatccagggcatcgtgtttgattttgtgacccagcaggcctttgacatcgtcatcatgatgctgatctgcctgaacatggtgaccatgatggtggagacagacacccagagcaagcagatggagaacatcctgtactggatcaacctggtgtttgtgatcttcttcacctgtgaatgtgtgctgaagatgtttgccctgcggcactactacttcaccatcggctggaacatctttgattttgtggtggtgatcctgagcatcgtgggcatgttcctggccgacatcatcgagaagtactttgtgagccccaccctcttccgggtcatccggctggcccgcatcggccgcatcctgcggctcatcaagggggccaagggcatccgcaccctgctgtttgccctgatgatgagcctgcctgccctcttcaacatcggcctgctgctcttcctggtgatgttcatcttcagcatcttcggcatgagcaactttgcctacgtgaagcatgaggccggcattgatgacatgttcaactttgagacctttggaaacagcatgatctgcctcttccagatcaccaccagcgctggctgggatggcctgctgctgcccatcctgaaccggcccccagactgcagcctggacaaggagcaccctggcagcggcttcaagggggactgtggcaaccccagcgtgggcatcttcttctttgtgtcctacatcatcatctccttcctgattgtggtgaacatgtacatcgccatcatcctggagaacttctctgtggccacagaggagagcgctgaccccctgtctgaagatgactttgagaccttctatgagatctgggagaagtttgatcctgatgccacccagttcatcgagtactgcaagctggccgactttgctgatgccctggagcaccccctgcgggtgcccaagcccaacaccatcgagctgattgccatggacctgcccatggtgtctggggaccgcatccactgcctggacatcctgtttgccttcaccaagagggtgctgggggacagcggggagctggacatcctgcggcagcagatggaggagagatttgtggccagcaaccccagcaaggtgtcctatgagcccatcaccaccaccctgcggaggaagcaggaggaggtgtctgctgtggtgctgcagagggcctaccggggccacctggcccggcggggcttcatctgcaagaagaccaccagcaacaagctggagaatggaggcacccaccgggagaagaaggagagcacccccagcacagccagcctgcccagctatgattctgtgaccaagccagagaaggagaagcagcagagagctgaggagggcagaagagagcgggccaagaggcagaaggaggtgcgggagagcaaatgttag

SEQ ID NO: 178316 - DNA, 5943 bp, Artificial Sequence
  derived and/or modified sequence
atggccgcccggctgctggccccccccggccccgacagcttcaagccctttacccccgagtccttggccaatatcgagaggagaattgctgagtcaaagttgaagaaaccaccaaaggctgacggcagccatcgcgaagacgatgaagatagcaagccaaaaccaaactctgacctagaggccggtaaatcactcccctttatctatggcgacattcctcaggggctcgtggctgtacctttggaagactttgatccatattatctgacacaaaagacattcgttgtgctgaatcgaggcaagaccttatttagattctcggctacccccgctctgtatattctctctccctttaacctgattagaaggatcgcaattaagatactgatccactccgtcttctccatgattattatgtgcaccatactgactaattgcgttttcatgacttttagcaaccctccagattggtcaaagaacgtagagtacacattcaccggaatttacacctttgagtcgctggtcaagattatagcccggggattttgcattgacggcttcaccttcctccgggacccttggaactggctcgactttagtgtgatcatgatggcatatataacagaatttgtgaacctcggtaacgtgtctgccttaagaacctttcgggtgctgcgcgctctcaaaacaattagcgtgatcccaggcctgaagaccatcgtgggagcgctgatacaatcagttaaaaaattgagtgacgtcatgatactaaccgtgttttgcctctcggtcttcgcactcatcggactccagttgttcatgggaaatctgcggaataaatgtgttgtctggcccatcaatttcaacgaatcttacctggagaatggaactaaaggattcgactgggaggagtacatcaacaacaagaccaatttttacaccgtcccagggatgctggagcccctgctgtgcggcaattcaagcgatgccggccagtgccctgaagggtatcaatgcatgaaggccggaagaaacccgaattatggttatacatcattcgatacattcagttgggcgtttcttgcactcttcagattaatgacacaagactattgggagaatctctatcagctgactctccgcgcagcgggaaagacctacatgatcttctttgtcctcgtcattttcgtgggctctttctatctggtgaatcttatccttgcagtcgtggctatggcctacgaagagcaaaatcaggccaccctggaagaggccgaacagaaggaggccgaattcaaagcaatgttggaacagcttaagaaacagcaggaagaagcccaggctgctgcaatggccacaagtgccggcactgtgagcgaagatgcaatcgaagaggaaggcgaagaagggggcgggagcccccgctcttcatctgagatttcaaagctgagttcaaagtctgctaaggaacggcgcaatcgccgcaaaaaaagaaaacagaaagagctcagcgagggggaagaaaaaggggaccccgagaaggtgttcaaaagtgaatctgaggacggcatgaggagaaaggccttccgactgcccgataaccgaatcgggcggaaatttagcattatgaaccagtctttactcagtattccaggcagccccttcctctctagacacaatagcaagagctccatattcagtttcagaggacctggaaggtttagggacccgggttcagagaatgagttcgctgacgacgagcattcaacagtcgaagaatcagaaggaaggcgggattctctgtttattcccataagggctagagaacggaggtcttcttactctggttactccggctatagtcagggctcaagatccagccggattttcccgtctctccggcgatccgtgaagaggaactctactgtcgactgtaatggggtggtttccttgatcgggggtccaggaagtcacattggagggcggctacttccagaggcaactacggaggtcgagatcaaaaaaaagggacctggctctctgctcgtgagtatggaccagctggccagttacggacgtaaagacagaatcaacagcatcatgtcagtggtgaccaataccctcgttgaggaattagaggagagtcagagaaagtgccccccctgttggtataaattcgctaacactttcctgatctgggagtgccatccgtattggatcaagctgaaggagatcgtgaatctgatcgtgatggacccatttgttgatctcgccattaccatctgtatcgtgctgaacacactgtttatggcgatggagcaccatccaatgaccccgcagtttgaacatgttcttgccgttggcaatctcgtgtttaccggtattttcacggcggaaatgtttttgaagctgatagcgatggatccgtactattactttcaagagggctggaacatctttgacgggttcatagtgagcctgtccctgatggagctgagtctggctgacgtagaggggctcagtgtcttgagaagcttccggttgctgcgcgttttcaaattggctaagtcctggcccaccctcaacatgctgatcaagattatcgggaattccgttggtgccctggggaaccttactctggtgctggctattatcgtttttatcttcgcggtagtggggatgcagttgttcggaaagtcttacaaagagtgcgtttgtaaaattaatcaggattgtgagctcccgcgatggcatatgcatgattttttccactcattcctaatcgtttttagggtcctgtgcggcgagtggattgagaccatgtgggattgcatggaggtggcagggcaagccatgtgtctgatcgtctttatgatggttatggtgatcggcaacctcgtcgtacttaatctcttccttgcgctgctgctgtcctccttttcagccgacaatctcgcggctaccgacgatgacggggagatgaacaacctccaaataagcgtgatcagaattaaaaagggcgtagcttggactaagctcaaggtccatgcatttatgcaagctcacttcaagcagcgggaggcagacgaggtcaagcccctggacgagttgtacgaaaagaaagcaaactgcatcgctaaccacaccggggctgacattcacaggaatggggacttccaaaaaaatggcaacggaacgacctctggaatcggctctagtgtagaaaagtatattatagatgaggatcacatgtcttttatcaataacccgaatctgacagtcagggtcccaatcgccgtgggtgaatccgatttcgaaaatctgaacactgaggatgtgtcgtctgaatccgacccagaaggcagcaaagacaaactcgacgacacatcgtcctccgaaggaagcaccattgacattaagcctgaagttgaggaggttccagtcgaacagcctgaggagtatctcgatccagacgcctgtttcactgagggttgcgtgcaacgattcaagtgctgccaggtgaacatcgaggagggattgggtaagtcctggtggattctcaggaaaacatgtttcctcatcgtcgagcataactggttcgaaacctttatcatttttatgatcctgctgtcaagtggggccttggcatttgaagatatctatatcgagcagaggaagaccatcaggaccattttagagtacgcagataaagttttcacatacatctttatactggagatgctcctgaagtggacagcctacggcttcgtaaaattttttaccaatgcatggtgttggttagacttcctcattgtggcagtgtccctggtgagtctcattgctaatgccctgggctactccgaactcggagccataaagtccctgaggactctaagagccctcagacccctccgtgctctgagtcggtttgagggaatgcgggtggttgtgaatgcactggtgggcgcgattcccagtattatgaacgtgctgttagtatgtctgattttctggctgatcttctccatcatgggtgtgaatttattcgcaggcaagtatcactattgttttaatgagacttccgagattcggtttgaaatagaggatgttaacaacaagaccgagtgtgaaaaactgatggaaggcaacaatacagagatcaggtggaagaacgtgaaaatcaacttcgacaacgtgggcgctggatacctggcactgctgcaggtggcaacattcaaaggctggatggatatcatgtatgccgctgtcgattcccgtaagccagatgagcagccaaaatacgaggacaatatttatatgtatatctacttcgtcatttttatcatctttgggtctttcttcaccttgaatctgtttatcggtgtcataatcgataacttcaaccaacaaaaaaagaagttcggagggcaggacatctttatgacagaggagcaaaagaaatattacaatgctatgaagaagctgggatccaagaagcctcagaaacccatcccaaggcctctgaacaagattcagggcatcgttttcgactttgtcacacagcaggcctttgatattgtaatcatgatgctcatctgcctgaatatggtcaccatgatggtggaaaccgacacccaaagtaaacaaatggagaatatcctgtattggatcaatctggttttcgtgatcttctttacttgtgaatgtgtactcaagatgtttgccctgagacactactatttcactatcggttggaatatctttgactttgtggtagtcatacttagcattgtgggtatgttccttgctgacattattgagaaatatttcgtgagtcccaccttattcagagtcataagattggccaggatcggcagaattctaagacttataaagggggctaagggaatccgcactctccttttcgcgcttatgatgagtctgccagccctgttcaatatcggactgttactctttctagttatgttcatcttttccattttcggcatgtcaaacttcgcttatgtcaagcatgaagccgggatcgacgatatgttcaacttcgaaaccttcggtaattcaatgatctgtctgttccagattaccacctcagctggttgggacgggctcctactccctatcttgaaccggcctccagactgtagcctagataaggaacaccctggcagcgggtttaagggagactgcggcaacccctcagtaggcatattctttttcgtttcgtacattatcatctcattcctgattgtcgtcaacatgtacattgccattatacttgagaatttttccgtagccacggaggaatcagcagatccactttccgaagatgatttcgaaacattctacgaaatttgggaaaaatttgacccggacgcaacacaatttatcgagtactgcaagttagccgacttcgcagacgcgctagaacatccactgcgcgtacctaaacccaatacaatagaattgatagcaatggatctgcctatggtgtcgggggatcgcatacactgtttggacattctgttcgcatttactaagcgagttttgggcgacagtggggaactcgacatcctgaggcagcagatggaggaacgatttgtggcatcaaatcccagcaaggtgtcttacgagcccataactactacactgcgaagaaaacaggaagaagtgtccgccgtcgtacttcagagagcttatcgggggcatctagcccgacgggggtttatctgcaagaagaccacatctaacaaactggaaaatggcgggactcatagggaaaagaaagaatccacacctagtaccgcctctctaccctcttacgatagcgttaccaaaccggagaaagagaaacagcagcgggccgaagaagggaggagggagagagccaaacgccagaaggaggtgagggaatctaagtgttag

SEQ ID NO: 178317 - DNA, 5942 bp, Artificial Sequence
  derived and/or modified sequence
atggcagctaggctcctggcccctcctggtcctgacagctttaagccgttcacgccagaatcattagctaatatcgaacgtaggattgccgagagtaaacttaagaaaccaccgaaggccgacggttcccatagagaagacgacgaggacagtaagcccaagccaaacagcgacctggaagcaggaaagtccctgccttttatttacggggatataccgcaaggcctggtggccgtgcctctggaggatttcgacccttattatctgacgcagaaaacctttgtggtgctgaacaggggaaagacactgttcagattcagcgctacaccagccctgtacatcctctctcctttcaatctcatacgaaggatcgctatcaagattctaattcactctgtcttctccatgattatcatgtgcaccatactgactaattgcgtcttcatgacgttttctaaccctcccgattggagtaagaacgtggagtatacctttaccggcatttacacattcgagtctctagtcaaaatcatcgcacgcggtttttgtatcgatgggtttaccttcctgagggacccatggaactggctagactttagcgtcattatgatggcttacataaccgaatttgtcaatctgggtaacgtctctgcgctgcggacattcagagtcctccgggcactcaaaactatctctgtgattcccggactaaagaccattgtgggggcactcattcagtccgtgaaaaagctgagcgacgtaatgatcctgacagtgttttgtttatctgtcttcgccctgattggcttacagttgtttatgggtaacctcaggaataagtgcgtcgtgtggccaattaacttcaatgaaagttatcttgaaaacggcacgaaaggttttgattgggaggaatacatcaacaataagacaaacttttacacagtaccaggcatgctggaacccttgctctgtggaaatagtagcgatgccggtcagtgcccggaagggtatcagtgcatgaaggccggtagaaatcctaactacggttacaccagtttcgacaccttctcatgggcctttctagctttattccgcctcatgacccaggactactgggagaatctttatcaattgacgttgcgagcagccggaaagacctatatgattttcttcgttttagttatctttgtgggttctttttacctcgtgaacctcatcttggccgtcgtcgcaatggcgtacgaggaacagaaccaggctaccctggaggaggcagagcaaaaggaggcggaattcaaggcaatgctggagcagctcaagaaacagcaggaagaggcacaggcagcagccatggccacaagcgctggtacagtttctgaagacgcaatcgaagaagagggtgaagaagggggaggatctcctaggtcctccagtgagatctccaaattatcaagcaaatctgctaaagaaagacgtaacagacgcaagaaacgtaaacaaaaagaactgagcgaaggagaggagaaaggagatcctgagaaagtgttcaagtccgaaagtgaagacgggatgagaagaaaggcgtttcggttacccgacaaccgcatagggaggaagttctccattatgaaccagagcttgttaagtattccaggatctcccttcctgtcacggcataacagcaagagttccatctttagcttcagaggcccaggccgtttccgtgatcccggaagcgagaatgaattcgccgatgacgagcacagtacagtggaggagtctgagggacgtcgcgatagcctgttcattccgatccgggcaagggaacgacgatcgtcatactctgggtacagtggctactcccagggctcccgcagcagtcggatctttcctagtttaaggcgaagcgtgaaacggaactctacagtggattgcaacggcgtggtgagcctgatcgggggacctggctcacacatcgggggtaggctactcccagaggcaaccactgaggttgaaattaagaagaagggccctggctccttactggtaagcatggaccagttggcctcctatggaagaaaggacaggatcaattcgataatgagcgtggtcaccaatacgttggtggaagaactggaggagtcccaaaggaagtgccccccatgttggtataagttcgccaatacctttctcatttgggaatgccatccctactggattaaattgaaagagatcgttaacttgatcgttatggacccttttgtggacctcgccatcactatctgtatcgtattaaacaccctgtttatggcaatggagcatcaccctatgaccccccagtttgagcacgttctggcagtggggaacttggtattcaccggtatcttcacagctgagatgtttctcaaattgattgcaatggatccgtactactactttcaagaaggatggaacatcttcgatggattcatcgtcagtctgtcacttatggagctcagcctcgctgatgtggaagggctgagcgtacttcgatcctttaggttgctgagggtgttcaaactggctaaatcctggccaaccttaaacatgctcatcaagataatcgggaactccgtgggagccctgggaaacctcactcttgtgctggctataattgtcttcatatttgccgtggtgggcatgcagttgttcggaaaaagttacaaagagtgcgtctgtaaaatcaaccaagactgcgagctgcccagatggcatatgcatgatttcttccacagttttttgatcgtgttcagagttctgtgcggcgaatggattgagaccatgtgggattgtatggaagtagccggtcaggcaatgtgtttgattgtgtttatgatggtaatggtgattgggaacttagtcgtgttgaatctgtttcttgcgctacttcttagtagtttcagtgccgataacctagcagccaccgacgatgacggggaaatgaacaacctgcagataagcgtgatcagaattaagaaaggagttgcctggactaaactgaaggtgcatgcttttatgcaggctcatttcaaacagcgggaagctgatgaggtcaaacccctggatgagttgtacgagaaaaaagccaattgcatagccaatcacaccggggctgacattcatcggaacggggattttcagaagaacgggaacgggactacctccggaatcggcagttctgtggagaaatacattatagacgaagaccacatgtctttcatcaataacccaaatctgacggtccgagtgcccatcgctgtaggtgagagcgactttgaaaacctaaacacagaagatgtatcatcagagtctgatccagagggttccaaagacaagctcgatgacactagtagcagcgaaggcagtaccatcgatataaagccagaagtagaggaggtgcctgtggaacaacccgaggagtatcttgaccctgacgcctgcttcacagaaggttgcgtgcagagattcaaatgctgtcaggtcaacatcgaagaagggctgggaaagagctggtggatcctgcgaaaaacgtgctttctgatcgtggagcataactggttcgaaacttttatcatcttcatgatcttactctcatccggagccctagctttcgaggatatctatattgaacaaaggaagaccattagaacaatcctggaatacgcagacaaggtatttacctacatatttatcctagagatgctgctgaaatggaccgcctacggatttgtgaaattttttaccaatgcttggtgttggttagatttcctgattgtcgctgtgagtctcgtcagtctcattgccaatgccttgggttatagcgagttaggggctatcaaaagtctcaggacattacgcgctctgcggcctctcagggccctttctaggttcgaaggtatgcgggttgtcgtgaacgcgctcgtgggagctattccaagcatcatgaatgtgctactggtgtgtttgatattctggttaatcttttctattatgggagttaacctatttgccggtaagtaccattattgctttaatgagacatcagagatcaggtttgagattgaggacgtcaacaacaagaccgaatgcgagaagcttatggagggaaataacactgaaatcaggtggaaaaacgtgaaaatcaactttgacaatgtgggggctgggtatttagcccttttacaggtagccaccttcaaagggtggatggatataatgtacgccgctgtggattccagaaaaccggacgagcagcccaagtacgaggataatatatacatgtacatctacttcgtgatattcattatattcggcagcttctttacactgaacctgtttatcggggtgattattgataattttaaccagcagaagaaaaagttcggcggacaggacatattcatgacagaagaacagaagaaatactacaatgcaatgaagaagctgggaagcaagaagcctcagaagcctatacctaggccgctcaacaaaatccagggcattgtttttgattttgtgacacagcaagctttcgacatagtaattatgatgttgatttgtttaaacatggtaaccatgatggtggagacagatacccagagcaagcagatggagaacattctgtactggatcaatcttgtgttcgtaattttcttcacctgtgaatgcgtcttgaagatgtttgctttacgacactattatttcactataggctggaacattttcgattttgtagtcgttatcctgagcattgtgggaatgttcctggcagacataatagaaaagtacttcgttagcccaactctgttccgcgtgatccgcctggcacgaattgggaggattctccggctgataaaaggagcgaaggggattcggacattgctgttcgcattaatgatgtccctgcccgctcttttcaacatcggattgctcctatttctcgttatgtttatttttagcatttttggcatgtccaattttgcgtacgtgaaacacgaggccggtatcgacgacatgttcaacttcgagacgtttgggaatagcatgatatgtctctttcagattactaccagtgccggatgggatggccttttactgcccattcttaatcgtcctcctgactgttcgcttgacaaagaacatcccggatctgggtttaaaggtgactgtggcaatccgagcgtagggatcttctttttcgtgtcttatatcatcatatcttttctgattgtcgtcaatatgtacatcgccattattcttgaaaactttagcgtcgccacagaagagtccgctgacccactttctgaggacgactttgagacattttacgagatttgggaaaagttcgatcccgatgccactcagttcatcgaatattgcaagcttgctgatttcgcagacgctctggagcacccccttagagtgccgaagcctaatacaatcgaactgatagccatggatctgcctatggtttccggcgataggatccattgcctggatattctcttcgccttcaccaagcgtgttttaggcgacagcggcgagctggatatcttgcgccagcagatggaggaaaggtttgtggcgtctaatccatcaaaagtcagctatgagcctatcacaacaacccttagacgtaaacaggaggaagtctctgcagtggttctccagagggcgtatagaggccatctcgcccgaagaggtttcatctgcaagaagaccacctcaaataagctcgaaaacgggggaacacatagggaaaagaaagagtcaaccccttcgaccgcatctctcccctcctatgactcggttaccaaacctgaaaaggagaagcagcagagggccgaagaagggaggcgcgagcgagcgaaaaggcagaaggaggtccgcgagtctaaatgcta

SEQ ID NO: 178318 - DNA, 7205 bp, Artificial Sequence
  derived and/or modified sequence
gagcgctccaagatggcgcccaccgcagtcccgcccgccgcatcctcggcgcctttgcagtccggccgcgcctcccgggccccgcgttagggccgccgctgcctccctcgccgccgccgctgccagctgacctgtcctggacgcagcataactaacgaagctgctgcaggatgagaagatggcagcgcggctgcttgcaccaccaggccctgatagtttcaagcctttcacccctgagtcactggcaaacattgagaggcgcattgctgagagcaagctcaagaaaccaccaaaggccgatggcagtcatcgggaggacgatgaggacagcaagcccaagccaaacagcgacctggaagcagggaagagtttgcctttcatctacggggacatcccccaaggcctggttgcagttcccctggaggactttgacccatactatttgacgcagaaaacctttgtagtattaaacagagggaaaactctcttcagatttagtgccacgcctgccttgtacattttaagtccttttaacctgataagaagaatagctattaaaattttgatacattcagtatttagcatgatcattatgtgcactattttgaccaactgtgtattcatgacttttagtaaccctcctgactggtcgaagaatgtggagtacacgttcacagggatttatacatttgaatcactagtgaaaatcattgcaagaggtttctgcatagatggctttacctttttacgggacccatggaactggttagatttcagtgtcatcatgatggcgtatataacagagtttgtaaacctaggcaatgtttcagctctacgcactttcagggtactgagggctttgaaaactatttcggtaatcccaggcctgaagacaattgtgggtgccctgattcagtctgtgaagaaactgtcagatgtgatgatcctgacagtgttctgcctgagtgtttttgccttgatcggactgcagctgttcatggggaaccttcgaaacaagtgtgttgtgtggcccataaacttcaacgagagctatcttgaaaatggcaccaaaggctttgattgggaagagtatatcaacaataaaacaaatttctacacagttcctggcatgctggaacctttactctgtgggaacagttctgatgctgggcaatgcccagagggataccagtgtatgaaagcaggaaggaaccccaactatggttacacaagttttgacacttttagctgggccttcttggcattatttcgccttatgacccaggactattgggaaaacttgtatcaattgactttacgagcagccgggaaaacatacatgatcttcttcgtcttggtcatctttgtgggttctttctatctggtgaacttgatcttggctgtggtggccatggcttatgaagaacagaatcaggcaacactggaggaggcagaacaaaaagaggctgaatttaaagcaatgttggagcaacttaagaagcaacaggaagaggcacaggctgctgcgatggccacttcagcaggaactgtctcagaagatgccatagaggaagaaggtgaagaaggagggggctcccctcggagctcttctgaaatctctaaactcagctcaaagagtgcaaaggaaagacgtaacaggagaaagaagaggaagcaaaaggaactctctgaaggagaggagaaaggggatcccgagaaggtgtttaagtcagagtcagaagatggcatgagaaggaaggcctttcggctgccagacaacagaatagggaggaaattttccatcatgaatcagtcactgctcagcatcccaggctcgcccttcctctcccgccacaacagcaagagcagcatcttcagtttcaggggacctgggcggttccgagacccgggctccgagaatgagttcgcggatgacgagcacagcacggtggaggagagcgagggccgccgggactccctcttcatccccatccgggcccgcgagcgccggagcagctacagcggctacagcggctacagccagggcagccgctcctcgcgcatcttccccagcctgcggcgcagcgtgaagcgcaacagcacggtggactgcaacggcgtggtgtccctcatcggcggccccggctcccacatcggcgggcgtctcctgccagaggctacaactgaggtggaaattaagaagaaaggccctggatctcttttagtttccatggaccaattagcctcctacgggcggaaggacagaatcaacagtataatgagtgttgttacaaatacactagtagaagaactggaagagtctcagagaaagtgcccgccatgctggtataaatttgccaacactttcctcatctgggagtgccacccctactggataaaactgaaagagattgtgaacttgatagttatggacccttttgtggatttagccatcaccatctgcatcgtcctgaatacactgtttatggcaatggagcaccatcctatgacaccacaatttgaacatgtcttggctgtaggaaatctggttttcactggaattttcacagcggaaatgttcctgaagctcatagccatggatccctactattatttccaagaaggttggaacatttttgacggatttattgtctccctcagtttaatggaactgagtctagcagacgtggaggggctttcagtgctgcgatctttccgattgctccgagtcttcaaattggccaaatcctggcccaccctgaacatgctaatcaagattattggaaattcagtgggtgccctgggcaacctgacactggtgctggccattattgtcttcatctttgccgtggtggggatgcaactctttggaaaaagctacaaagagtgtgtctgcaagatcaaccaggactgtgaactccctcgctggcatatgcatgactttttccattccttcctcattgtctttcgagtgttgtgcggggagtggattgagaccatgtgggactgcatggaagtggcaggccaggccatgtgcctcattgtctttatgatggtcatggtgattggcaacttggtggtgctgaacctgtttctggccttgctcctgagctccttcagtgcagacaacctggctgccacagatgacgatggggaaatgaacaacctccagatctcagtgatccgtatcaagaagggtgtggcctggaccaaactaaaggtgcacgccttcatgcaggcccactttaagcagcgtgaggctgatgaggtgaagcctctggatgagttgtatgaaaagaaggccaactgtatcgccaatcacaccggtgcagacatccaccggaatggtgacttccagaagaatggcaatggcacaaccagcggcattggcagcagcgtggagaagtacatcattgatgaggaccacatgtccttcatcaacaaccccaacttgactgtacgggtacccattgctgtgggcgagtctgactttgagaacctcaacacagaggatgttagcagcgagtcggatcctgaaggcagcaaagataaactagatgacaccagctcctctgaaggaagcaccattgatatcaaaccagaagtagaagaggtccctgtggaacagcctgaggaatacttggatccagatgcctgcttcacagaaggttgtgtccagcggttcaagtgctgccaggtcaacatcgaggaagggctaggcaagtcttggtggatcctgcggaaaacctgcttcctcatcgtggagcacaactggtttgagaccttcatcatcttcatgattctgctgagcagtggcgccctggccttcgaggacatctacattgagcagagaaagaccatccgcaccatcctggaatatgctgacaaagtcttcacctatatcttcatcctggagatgttgctcaagtggacagcctatggcttcgtcaagttcttcaccaatgcctggtgttggctggacttcctcattgtggctgtctctttagtcagccttatagctaatgccctgggctactcggaactaggtgccataaagtcccttaggaccctaagagctttgagacccttaagagccttatcacgatttgaagggatgagggtggtggtgaatgccttggtgggcgccatcccctccatcatgaatgtgctgctggtgtgtctcatcttctggctgattttcagcatcatgggagttaacttgtttgcgggaaagtaccactactgctttaatgagacttctgaaatccgatttgaaattgaagatgtcaacaataaaactgaatgtgaaaagcttatggaggggaacaatacagagatcagatggaagaacgtgaagatcaactttgacaatgttggggcaggatacctggcccttcttcaagtagcaaccttcaaaggctggatggacatcatgtatgcagctgtagattcccggaagcctgatgagcagcctaagtatgaggacaatatctacatgtacatctattttgtcatcttcatcatcttcggctccttcttcaccctgaacctgttcattggtgtcatcattgataacttcaatcaacaaaagaaaaagttcggaggtcaggacatcttcatgaccgaagaacagaagaagtactacaatgccatgaaaaagctgggctcaaagaagccacagaaacctattccccgccccttgaacaaaatccaaggaatcgtctttgattttgtcactcagcaagcctttgacattgttatcatgatgctcatctgccttaacatggtgacaatgatggtggagacagacactcaaagcaagcagatggagaacatcctctactggattaacctggtgtttgttatcttcttcacctgtgagtgtgtgctcaaaatgtttgcgttgaggcactactacttcaccattggctggaacatcttcgacttcgtggtagtcatcctctccattgtgggaatgttcctggcagatataattgagaaatactttgtttccccaaccctattccgagtcatccgattggcccgtattgggcgcatcttgcgtctgatcaaaggcgccaaagggattcgtaccctgctctttgccttaatgatgtccttgcctgccctgttcaacatcggccttctgctcttcctggtcatgttcatcttctccatttttgggatgtccaattttgcatatgtgaagcacgaggctggtatcgatgacatgttcaactttgagacatttggcaacagcatgatctgcctgtttcaaatcacaacctcagctggttgggatggcctgctgctgcccatcctaaaccgcccccctgactgcagcctagataaggaacacccagggagtggctttaagggagattgtgggaacccctcagtgggcatcttcttctttgtaagctacatcatcatctctttcctaattgtcgtgaacatgtacattgccatcatcctggagaacttcagtgtagccacagaggaaagtgcagaccctctgagtgaggatgactttgagaccttctatgagatctgggagaagttcgaccccgatgccacccagttcattgagtactgtaagctggcagactttgcagatgccttggagcatcctctccgagtgcccaagcccaataccattgagctcatcgctatggatctgccaatggtgagcggggatcgcatccactgcttggacatcctttttgccttcaccaagcgggtcctgggagatagcggggagttggacatcctgcggcagcagatggaagagcggttcgtggcatccaatccttccaaagtgtcttacgagccaatcacaaccacactgcgtcgcaagcaggaggaggtatctgcagtggtcctgcagcgtgcctaccggggacatttggcaaggcggggcttcatctgcaaaaagacaacttctaataagctggagaatggaggcacacaccgggagaaaaaagagagcaccccatctacagcctccctcccgtcctatgacagtgtaactaaacctgaaaaggagaaacagcagcgggcagaggaaggaagaagggaaagagccaaaagacaaaaagaggtcagagaatccaagtgttagaggagaacaaaaattcagtattatacagatctaaaactcgcaagtgaaagattgtttacaaacttcctgaatattatcaatgcagaacagctgtggagactctaacctgaagatctataccaaacgtcgtctgcttaccacgtaacacagctgcatcttgagcagtgacctgccaagggcaaaggaccccgctccctagacttacagattttctaatgcttgggcaggtggttactgcatgttccacatcagtcaatgcaacttaggacaaaactaaccagatacagaaacagaagagaggctgccgggaccagcatatttccgttgcagccaaatggattttattttttcattttattgattctcagaagcagaaagcatcactttaaaagttcgtttgttcatgcaaactatatttgcattcttacattagttaagctaagcagcaaaaagaaaacacacacacacactcacatttagcccatgtcatttaattgtcagtttctttgacataaagcgcatcttctccacatgggcttcacgtggtttggagatgggtgggggaaaacaatcaggtttcttcaggctgaggaggacttgctcaggccgattccaaacattgtgctcgttcaatgcgtagaaatgatttgcatgatggcatgccgtgatcagaagtcatgcatgagatccatacaccacaggacactactaatctagtcccttgcactgggtcagcctttggacaggacccagccctgcaccgttcactgtatttggagaaaatggtaagagttccataccggctacaattctttgagttcttaaaagtccttcatacaccttctgggtagggaaacaaccaactaattgactaacaccaccaacaacaaaaaacaaacccaatccaacaagcagatggatccgttgcgtgtatatgtttaacagacatctctaacatacagccattgttgcacattttgcaagatgaactatttaatgctgctctgtgtccagtacatgggggagactttgatcccaaatggcttgtactatttatgtcactgtaaaaccaaatcctagggct

SEQ ID NO: 178319 - DNA, 5943 bp, Artificial Sequence
  derived and/or modified sequence
atggccgccagactgctggccccccccggccccgacagcttcaagcccttcacccccgagagcctggccaacatcgagagaagaatcgccgagagcaagctgaagaagccccccaaggccgacggcagccacagagaggacgacgaggacagcaagcccaagcccaacagcgacctggaggccggcaagagcctgcccttcatctacggcgacatcccccagggcctggtggccgtgcccctggaggacttcgacccctactacctgacccagaagaccttcgtggtgctgaacagaggcaagaccctgttcagattcagcgccacccccgccctgtacatcctgagccccttcaacctgatcagaagaatcgccatcaagatcctgatccacagcgtgttcagcatgatcatcatgtgcaccatcctgaccaactgcgtgttcatgaccttcagcaacccccccgactggagcaagaacgtggagtacaccttcaccggcatctacaccttcgagagcctggtgaagatcatcgccagaggcttctgcatcgacggcttcaccttcctgagagacccctggaactggctggacttcagcgtgatcatgatggcctacatcaccgagttcgtgaacctgggcaacgtgagcgccctgagaaccttcagagtgctgagagccctgaagaccatcagcgtgatccccggcctgaagaccatcgtgggcgccctgatccagagcgtgaagaagctgagcgacgtgatgatcctgaccgtgttctgcctgagcgtgttcgccctgatcggcctgcagctgttcatgggcaacctgagaaacaagtgcgtggtgtggcccatcaacttcaacgagagctacctggagaacggcaccaagggcttcgactgggaggagtacatcaacaacaagaccaacttctacaccgtgcccggcatgctggagcccctgctgtgcggcaacagcagcgacgccggccagtgccccgagggctaccagtgcatgaaggccggcagaaaccccaactacggctacaccagcttcgacaccttcagctgggccttcctggccctgttcagactgatgacccaggactactgggagaacctgtaccagctgaccctgagagccgccggcaagacctacatgatcttcttcgtgctggtgatcttcgtgggcagcttctacctggtgaacctgatcctggccgtggtggccatggcctacgaggagcagaaccaggccaccctggaggaggccgagcagaaggaggccgagttcaaggccatgctggagcagctgaagaagcagcaggaggaggcccaggccgccgccatggccaccagcgccggcaccgtgagcgaggacgccatcgaggaggagggcgaggagggcggcggcagccccagaagcagcagcgagatcagcaagctgagcagcaagagcgccaaggagagaagaaacagaagaaagaagagaaagcagaaggagctgagcgagggcgaggagaagggcgaccccgagaaggtgttcaagagcgagagcgaggacggcatgagaagaaaggccttcagactgcccgacaacagaatcggcagaaagttcagcatcatgaaccagagcctgctgagcatccccggcagccccttcctgagcagacacaacagcaagagcagcatcttcagcttcagaggccccggcagattcagagaccccggcagcgagaacgagttcgccgacgacgagcacagcaccgtggaggagagcgagggcagaagagacagcctgttcatccccatcagagccagagagagaagaagcagctacagcggctacagcggctacagccagggcagcagaagcagcagaatcttccccagcctgagaagaagcgtgaagagaaacagcaccgtggactgcaacggcgtggtgagcctgatcggcggccccggcagccacatcggcggcagactgctgcccgaggccaccaccgaggtggagatcaagaagaagggccccggcagcctgctggtgagcatggaccagctggccagctacggcagaaaggacagaatcaacagcatcatgagcgtggtgaccaacaccctggtggaggagctggaggagagccagagaaagtgccccccctgctggtacaagttcgccaacaccttcctgatctgggagtgccacccctactggatcaagctgaaggagatcgtgaacctgatcgtgatggaccccttcgtggacctggccatcaccatctgcatcgtgctgaacaccctgttcatggccatggagcaccaccccatgaccccccagttcgagcacgtgctggccgtgggcaacctggtgttcaccggcatcttcaccgccgagatgttcctgaagctgatcgccatggacccctactactacttccaggagggctggaacatcttcgacggcttcatcgtgagcctgagcctgatggagctgagcctggccgacgtggagggcctgagcgtgctgagaagcttcagactgctgagagtgttcaagctggccaagagctggcccaccctgaacatgctgatcaagatcatcggcaacagcgtgggcgccctgggcaacctgaccctggtgctggccatcatcgtgttcatcttcgccgtggtgggcatgcagctgttcggcaagagctacaaggagtgcgtgtgcaagatcaaccaggactgcgagctgcccagatggcacatgcacgacttcttccacagcttcctgatcgtgttcagagtgctgtgcggcgagtggatcgagaccatgtgggactgcatggaggtggccggccaggccatgtgcctgatcgtgttcatgatggtgatggtgatcggcaacctggtggtgctgaacctgttcctggccctgctgctgagcagcttcagcgccgacaacctggccgccaccgacgacgacggcgagatgaacaacctgcagatcagcgtgatcagaatcaagaagggcgtggcctggaccaagctgaaggtgcacgccttcatgcaggcccacttcaagcagagagaggccgacgaggtgaagcccctggacgagctgtacgagaagaaggccaactgcatcgccaaccacaccggcgccgacatccacagaaacggcgacttccagaagaacggcaacggcaccaccagcggcatcggcagcagcgtggagaagtacatcatcgacgaggaccacatgagcttcatcaacaaccccaacctgaccgtgagagtgcccatcgccgtgggcgagagcgacttcgagaacctgaacaccgaggacgtgagcagcgagagcgaccccgagggcagcaaggacaagctggacgacaccagcagcagcgagggcagcaccatcgacatcaagcccgaggtggaggaggtgcccgtggagcagcccgaggagtacctggaccccgacgcctgcttcaccgagggctgcgtgcagagattcaagtgctgccaggtgaacatcgaggagggcctgggcaagagctggtggatcctgagaaagacctgcttcctgatcgtggagcacaactggttcgagaccttcatcatcttcatgatcctgctgagcagcggcgccctggccttcgaggacatctacatcgagcagagaaagaccatcagaaccatcctggagtacgccgacaaggtgttcacctacatcttcatcctggagatgctgctgaagtggaccgcctacggcttcgtgaagttcttcaccaacgcctggtgctggctggacttcctgatcgtggccgtgagcctggtgagcctgatcgccaacgccctgggctacagcgagctgggcgccatcaagagcctgagaaccctgagagccctgagacccctgagagccctgagcagattcgagggcatgagagtggtggtgaacgccctggtgggcgccatccccagcatcatgaacgtgctgctggtgtgcctgatcttctggctgatcttcagcatcatgggcgtgaacctgttcgccggcaagtaccactactgcttcaacgagaccagcgagatcagattcgagatcgaggacgtgaacaacaagaccgagtgcgagaagctgatggagggcaacaacaccgagatcagatggaagaacgtgaagatcaacttcgacaacgtgggcgccggctacctggccctgctgcaggtggccaccttcaagggctggatggacatcatgtacgccgccgtggacagcagaaagcccgacgagcagcccaagtacgaggacaacatctacatgtacatctacttcgtgatcttcatcatcttcggcagcttcttcaccctgaacctgttcatcggcgtgatcatcgacaacttcaaccagcagaagaagaagttcggcggccaggacatcttcatgaccgaggagcagaagaagtactacaacgccatgaagaagctgggcagcaagaagccccagaagcccatccccagacccctgaacaagatccagggcatcgtgttcgacttcgtgacccagcaggccttcgacatcgtgatcatgatgctgatctgcctgaacatggtgaccatgatggtggagaccgacacccagagcaagcagatggagaacatcctgtactggatcaacctggtgttcgtgatcttcttcacctgcgagtgcgtgctgaagatgttcgccctgagacactactacttcaccatcggctggaacatcttcgacttcgtggtggtgatcctgagcatcgtgggcatgttcctggccgacatcatcgagaagtacttcgtgagccccaccctgttcagagtgatcagactggccagaatcggcagaatcctgagactgatcaagggcgccaagggcatcagaaccctgctgttcgccctgatgatgagcctgcccgccctgttcaacatcggcctgctgctgttcctggtgatgttcatcttcagcatcttcggcatgagcaacttcgcctacgtgaagcacgaggccggcatcgacgacatgttcaacttcgagaccttcggcaacagcatgatctgcctgttccagatcaccaccagcgccggctgggacggcctgctgctgcccatcctgaacagaccccccgactgcagcctggacaaggagcaccccggcagcggcttcaagggcgactgcggcaaccccagcgtgggcatcttcttcttcgtgagctacatcatcatcagcttcctgatcgtggtgaacatgtacatcgccatcatcctggagaacttcagcgtggccaccgaggagagcgccgaccccctgagcgaggacgacttcgagaccttctacgagatctgggagaagttcgaccccgacgccacccagttcatcgagtactgcaagctggccgacttcgccgacgccctggagcaccccctgagagtgcccaagcccaacaccatcgagctgatcgccatggacctgcccatggtgagcggcgacagaatccactgcctggacatcctgttcgccttcaccaagagagtgctgggcgacagcggcgagctggacatcctgagacagcagatggaggagagattcgtggccagcaaccccagcaaggtgagctacgagcccatcaccaccaccctgagaagaaagcaggaggaggtgagcgccgtggtgctgcagagagcctacagaggccacctggccagaagaggcttcatctgcaagaagaccaccagcaacaagctggagaacggcggcacccacagagagaagaaggagagcacccccagcaccgccagcctgcccagctacgacagcgtgaccaagcccgagaaggagaagcagcagagagccgaggagggcagaagagagagagccaagagacagaaggaggtgagagagagcaagtgctag

SEQ ID NO: 178320 - protein, 977 aa, Artificial Sequence
  derived and/or modified sequence
MPAVSKGDGMRGLAVFISDIRNCKSKEAEIKRINKELANIRSKFKGDKALDGYSKKKYVCKLLFIFLLGHDIDFGHMEAVNLLSSNKYTEKQIGYLFISVLVNSNSELIRLINNAIKNDLASRNPTFMCLALHCIANVGSREMGEAFAADIPRILVAGDSMDSVKQSAALCLLRLYKASPDLVPMGEWTARVVHLLNDQHMGVVTAAVSLITCLCKKNPDDFKTCVSLAVSRLSRIVSSASTDLQDYTYYFVPAPWLSVKLLRLLQCYPPPEDAAVKGRLVECLETVLNKAQEPPKSKKVQHSNAKNAILFETISLIIHYDSEPNLLVRACNQLGQFLQHRETNLRYLALESMCTLASSEFSHEAVKTHIDTVINALKTERDVSVRQRAADLLYAMCDRSNAKQIVSEMLRYLETADYAIREEIVLKVAILAEKYAVDYSWYVDTILNLIRIAGDYVSEEVWYRVLQIVTNRDDVQGYAAKTVFEALQAPACHENMVKVGGYILGEFGNLIAGDPRSSPPVQFSLLHSKFHLCSVATRALLLSTYIKFINLFPETKATIQGVLRAGSQLRNADVELQQRAVEYLTLSSVASTDVLATVLEEMPPFPERESSILAKLKRKKGPGAGSALDDGRRDPSSNDINGGMEPTPSTVSTPSPSADLLGLRAAPPPAAPPASAGAGNLLVDVFDGPAAQPSLGPTPEEAFLSELEPPAPESPMALLADPAPAADPGPEDIGPPIPEADELLNKFVCKNNGVLFENQLLQIGVKSEFRQNLGRMYLFYGNKTSVQFQNFSPTVVHPGDLQTQLAVQTKRVAAQVDGGAQVQQVLNIECLRDFLTPPLLSVRFRYGGAPQALTLKLPVTINKFFQPTEMAAQDFFQRWKQLSLPQQEAQKIFKANHPMDAEVTKAKLLGFGSALLDNVDPNPENFVGAGIIQTKALQVGCLLRLEPNAQAQMYRLTLRTSKEPVSRHLCELLAQQF

SEQ ID NO: 178321 - DNA, 2934 bp, Artificial Sequence
  derived and/or modified sequence
atgccggccgtcagcaaaggcgacggtatgcgcggtcttgccgtgttcattagcgacatcaggaattgtaagtcaaaggaggctgagattaaaaggattaacaaggagctcgccaacatcagatcaaaattcaagggagataaagccctggatggctacagcaagaaaaaatatgtgtgtaaactcctatttatctttcttctagggcatgacatcgacttcggccacatggaggccgtgaatttgctgagcagcaacaagtataccgaaaagcagataggctatctgtttatctcagttctcgttaattccaacagtgagctcattcggctcatcaacaacgccattaaaaacgacctggcttctcgaaatccgactttcatgtgcttagccctccattgcatcgccaatgtgggctcacgcgagatgggggaagcatttgccgctgacattccacgcatccttgtagcaggcgactccatggacagtgtaaaacagagcgccgccttatgtctgcttagattgtataaggcctcccccgatctcgtacctatgggagaatggaccgccagggtcgtccacctgcttaacgaccagcacatgggcgtggtgacagctgccgtgtccctgataacctgtctgtgcaaaaaaaatcccgacgacttcaagacgtgtgtctccctagctgtctcaaggctgtcacgaattgtctccagtgcttccactgatttacaagattacacatactatttcgtgccagcaccatggctgagtgtaaagttgcttaggctgctccagtgctatccacctcccgaagacgctgctgtcaaaggccgtctggtcgagtgcttagagacagtgcttaacaaagcccaagaaccacctaaaagcaaaaaagttcagcattctaacgccaagaacgctattctgtttgagacaatttctcttattatccattatgacagtgaaccgaaccttttagtgcgagcatgcaaccagcttggacagtttctgcagcacagggagactaatttgaggtacctggctctggagtctatgtgcacgctggccagctccgagttctctcacgaagctgtaaaaacacatattgatacggtcattaacgccctcaaaaccgaacgggatgtgtcggttcgacagcgggcggccgatctgctgtatgcaatgtgcgataggtccaacgctaagcagatcgtcagcgaaatgctgcggtatctggagaccgccgactatgccataagagaggaaatagtcctgaaggtggctatcctggctgagaagtacgccgtggattattcgtggtacgttgacacaattttaaacctaatacgcatagccggggactatgtgagcgaagaagtgtggtatagagtattacagatcgtgactaaccgtgatgacgttcagggctatgccgccaagacagtgttcgaggccctacaggcgcctgcctgtcacgaaaacatggtgaaggttggaggttacatcctcggggagttcgggaatctgatagccggggaccctagaagcagcccgccagtgcagttcagtctgctacactccaaattccacctgtgttcagtagccacgcgagcactgcttctgtccacgtacatcaagtttatcaacctattcccggagacaaaggcgactattcaaggtgtactgagagcaggtagccagctgaggaacgctgacgtggaacttcagcagcgcgctgtggaatatctgaccctgtcctcagtagcatcaactgatgtcctggccaccgtcctggaggaaatgccacccttccctgaacgcgaaagctcaatcctcgcgaagctaaaaagaaagaaggggcctggcgccggaagcgctctagacgatggtcgccgcgacccttcttcaaacgatattaacggcggcatggaacccacaccatcgaccgtatcgaccccttcccctagcgccgacctgctcggccttagggctgcgccaccgcctgcagccccccctgccagcgccggtgctggaaacctcctcgttgatgtgtttgatggtcctgccgcccaaccctccctgggtcctactcctgaagaggcattcctttcagagttggaacccccagctcccgaatcccccatggcacttctggccgatcctgcccctgctgctgatccaggacccgaagatattggtcccccaatccctgaagctgacgaactgcttaacaaattcgtttgcaaaaataatggggtgctgttcgagaatcagttgctgcagattggagtgaagtctgagttccgacaaaacttgggccgcatgtacctgttttatggaaacaagaccagcgtacagttccagaatttcagtcctacagttgtgcatccaggggatttgcagactcaattagctgtgcagacaaaaagagttgcagctcaagtcgacgggggggcccaggtgcaacaagttctgaacatcgagtgtctacgcgatttcctcaccccgcctctccttagcgtaagattccgctatgggggggctcctcaagctttaacgctcaagctgcccgtaaccattaacaagttctttcaaccaacagagatggcagctcaggatttctttcagaggtggaagcagctatccctgcctcaacaggaggcacagaagatatttaaggccaaccaccctatggacgccgaagttactaaagccaagctgctgggattcggttcagcgctgctggataacgtcgaccccaaccccgagaatttcgtcggcgcaggaattatacagacgaaagcgctccaggtgggttgcctgctgcggctcgaacccaacgcacaggctcagatgtatagattgaccctgcggacttccaaagaaccagtgtccagacatctgtgtgagctgctcgctcaacagttttag

SEQ ID NO: 178322 - DNA, 3499 bp, Artificial Sequence
  derived and/or modified sequence
cggctcagagctccggaccgcgggcggaggggaggggcagggggcggtgccacggcctgccagcccgcccgcccgcccgccagccagccctccccgcggccggctcggctccttggcgctgcctggggtcctttccgcccggtccccgcttgccagcccccgctgctctgtgccctgtccggccaggcctggagccgacaccaccgccatcatgccggccgtgtccaagggcgatgggatgcgggggctcgcggtgttcatctccgacatccggaactgtaagagcaaagaggcggaaattaagagaatcaacaaggaactggccaacatccgctccaagttcaaaggagacaaagccttggatggctacagtaagaaaaaatatgtgtgtaaactgcttttcatcttcctgcttggccatgacattgactttgggcacatggaggctgtgaatctgttgagttccaataaatacacagagaagcaaataggttacctgttcatttctgtgctggtgaactcgaactcggagctgatccgcctcatcaacaacgccatcaagaatgacctggccagccgcaaccccaccttcatgtgcctggccctgcactgcatcgccaacgtgggcagccgggagatgggcgaggcctttgccgctgacatcccccgcatcctggtggccggggacagcatggacagtgtcaagcagagtgcggccctgtgcctccttcgactgtacaaggcctcgcctgacctggtgcccatgggcgagtggacggcgcgtgtggtacacctgctcaatgaccagcacatgggtgtggtcacggccgccgtcagcctcatcacctgtctctgcaagaagaacccagatgacttcaagacgtgcgtctctctggctgtgtcgcgcctgagccggatcgtctcctctgcctccaccgacctccaggactacacctactacttcgtcccagcaccctggctctcggtgaagctcctgcggctgctgcagtgctacccgcctccagaggatgcggctgtgaaggggcggctggtggaatgtctggagactgtgctcaacaaggcccaggagccccccaaatccaagaaggtgcagcattccaacgccaagaacgccatcctcttcgagaccatcagcctcatcatccactatgacagtgagcccaacctcctggttcgggcctgcaaccagctgggccagttcctgcagcaccgggagaccaacctgcgctacctggccctggagagcatgtgcacgctggccagctccgagttctcccatgaagccgtcaagacgcacattgacaccgtcatcaatgccctcaagacggagcgggacgtcagcgtgcggcagcgggcggctgacctcctctacgccatgtgtgaccggagcaatgccaagcagatcgtgtcggagatgctgcggtacctggagacggcagactacgccatccgcgaggagatcgtcctgaaggtggccatcctggccgagaagtacgccgtggactacagctggtacgtggacaccatcctcaacctcatccgcattgcgggcgactacgtgagtgaggaggtgtggtaccgtgtgctacagatcgtcaccaaccgtgatgacgtccagggctatgccgccaagaccgtctttgaggcgctccaggcccctgcctgtcacgagaacatggtgaaggttggcggctacatccttggggagtttgggaacctgattgctggggacccccgctccagccccccagtgcagttctccctgctccactccaagttccatctgtgcagcgtggccacgcgggcgctgctgctgtccacctacatcaagttcatcaacctcttccccgagaccaaggccaccatccagggcgtcctgcgggccggctcccagctgcgcaatgctgacgtggagctgcagcagcgagccgtggagtacctcaccctcagctcagtggccagcaccgacgtcctggccacggtgctggaggagatgccgcccttccccgagcgcgagtcgtccatcctggccaagctgaaacgcaagaaggggccaggggccggcagcgccctggacgatggccggagggaccccagcagcaacgacatcaacgggggcatggagcccacccccagcactgtgtcgacgccctcgccctccgccgacctcctggggctgcgggcagcccctcccccggcagcacccccggcttctgcaggagcagggaaccttctggtggacgtcttcgatggcccggccgcccagcccagcctggggcccacccccgaggaggccttcctcagcgagctggagccgcctgcccccgagagccccatggctttgctggctgacccagctccagctgctgacccaggtcctgaggacatcggccctcccattccggaagccgatgagttgctgaataagtttgtgtgtaagaacaacggggtcctgttcgagaaccagctgctgcagatcggagtcaagtcagagttccgacagaacctgggccgcatgtatctcttctatggcaacaagacctcggtgcagttccagaatttctcacccactgtggttcacccgggagacctccagactcagctggctgtgcagaccaagcgcgtggcggcgcaggtggacggcggcgcgcaggtgcagcaggtgctcaatatcgagtgcctgcgggacttcctgacgcccccgctgctgtccgtgcgcttccggtacggtggcgccccccaggccctcaccctgaagctcccagtgaccatcaacaagttcttccagcccaccgagatggcggcccaggatttcttccagcgctggaagcagctgagcctccctcaacaggaggcgcagaaaatcttcaaagccaaccaccccatggacgcagaagttactaaggccaagcttctggggtttggctctgctctcctggacaatgtggaccccaaccctgagaacttcgtgggggcggggatcatccagactaaagccctgcaggtgggctgtctgcttcggctggagcccaatgcccaggcccagatgtaccggctgaccctgcgcaccagcaaggagcccgtctcccgtcacctgtgtgagctgctggcacagcagttctgagccctggactctgccccgggggatgtggccggcactgggcagccccttggactgaggcagttttggtggatgggggacctccactggtgacagagaagacaccagggtttgggggatgcctgggactttcctccggccttttgtatttttatttttgttcatctgctgctgtttacattctggggggttagggggagtccccctccctccctttcccccccaagcacagaggggagaggggccagggaagtggatgtctcctcccctcccaccccaccctgttgtagcccctcctaccccctccccatccaggggctgtgtattattgtgagcgaataaacagagagacgctaa

SEQ ID NO: 178323 - DNA, 2934 bp, Artificial Sequence
  derived and/or modified sequence
atgcctgctgtgtccaaaggagatggcatgaggggcctggccgtgttcatcagtgacatccggaactgcaagagcaaggaggccgagatcaagaggatcaacaaggagctggccaacatccgcagcaagttcaagggggacaaggccctggatggctacagcaagaagaagtatgtgtgcaagctgctcttcatcttcctgctgggccatgacatcgactttggccacatggaggccgtgaacctgctgagcagcaacaagtacacagagaagcagatcggctacctgttcatctctgtgctggtgaacagcaacagcgagctgatccgcctcatcaacaatgccatcaagaatgacctggccagcaggaaccccaccttcatgtgcctggccctgcactgcatcgccaacgtgggcagccgggagatgggagaggcctttgctgctgacatcccccgcatcctggtggccggggacagcatggattctgtgaagcagagcgctgccctgtgcctgctgcggctgtacaaggccagcccagacctggtgcccatgggagagtggacagcccgggtggtgcacctgctgaatgaccagcacatgggcgtggtgacagctgctgtgtccctcatcacctgcctgtgcaagaagaacccagatgacttcaagacctgtgtgtccctggccgtgtcccggctgagccgcatcgtgtcctctgccagcacagacctgcaggactacacctactactttgtgcctgccccctggctgtctgtgaagctgctgcggctgctgcagtgctacccacctccagaagatgctgctgtgaagggccgcctggtggagtgcctggagaccgtgctgaacaaggcccaggagccccccaagagcaagaaggtgcagcacagcaatgccaagaatgccatcctgtttgagaccatcagcctcatcatccactatgacagcgagcccaacctgctggtgcgggcctgcaaccagctgggccagttcctgcagcaccgggagaccaacctgcgctacctggccctggagagcatgtgcaccctggccagcagcgagttcagccatgaagctgtgaagacccacatcgacaccgtcatcaatgccctgaagacagaaagagatgtgtctgtgcggcagagagctgctgacctgctgtatgccatgtgtgacaggagcaatgccaagcagatcgtgtctgagatgctgcgctacctggagacagctgactatgccatccgggaggagatcgtgctgaaggtggccatcctggccgagaagtatgctgtggactacagctggtacgtggacaccatcctgaacctgatcagaattgctggggactatgtgtctgaggaggtgtggtacagagtgctgcagatcgtgaccaacagagatgatgtgcagggctatgctgccaagacagtgtttgaggccctgcaggccccagcctgccacgagaacatggtgaaggtgggcggctacatcctgggggagtttggaaacctgattgctggggaccccaggagcagcccccctgtgcagttcagcctgctgcacagcaagttccacctgtgcagcgtggccacccgggccctgctgctgagcacctacatcaagttcatcaacctcttccctgagaccaaggccaccatccagggcgtgctgcgggccggcagccagctgagaaatgctgatgtggagctgcagcagagagctgtggagtacctgaccctgagctctgtggccagcacagatgtgctggccaccgtgctggaggagatgccacccttccctgagcgggagagcagcatcctggccaagctgaagaggaagaagggccctggggccggcagcgccctggatgatggccggcgggaccccagcagcaatgacatcaatggaggcatggagcccacccccagcacagtgtccacccccagccccagcgctgacctgctgggcctgcgggccgcccctcctcctgctgcccccccagccagcgctggggccggcaacctgctggtggatgtgtttgatggccctgctgcccagcccagcctgggccccaccccagaggaggccttcctgtctgagctggagcccccagcccctgagagccccatggccctgctggccgaccctgccccagctgctgaccccggcccagaagatattggcccccccatccctgaggctgatgagctgctgaacaagtttgtgtgcaagaacaacggggtgctgtttgagaaccagctgctgcagattggagtgaagtctgagttccggcagaacctgggccgcatgtacctgttctacggcaacaagacctctgtgcagttccagaacttcagccccaccgtggtgcaccctggggacctgcagacccagctggccgtgcagaccaagagggtggccgcccaggtggatggaggagcccaggtgcagcaggtgctgaacattgaatgtctgcgggacttcctgaccccacccctgctgtctgtgcgcttccgctatggaggagccccccaggccctgaccctgaagctgcctgtgaccatcaacaagttcttccagcccacagagatggccgcccaggacttcttccagcgctggaagcagctgagcctgccccagcaggaggcccagaagatcttcaaggccaaccaccccatggatgctgaggtgaccaaggccaagctgctgggctttggaagtgccctgctggacaacgtggaccccaaccctgagaactttgtgggcgccggcatcatccagaccaaggccctgcaggtgggctgcctgctgcggctggagcccaatgcccaggcccagatgtaccgcctgaccctgcggaccagcaaggagcctgtgagccgccacctgtgtgagctgctggcccagcagttctag

SEQ ID NO: 178324 - DNA, 2934 bp, Artificial Sequence
  derived and/or modified sequence
atgcccgccgtgagcaagggcgacggcatgcggggcctggccgtgttcattagtgacatccgaaactgcaagagcaaagaagcggagatcaagagaattaacaaagaattggcgaacattcgctccaaattcaaaggggataaggcccttgatggctactctaagaagaaatacgtctgcaagttgttgtttattttcctcctgggacacgatatcgattttggtcacatggaggcagtgaacctccttagcagtaataaatacacagagaagcagataggttatttatttatcagcgtgttggtgaattccaattcagagcttatccggctgatcaacaacgccatcaaaaacgacctggcctccaggaaccctacattcatgtgcctggcactgcactgtatagccaacgttggcagccgcgagatgggcgaggcctttgccgcggacattcctcgcatcctggtcgccggcgacagcatggattctgttaaacagtccgctgctctgtgtctgctgcgcctgtataaagcatctcctgacttggtccccatgggggaatggaccgcgcgcgtggtgcaccttctcaacgaccagcacatgggtgtggtgactgccgctgtaagcttgataacatgcctttgtaagaaaaatcctgatgacttcaagacatgtgtgtccctagctgtttcccggctctcccggattgtaagttccgcaagcacagatctccaagactatacctattattttgtccctgcaccatggctcagtgttaagctgctgcgtctactgcagtgttacccgccccccgaagatgccgcagtgaagggaaggctggtggaatgcctagagaccgttctcaataaggcccaagaacccccgaagtccaagaaagtccagcattctaatgcaaaaaatgccattctgttcgagactatttccctgattattcactacgactcagaaccaaatttgctagttcgtgcatgcaatcagctgggacagtttctgcagcaccgggagaccaatctgcgatatctggctcttgagtctatgtgcaccttagcgtcctccgaatttagccacgaggcagtaaagacccacattgatacggttatcaacgctctcaaaactgagcgggatgtctcggtgcgccagagagctgctgatctgttgtacgctatgtgcgatcgctcaaatgccaagcaaatcgtgtcggaaatgctgaggtatctcgaaactgctgactacgccatcagggaggagattgttctgaaggtggctatcctggctgaaaagtatgccgtggattattcttggtatgttgatacgatcttgaacctcatcagaatcgccggcgactacgtgtctgaggaagtatggtaccgtgttttgcagatcgttactaaccgagatgatgtacaggggtacgcggccaaaacagtgttcgaggctctgcaggcaccggcctgtcacgagaacatggtcaaagtgggagggtacattttgggtgagttcgggaacttaatcgctggggatccccggagttcacccccggtacagttttctctgctacactcaaagttccacctctgtagcgtggctacacgggcactgctgctatccacttacatcaagttcattaacctgtttcccgaaacgaaggcaaccatacaaggggtcctccgcgccggctcccagctacgcaatgctgacgtcgaactgcagcagcgtgccgttgaatacctgactctgtccagcgttgccagcaccgatgtgctggcgactgttcttgaggagatgcctccgttcccagagcgcgagagtagcatcctggcaaaactaaagaggaaaaaaggccctggcgctggtagtgcgcttgacgatggccggcgtgacccaagcagcaacgatatcaatggcggaatggagcccaccccatctacggtttctacacccagccccagtgctgatctcctgggcttacgcgcagctccaccgccagctgcaccaccggccagcgctggtgctggaaatctcctggtggacgtatttgacgggccggccgctcaaccatctctcgggcccacccccgaagaagcctttctgtctgaactggaaccccccgcacctgagtctccgatggcacttctcgctgaccccgcccctgccgcggaccctggacctgaggacattggccctcccattcccgaggctgatgaactcctcaacaaatttgtgtgcaaaaataacggcgttctgtttgagaaccaattgctgcagatcggcgtgaagtctgagttccgacaaaatctgggccgcatgtatctgttttacgggaacaagacaagtgtgcaatttcagaatttctctcctactgtggttcacccaggtgacttgcagactcaactagcagtccagacaaaacgagtggccgcacaggtggatggcggcgctcaagttcaacaggtgcttaacatagaatgtctgcgcgacttcctcactccacccctgctttcagtgaggttcagatacgggggagctccccaagcgctcactcttaagctgcccgtgaccataaacaagttcttccaaccaaccgaaatggccgctcaggatttctttcagaggtggaaacagctctcactgccacaacaggaggcccagaaaatattcaaggccaaccatccaatggatgccgaagttactaaggcgaaattactgggattcggcagcgcacttctggataatgtcgaccctaatccagagaacttcgttggcgccgggattattcagactaaggcactgcaggtgggctgcttactcagactggaacctaatgcccaggctcagatgtaccgtctcacgctgaggactagtaaggaacctgtatcacggcatttgtgtgagcttctggcccagcagttttag

SEQ ID NO: 178325 - DNA, 2934 bp, Artificial Sequence
  derived and/or modified sequence
atgcccgctgtgtcaaaaggagacggcatgcgcggtctggccgttttcatttcagatatccgcaattgtaagagtaaggaagcagaaatcaagaggatcaataaagaactggcaaatatccggtcaaaatttaagggggataaagcactggacggctactccaagaagaagtatgtctgtaaactgctctttatctttttactcggccatgacatcgacttcgggcacatggaagctgtgaacctcctttcatccaacaaatatactgagaaacagattggatacctgttcatcagtgtccttgtgaatagcaactcggaactgatccggctgattaacaacgccattaagaatgatttggcctcccggaatccaacatttatgtgcctggccttacattgcatagccaatgtagggtcaagagagatgggggaggcatttgctgctgatattccgaggattttagtcgccggagattctatggactctgtcaagcagagcgccgcactgtgcctgttgcgtctctataaggcgagcccagacttggtcccaatgggcgaatggacggcccgagtggtacacctgctcaacgaccagcacatgggagtggtcactgcagcagtctctctcatcacttgtttgtgcaagaaaaatcctgatgactttaagacatgcgtctccttggctgttagcagactgagcagaatcgtctcttccgcttccacggatttgcaagattatacatattattttgtgcctgccccttggctgtccgtgaaacttctacgtctcctgcagtgttacccaccaccggaggatgcagcagtgaagggcaggctggtagagtgcctagagaccgtgttgaacaaggcccaagaaccacctaagagtaagaaggtccaacattccaacgctaagaatgctattctttttgaaacaatcagtctcattatccactacgatagcgagccaaacctgctcgtgcgggcttgtaaccagcttggacagtttttgcagcatcgcgagacaaatctgagatatctcgctcttgaatcaatgtgtaccctggccagctcagagttttctcacgaggccgtgaagacacatatcgacactgtgatcaacgctctcaaaaccgagcgcgacgtttccgtgaggcagcgagcagcggacttgctctatgcgatgtgtgaccgttccaacgcgaagcagatagtaagtgaaatgctgcgctacctggagactgccgactacgctatcagagaggagatcgttttaaaagtagctattcttgctgaaaagtacgccgtggactactcatggtacgttgatactattcttaatctgattaggatcgcgggtgactacgtatccgaagaagtgtggtaccgcgtgcttcaaattgtgactaatcgcgacgatgtacagggctacgctgctaagacagtatttgaagcactacaggccccagcctgtcacgaaaatatggttaaagtggggggatacatcctgggagaatttggcaacctgattgctggtgatcctcgttcaagcccaccagtccagttttctctgctgcattccaaatttcatctatgctctgtcgcaaccagggctctgctgttatctacctatataaaattcattaatctctttccagagactaaagcaactattcagggcgtgctgagagccggatcacagctgcgtaacgccgatgtggaattgcagcagcgagctgttgagtacctgactctgtcttctgttgctagcacagatgtcttagccacagtgttggaagagatgcccccttttcctgagcgtgagagcagcattctggcgaaactcaaacggaagaaaggacccggtgccggatccgccctcgatgatggcaggagggatccttcctcaaacgatatcaatggtggcatggaacccacgcccagtaccgtatcaacacctagcccttcagccgacctgctcggcctcagagctgcacccccaccagccgctcccccagcctcggccggtgctggaaatttgctcgtggacgtttttgatggcccagctgcccagcccagtctcgggccaacgcctgaggaggcttttctgtctgagttggaacctcccgctccagagtctcctatggctctcctggctgaccctgctccagctgcagaccccggacccgaagatatcggcccaccgattcctgaagccgatgagctcctcaacaagtttgtttgcaagaacaacggcgtgctgtttgaaaaccagctgcttcagattggcgtcaagtcagagttcagacagaatttgggtcgaatgtaccttttttatggcaataaaacatcggtccaattccagaacttcagtcccacagttgtacatcctggggatctgcagacccagctggccgtacagacaaaaagggtcgcagctcaggtcgatggtggggcacaggtgcagcaggtgttgaatattgagtgtttgcgggactttcttaccccacccctgctctctgtacgttttcggtacggaggagctccccaggcgctaacactaaagctgcctgtgactatcaataagttttttcagccgacagagatggccgcacaggacttttttcagcggtggaaacagctgagtttgcctcagcaggaggcacaaaaaattttcaaagcgaatcaccctatggacgctgaagtgaccaaggccaagcttctgggatttggctcagccctcttggacaacgtcgacccgaatcctgagaattttgtcggagcaggaattattcagacaaaagccctccaagtcggctgcctgctgcgactggagccaaatgcccaggctcagatgtatcggttaaccttacgaacgtccaaagaaccggtgtctcgccatctatgcgagctcctggcacagcagttttag

SEQ ID NO: 178326 - DNA, 2934 bp, Artificial Sequence
  derived and/or modified sequence
atgcccgccgtgagcaagggcgacggcatgagaggcctggccgtgttcatcagcgacatcagaaactgcaagagcaaggaggccgagatcaagagaatcaacaaggagctggccaacatcagaagcaagttcaagggcgacaaggccctggacggctacagcaagaagaagtacgtgtgcaagctgctgttcatcttcctgctgggccacgacatcgacttcggccacatggaggccgtgaacctgctgagcagcaacaagtacaccgagaagcagatcggctacctgttcatcagcgtgctggtgaacagcaacagcgagctgatcagactgatcaacaacgccatcaagaacgacctggccagcagaaaccccaccttcatgtgcctggccctgcactgcatcgccaacgtgggcagcagagagatgggcgaggccttcgccgccgacatccccagaatcctggtggccggcgacagcatggacagcgtgaagcagagcgccgccctgtgcctgctgagactgtacaaggccagccccgacctggtgcccatgggcgagtggaccgccagagtggtgcacctgctgaacgaccagcacatgggcgtggtgaccgccgccgtgagcctgatcacctgcctgtgcaagaagaaccccgacgacttcaagacctgcgtgagcctggccgtgagcagactgagcagaatcgtgagcagcgccagcaccgacctgcaggactacacctactacttcgtgcccgccccctggctgagcgtgaagctgctgagactgctgcagtgctaccccccccccgaggacgccgccgtgaagggcagactggtggagtgcctggagaccgtgctgaacaaggcccaggagccccccaagagcaagaaggtgcagcacagcaacgccaagaacgccatcctgttcgagaccatcagcctgatcatccactacgacagcgagcccaacctgctggtgagagcctgcaaccagctgggccagttcctgcagcacagagagaccaacctgagatacctggccctggagagcatgtgcaccctggccagcagcgagttcagccacgaggccgtgaagacccacatcgacaccgtgatcaacgccctgaagaccgagagagacgtgagcgtgagacagagagccgccgacctgctgtacgccatgtgcgacagaagcaacgccaagcagatcgtgagcgagatgctgagatacctggagaccgccgactacgccatcagagaggagatcgtgctgaaggtggccatcctggccgagaagtacgccgtggactacagctggtacgtggacaccatcctgaacctgatcagaatcgccggcgactacgtgagcgaggaggtgtggtacagagtgctgcagatcgtgaccaacagagacgacgtgcagggctacgccgccaagaccgtgttcgaggccctgcaggcccccgcctgccacgagaacatggtgaaggtgggcggctacatcctgggcgagttcggcaacctgatcgccggcgaccccagaagcagcccccccgtgcagttcagcctgctgcacagcaagttccacctgtgcagcgtggccaccagagccctgctgctgagcacctacatcaagttcatcaacctgttccccgagaccaaggccaccatccagggcgtgctgagagccggcagccagctgagaaacgccgacgtggagctgcagcagagagccgtggagtacctgaccctgagcagcgtggccagcaccgacgtgctggccaccgtgctggaggagatgccccccttccccgagagagagagcagcatcctggccaagctgaagagaaagaagggccccggcgccggcagcgccctggacgacggcagaagagaccccagcagcaacgacatcaacggcggcatggagcccacccccagcaccgtgagcacccccagccccagcgccgacctgctgggcctgagagccgcccccccccccgccgccccccccgccagcgccggcgccggcaacctgctggtggacgtgttcgacggccccgccgcccagcccagcctgggccccacccccgaggaggccttcctgagcgagctggagccccccgcccccgagagccccatggccctgctggccgaccccgcccccgccgccgaccccggccccgaggacatcggcccccccatccccgaggccgacgagctgctgaacaagttcgtgtgcaagaacaacggcgtgctgttcgagaaccagctgctgcagatcggcgtgaagagcgagttcagacagaacctgggcagaatgtacctgttctacggcaacaagaccagcgtgcagttccagaacttcagccccaccgtggtgcaccccggcgacctgcagacccagctggccgtgcagaccaagagagtggccgcccaggtggacggcggcgcccaggtgcagcaggtgctgaacatcgagtgcctgagagacttcctgaccccccccctgctgagcgtgagattcagatacggcggcgccccccaggccctgaccctgaagctgcccgtgaccatcaacaagttcttccagcccaccgagatggccgcccaggacttcttccagagatggaagcagctgagcctgccccagcaggaggcccagaagatcttcaaggccaaccaccccatggacgccgaggtgaccaaggccaagctgctgggcttcggcagcgccctgctggacaacgtggaccccaaccccgagaacttcgtgggcgccggcatcatccagaccaaggccctgcaggtgggctgcctgctgagactggagcccaacgcccaggcccagatgtacagactgaccctgagaaccagcaaggagcccgtgagcagacacctgtgcgagctgctggcccagcagttctag

SEQ ID NO: 178327 - protein, 403 aa, Artificial Sequence
  derived and/or modified sequence
MEPAGPCGFCPAGEVQPARYTCPRCNAPYCSLRCYRTHGTCAENFYRDQVLGELRGCSAPPSRLASALRRLRQQRETEDEPGEAGLSSGPAPGGLSGLWERLAPGEKAAFERLLSRGEAGRLLPPWRPWWWNRGAGPQLLEELDNAPGSDAAELELAPARTPPDSVKDASAAEPAAAERVLGDVPGACTPVVPTRIPAIVSLSRGPVSPLVRFQLPNVLFAYAHTLALYHGGDDALLSDFCATLLGVSGALGAQQVFASAEEALQAAAHVLEAGEHPPGPLGTRGAMHEVARILLGEGPTNQKGYTLAALGDLAQTLGRARKQAVAREERDHLYRARKKCQFLLAWTNENEAALTPLALDCARAHQAHAVVAEEVAALTGELERLWGGPVPPAPRTLIEELPS

SEQ ID NO: 178328 - DNA, 1212 bp, Artificial Sequence
  derived and/or modified sequence
atggagcccgccggcccctgcggcttctgccccgccggcgaggtgcagcccgccagatacacctgccccagatgcaacgccccctactgcagcctgagatgctacagaacccacggcacctgcgccgagaacttctacagagaccaggtgctgggcgagctgagaggctgcagcgccccccccagcagactggccagcgccctgagaagactgagacagcagagagagaccgaggacgagcccggcgaggccggcctgagcagcggccccgcccccggcggcctgagcggcctgtgggagagactggcccccggcgagaaggccgccttcgagagactgctgagcagaggcgaggccggcagactgctgcccccctggagaccctggtggtggaacagaggcgccggcccccagctgctggaggagctggacaacgcccccggcagcgacgccgccgagctggagctggcccccgccagaaccccccccgacagcgtgaaggacgccagcgccgccgagcccgccgccgccgagagagtgctgggcgacgtgcccggcgcctgcacccccgtggtgcccaccagaatccccgccatcgtgagcctgagcagaggccccgtgagccccctggtgagattccagctgcccaacgtgctgttcgcctacgcccacaccctggccctgtaccacggcggcgacgacgccctgctgagcgacttctgcgccaccctgctgggcgtgagcggcgccctgggcgcccagcaggtgttcgccagcgccgaggaggccctgcaggccgccgcccacgtgctggaggccggcgagcacccccccggccccctgggcaccagaggcgccatgcacgaggtggccagaatcctgctgggcgagggccccaccaaccagaagggctacaccctggccgccctgggcgacctggcccagaccctgggcagagccagaaagcaggccgtggccagagaggagagagaccacctgtacagagccagaaagaagtgccagttcctgctggcctggaccaacgagaacgaggccgccctgacccccctggccctggactgcgccagagcccaccaggcccacgccgtggtggccgaggaggtggccgccctgaccggcgagctggagagactgtggggcggccccgtgccccccgcccccagaaccctgatcgaggagctgcccagctag

SEQ ID NO: 178329 - DNA, 1212 bp, Artificial Sequence
  derived and/or modified sequence
atggagcctgcgggtccatgcggattttgcccggccggagaggttcagccggcacgctacacctgtcctcgatgcaacgctccctattgttctctgagatgctacaggacccacggaacatgtgcagaaaacttctatcgggatcaagttctgggggagttgagaggttgcagcgctcccccatcgcgcctagcgtcagccttacgtcgcctaagacagcagcgagagacggaagatgaacctggggaggctggcttatcctccggacccgcccctggcgggttgtccggtctgtgggagcggctggcccctggagagaaggcggcgtttgagcggctgctgagtagaggagaggccggaaggctacttcctccctggcgaccatggtggtggaacagaggggccggccctcagttgttggaagaactggataatgcccccgggagtgatgccgcggaactcgagctagcccccgccagaacgcctcctgacagcgtgaaggatgcttcagcagcggagcctgctgccgcagagcgggtcctgggtgacgtgcccggagcatgtactccagtggtgcctacgcgaatccccgcaatcgtgagtttatcccgggggcccgtgagtcccttagtgagattccagcttcccaacgtgctgttcgcttatgctcatactttggctttataccacggcggcgacgatgcccttctcagcgatttctgtgctaccctcctgggggtgtccggagctctgggcgctcagcaggtatttgctagtgccgaggaggcgttgcaagctgccgcccacgtccttgaggccggggaacatcctccaggccctctgggaacgcggggagccatgcacgaggtggcaagaatcctgctgggcgaaggcccaactaatcaaaaaggatacactctggctgccctgggagacctggcccagacactagggcgtgcccgcaagcaagcggtcgctagggaggaacgcgatcatctgtaccgagcgagaaagaagtgccagtttctcctggcctggacaaatgagaatgaagccgctttaactcctctggccctggattgtgccagagcccaccaagcacacgctgtcgtggcggaggaggtggccgctctcaccggggagctggagcgtctttggggaggccctgtgcctcctgcccccaggactctgatagaggaactaccttcctag

SEQ ID NO: 178330 - DNA, 1212 bp, Artificial Sequence
  derived and/or modified sequence
atggagcccgccggcccctgtggcttctgcccagctggggaggtgcagcctgcccgctacacctgcccccgctgcaatgccccctactgcagcctgcgctgctaccgcacccacggcacctgtgccgagaacttctacagagaccaggtgctgggggagctgcggggctgcagcgccccacccagccggctggccagcgccctgcggcggctgcggcagcagcgggagacagaagatgagcctggagaggccggcctgagcagcggccctgcccctgggggcctgagcggcctgtgggagcggctggcccctggagagaaggccgcctttgagcggctgctgagcagaggagaggccggccgcctgctgcccccctggaggccctggtggtggaacagaggagctggcccccagctgctggaggagctggacaatgcccctggcagtgatgctgctgagctggagctggccccagcccggaccccaccagattctgtgaaggatgccagcgctgctgagcctgctgctgctgagcgggtgctgggagatgtgcctggggcctgcacccctgtggtgcccacccgcatcccagccatcgtgtccctgagccggggccctgtgagccccctggtgcgcttccagctgcccaacgtgctgtttgcctatgcccacaccctggccctgtaccacggcggagatgatgccctgctgagtgacttctgtgccaccctgctgggcgtgtctggggccctgggcgcccagcaggtgtttgccagcgctgaggaggccctgcaggccgccgcccacgtgctggaggccggggagcaccccccaggccccctgggcaccaggggggccatgcatgaggtggcccgcatcctgctgggggagggccccaccaaccagaagggctacaccctggccgccctgggggacctggcccagaccctgggccgggccaggaagcaggccgtggcccgggaggagcgggaccacctgtaccgggccaggaagaagtgccagttcctgctggcctggaccaatgaaaatgaggccgccctgacccccctggccctggactgtgcccgggcccaccaggcccatgctgtggtggccgaggaggtggccgccctgactggagagctggagcggctgtggggcggccctgtgcccccagcccccaggaccctcatcgaggagctgcccagctag

SEQ ID NO: 178331 - DNA, 1212 bp, Artificial Sequence
  derived and/or modified sequence
atggagcccgccggcccctgcggcttctgccccgccggcgaggtgcagcctgctcggtatacctgtcctcggtgcaatgccccctattgctcattacgatgttatcgcactcacggaacctgcgctgagaacttctatagagatcaggtgcttggggagctgcggggctgttcagcacctccgtctagattagccagcgcccttagaagattaagacagcagcgggagaccgaagatgagcctggcgaggctggtctgagttcaggtccggctccagggggactatccgggctgtgggaaaggcttgctccaggggagaaagcggctttcgagcggctgctgagccggggggaggccggtcggctgctgccaccatggaggccgtggtggtggaacagaggcgcggggcctcagttgctggaagagcttgacaatgccccggggtccgatgcagccgagctggagttggcccccgctagaacgcctcctgattcagtcaaggacgccagcgcagccgaacctgcggccgctgagcgtgttctgggggatgtgcctggcgcctgtacccctgtggtcccgacaaggattcctgccatcgtctccctgagccggggacctgtgtcgcctctggtgaggtttcagctgccaaacgtgttgttcgcctacgcccacacgttggcactgtatcacggcggcgatgacgccctcctttctgatttttgcgccaccctcctgggagtaagtggcgccttgggagcccagcaagtgttcgcctctgcagaggaagccttacaggccgcggctcacgttctagaggccggtgagcacccaccaggtccattgggcacaagaggcgctatgcatgaggtggccagaatcctgctgggggaggggccaacaaaccagaaaggatatacgttggccgctctcggggatctcgcacaaaccctgggccgtgcgcgcaagcaggctgtcgctcgcgaggagagggatcacttgtatcgggccaggaagaagtgccagttcctactggcatggaccaacgagaacgaggctgcgctgacaccactcgctctagactgcgctcgggcccaccaagcacatgcagtggtcgctgaagaagttgccgccctaaccggcgaactcgaacggctgtggggaggcccggttcctcctgcccctcggactctaatagaggagctgccctcctag

SEQ ID NO: 178332 - DNA, 1212 bp, Artificial Sequence
  derived and/or modified sequence
atggaacctgcagggccttgtgggttctgtccagctggtgaggtgcaaccggctcggtacacatgcccacgctgtaatgcgccttactgttcactccgctgctacagaacacacggcacctgcgccgagaatttctacagagatcaggtgctaggcgagttgcggggttgctctgcccctcccagcaggttggcttctgcgctgaggagacttaggcaacagagagaaactgaggacgagcctggcgaggctggcctgagtagcggcccagctccgggtggcctgtcgggtctatgggaaagactggctcctggtgagaaagcggcttttgagagactgcttagcagaggggaagccggtagactgctaccaccatggaggccctggtggtggaaccgcggagctggcccacagcttctcgaggaattggataatgctccaggatctgatgcagcagaactggagctcgcccctgcaaggacccctcccgactccgtgaaagacgcctccgccgctgagcccgcagctgccgaaagggtccttggcgacgttccgggtgcttgcacacctgtggtgcctacccgtattccagctatagtgagcctgagcaggggcccagtttcgccgttagtacgctttcagctgcctaacgtcctatttgcctatgcccatacactggcactctaccatggaggggacgacgcgttactaagtgatttttgcgctacacttctgggtgtttctggggcactgggcgctcagcaggtgtttgcatctgccgaggaagcattacaggctgccgctcacgtccttgaggcaggtgagcacccaccagggcctctgggaacacggggagctatgcacgaggtggcgaggatcctgctcggcgaaggccctacaaaccagaagggttataccttggcggcacttggtgatctggcacagacactcggcagggcccgaaagcaggccgttgcccgagaggagcgggatcacctatatcgagccagaaaaaaatgccagttcctgctcgcgtggacaaatgagaatgaggccgctctcacgcctctggccctggattgcgctagagcccatcaggctcacgccgtggttgcggaggaagttgcagcactcactggcgaactggagcgcctgtgggggggaccggtgccaccagcccctagaactttaatagaagaactgccctcatag

SEQ ID NO: 178333 - DNA, 1296 bp, Artificial Sequence
  derived and/or modified sequence
ctaccaccggcgtgcgttcgcaggtagatcgcggtgccagttgccatggagccggccgggccctgtggcttctgcccggcgggggaggtccagccagcgcgttacacctgccctcgctgtaatgcgccctactgctcgctgcgctgctaccggacgcatggcacctgcgcagaaaacttctaccgtgaccaggtgctgggagagctccgcggttgcagcgctcctcccagccgcctagcaagcgccctacgccggctgcgtcagcaacgcgagaccgaggacgagcctggggaagcaggcctcagctccggcccggcgcccggcggcctatcgggactctgggagcggctggcgccgggcgaaaaagctgccttcgagcggctgctgagccgcggtgaggccgggcggctgctgcctccatggcggccgtggtggtggaaccgcggagccggaccgcagcttctggaggagctggataatgccccgggtagtgacgccgcggagctggagctcgcccctgcgaggaccccgccggattctgtgaaagatgcctccgccgcggagcccgcggccgccgagcgggttcttggagatgtcccgggggcctgcacgcccgtcgtacccacccgcatccccgcgatagtcagcctgagccgcggcccagtctcgccgctcgtgcgcttccagctgcccaatgtgctgttcgcctacgcgcatactctcgccctgtatcacggcggtgacgacgcgctgctctctgacttctgtgccacactgctcggcgtttccggagccctgggtgcccagcaagtcttcgcctctgcggaagaagccctgcaggcggcagcccacgtgctggaagcaggcgagcacccgccggggcccctgggcacacgaggggctatgcacgaggtcgcccgcatcctgctgggcgagggcccgaccaaccagaaaggctacacgctggcagcactgggggacctggcacagaccctgggccgtgcccggaaacaggccgtggctagagaagagcgagatcatctttaccgggcccggaaaaagtgccagttcctcctggcctggaccaacgaaaatgaggcggccctcacacccctggccctagactgcgccagggctcaccaagcccatgctgtggtagccgaggaggtggccgccctcactggggagctggagcggctttggggaggccccgtgccacctgccccaagaactctcattgaggagctccctagctgaacgggttaccctggtcattaataaagctgtgactggtca

SEQ ID NO: 178334 - protein, 495 aa, Artificial Sequence
  derived and/or modified sequence
MPMGSLQPLATLYLLGMLVASCLGRLSWYDPDFQARLTRSNSKCQGQLEVYLKDGWHMVCSQSWGRSSKQWEDPSQASKVCQRLNCGVPLSLGPFLVTYTPQSSIICYGQLGSFSNCSHSRNDMCHSLGLTCLEPQKTTPPTTRPPPTTTPEPTAPPRLQLVAQSGGQHCAGVVEFYSGSLGGTISYEAQDKTQDLENFLCNNLQCGSFLKHLPETEAGRAQDPGEPREHQPLPIQWKIQNSSCTSLEHCFRKIKPQKSGRVLALLCSGFQPKVQSRLVGGSSICEGTVEVRQGAQWAALCDSSSARSSLRWEEVCREQQCGSVNSYRVLDAGDPTSRGLFCPHQKLSQCHELWERNSYCKKVFVTCQDPNPAGLAAGTVASIILALVLLVVLLVVCGPLAYKKLVKKFRQKKQRQWIGPTGMNQNMSFHRNHTATVRSHAENPTASHVDNEYSQPPRNSHLSAYPALEGALHRSSMQPDNSSDSDYDLHGAQRL

SEQ ID NO: 178335 - DNA, 1488 bp, Artificial Sequence
  derived and/or modified sequence
atgccaatgggcagtctgcagccacttgctactctgtaccttctcggaatgctcgtcgctagttgtctaggtcgcctgtcatggtacgatcccgatttccaggcccgcctgacgcggtctaacagcaaatgccagggccaactcgaagtgtatctgaaggatggatggcacatggtatgcagccagagttggggtcggagttctaagcaatgggaagacccgtcacaggcttccaaggtctgccagcggttgaactgcggcgttccgctctctttaggccccttcttagtgacgtacacccctcagtcaagtatcatctgctacgggcagctaggcagtttcagcaattgttctcacagcaggaacgatatgtgtcattctctgggactgacttgccttgagcctcagaaaaccactcctcctactacacgaccccctcctactaccactcccgaaccgaccgccccccctagattgcagcttgtggctcaatcaggcgggcagcattgtgcgggggttgtcgagttctatagcggaagtctcggaggtacaatttcctacgaggcccaggataagacccaggatttggagaatttcttgtgcaataacttacagtgcggaagtttcctgaaacaccttccggagaccgaagccgggagggcccaagacccgggcgaacccagagaacaccagccgcttcccatccagtggaagatacagaattcctcctgcactagcctcgaacactgctttaggaagatcaagccccaaaaatctggaagagtgctagccctactgtgctcaggattccaacccaaagttcagtccagattggtgggcggttcttccatatgcgagggaaccgttgaggtccgacaaggcgcccagtgggctgccctctgtgattcatcctcggcacgctcatctcttcgctgggaggaggtctgccgagaacagcaatgtggatctgtcaactcttatagggtgttggatgctggcgacccaactagccgcggactgttctgtccacaccagaagttatcgcagtgtcacgagttgtgggaacggaactcatactgcaaaaaggtgttcgtgacctgtcaggatcccaatcccgctggactggccgcagggacagtggctagcatcattctggctctggtgctgttggtcgttctgctggtcgtgtgtgggccgctggcgtataaaaaactagttaaaaagttccgacagaaaaagcagaggcagtggatcggccccaccggcatgaaccaaaacatgagcttccatcgaaaccacactgccaccgttcggtctcatgcagaaaaccctacagcatcgcatgttgacaacgaatactcacaacccccgaggaatagtcacctatcggcatacccagcactggagggcgctctgcatcgctcaagtatgcagcctgacaacagttccgacagcgattacgacctgcatggcgcacagagactgtag

SEQ ID NO: 178336 - DNA, 1488 bp, Artificial Sequence
  derived and/or modified sequence
atgcccatgggcagcctgcagcccctggccaccctgtacctgctgggcatgctggtggccagctgcctgggccgcctgtcctggtatgaccctgacttccaggcccggctgaccaggagcaacagcaagtgccagggccagctggaggtgtacctgaaggatggctggcacatggtgtgcagccagagctggggccgcagcagcaagcagtgggaggaccccagccaggccagcaaggtgtgccagaggctgaactgtggggtgcccctgagcctgggccccttcctggtgacctacaccccccagagcagcatcatctgctacggccagctgggcagcttcagcaactgcagccacagcagaaatgacatgtgccacagcctgggcctgacctgcctggagccccagaagaccaccccacccaccacccggcccccacccaccaccaccccagagcccacagccccaccccggctgcagctggtggcccagagcggcggccagcactgtgccggcgtggtggagttctacagcggcagcctgggcggcaccatctcctatgaggcccaggacaagacccaggacctggagaacttcctgtgcaacaacctgcagtgtggcagcttcctgaagcacctgcctgagacagaggccggccgggcccaggaccccggggagccccgggagcaccagcccctgcccatccagtggaagatccagaacagcagctgcaccagcctggagcactgcttcaggaagatcaagccccagaagagcggccgggtgctggccctgctgtgcagcggcttccagcccaaggtgcagagccggctggtgggcggcagcagcatctgtgagggcaccgtggaggtgcggcagggcgcccagtgggccgccctgtgtgacagcagcagcgcccggagcagcctgcgctgggaggaggtgtgccgggagcagcagtgtggctctgtgaacagctacagagtgctggatgctggggaccccaccagccggggcctcttctgcccccaccagaagctgagccagtgccacgagctgtgggagaggaacagctactgcaagaaggtgtttgtgacctgccaggaccccaacccagctggcctggccgccggcaccgtggccagcatcatcctggccctggtgctgctggtggtgctgctggtggtgtgtggccccctggcctacaagaagctggtgaagaagttccggcagaagaagcagaggcagtggattggccccaccggcatgaaccagaacatgtccttccacaggaaccacacagccaccgtgcgcagccatgctgagaaccccacagccagccacgtggacaatgagtacagccagccccccaggaacagccacctgagcgcctacccagccctggagggcgccctgcacaggagctccatgcagcctgacaacagcagtgacagcgactatgacctgcacggggcccagaggctgtag

SEQ ID NO: 178337 - DNA, 1488 bp, Artificial Sequence
  derived and/or modified sequence
atgcccatgggcagcctgcagcccctggccaccctgtacctgctggggatgctcgtggcctcgtgcctgggtcgactttcttggtatgaccctgattttcaagctagactcactaggtcaaattcaaagtgtcaggggcagctggaggtgtacttgaaggatggttggcacatggtatgttctcagtcctgggggcgctcgtccaagcagtgggaagacccttcgcaggcctcgaaggtgtgccagagattgaactgcggcgtgcctctgagtctggggccctttcttgtgacttacacccctcagagctctatcatttgctacgggcagcttggctcttttagcaactgtagccactctcgtaatgatatgtgtcacagcctcgggcttacctgcctggaaccacaaaaaaccacaccccccaccactagacccccccccactacaactccagaacccaccgccccaccgaggttgcagctcgtggcccagtccggaggacaacattgcgccggcgtagtggagttttactccgggtccctaggtggtactatctcctatgaggcacaggataaaacgcaagaccttgagaatttcctgtgcaacaacctgcagtgcggcagttttctgaagcatctgccggaaaccgaggcaggaagggcacaggacccgggcgaacctcgggagcaccaaccgctgcccatacagtggaaaatccaaaactcctcttgtactagcctagaacattgcttccgaaagataaagccccagaagtctggccgtgttctggctcttttgtgcagcggttttcagccaaaggtgcagtcaagactggtgggaggaagctccatttgcgaaggcaccgttgaggtgcgccagggcgcccagtgggccgccctatgtgactccagttctgctcgcagcagtctcaggtgggaagaagtttgcagggagcagcagtgcgggtccgtgaactcctacagggtgctggacgccggcgaccccaccagccggggtctgttttgcccacatcagaagttgagccagtgccacgaactatgggagaggaactcttattgcaagaaggtattcgtcacctgtcaagatccgaatcccgcggggttggccgcgggtaccgtcgcaagcattatcctcgctctcgtgctgctggtggtactgctcgttgtgtgtggccccctggcctataaaaagcttgtcaaaaagttccgccagaagaaacagcgacaatggattggtccaaccggtatgaaccagaacatgtccttccacaggaatcatactgctaccgtgagaagtcacgctgagaatcccacagcgagtcacgtagataacgagtactcccagcctccgaggaatagccacttgtctgcgtatcccgccttggaaggcgcgctgcaccgttctagcatgcagccagacaactcaagcgactccgactatgatttacacggcgcgcagcgactgtag

SEQ ID NO: 178338 - DNA, 1488 bp, Artificial Sequence
  derived and/or modified sequence
atgccgatggggagcttgcagccgctggcaactctgtacctgcttggaatgcttgttgccagctgtctaggcagactgagctggtatgaccccgatttccaggcacggctaacccgctctaattccaaatgccaaggacagcttgaggtgtacctgaaggacggatggcatatggtttgtagtcagagctggggacgaagttctaagcagtgggaggatccttcccaggcctctaaggtgtgtcagcggctcaactgcggtgttcccctgagtcttggccctttccttgtaacttacactcctcagagttctatcatttgttacgggcagcttggaagtttcagcaattgttcacactccagaaacgacatgtgtcattccctgggactaacttgtctagagcctcagaagactacccccccaacaacacgtccacccccaaccaccactccggaaccaaccgcccctcccagactccagctcgtggcccagtcaggcggacagcattgtgctggagtggtggaattttatagtggttcactggggggtaccatatcgtacgaggctcaggacaagacgcaggatctggagaacttcctgtgcaacaacctgcaatgtggatctttcctgaaacacctaccagagactgaggcagggcgagctcaagatcccggtgagcccagagaacaccagcctctcccaatacagtggaaaattcaaaatagtagttgtacgagcttggaacactgtttccgtaaaatcaagcctcaaaagagtggccgtgttctagccctgttgtgctccgggttccagcccaaagtgcaatcccgcttagtcggtgggtcgagtatttgtgaggggaccgtcgaagtgaggcaaggcgctcaatgggcagccctgtgcgatagctcaagcgctcgctcttctctgagatgggaggaggtgtgtcgggagcaacaatgcgggtccgtgaactcatatcgcgttctagacgcgggagacccaacctcaagaggcctcttctgcccccaccagaaactgtcccagtgccatgagctttgggagcgcaattcctactgcaagaaggtgtttgtgacctgccaagatccaaacccggcaggactggccgcaggcaccgtggccagcattatcctcgccctggtgctcttggtggtattacttgttgtgtgtggaccgctggcatataaaaagctggtgaaaaaattcagacagaaaaagcagcggcaatggatcggccctactggcatgaaccaaaacatgtcctttcacagaaatcatacggccaccgtcagaagccacgcagaaaatccgaccgcatcccacgtggacaacgagtattctcagccaccacgaaactcacatctgtctgcttaccccgcactcgagggcgcacttcataggtcctccatgcagcctgataacagcagcgacagcgactatgatctgcacggtgcacagaggctgtag

SEQ ID NO: 178339 - DNA, 3221 bp, Artificial Sequence
  derived and/or modified sequence
aacttcaaacatgggtgacgcaggccccacactgcctgctccccgtcccacccctccctgagcacgccaccccgccctctccctctctgagagcgagatacccggccagacaccctcacctgcggtgcccagctgcccaggctgaggcaagagaaggccagaaaccatgcccatggggtctctgcaaccgctggccaccttgtacctgctggggatgctggtcgcttcctgcctcggacggctcagctggtatgacccagatttccaggcaaggctcacccgttccaactcgaagtgccagggccagctggaggtctacctcaaggacggatggcacatggtttgcagccagagctggggccggagctccaagcagtgggaggaccccagtcaagcgtcaaaagtctgccagcggctgaactgtggggtgcccttaagccttggccccttccttgtcacctacacacctcagagctcaatcatctgctacggacaactgggctccttctccaactgcagccacagcagaaatgacatgtgtcactctctgggcctgacctgcttagaaccccagaagacaacacctccaacgacaaggcccccgcccaccacaactccagagcccacagctcctcccaggctgcagctggtggcacagtctggcggccagcactgtgccggcgtggtggagttctacagcggcagcctggggggtaccatcagctatgaggcccaggacaagacccaggacctggagaacttcctctgcaacaacctccagtgtggctccttcttgaagcatctgccagagactgaggcaggcagagcccaagacccaggggagccacgggaacaccagcccttgccaatccaatggaagatccagaactcaagctgtacctccctggagcattgcttcaggaaaatcaagccccagaaaagtggccgagttcttgccctcctttgctcaggtttccagcccaaggtgcagagccgtctggtggggggcagcagcatctgtgaaggcaccgtggaggtgcgccagggggctcagtgggcagccctgtgtgacagctcttcagccaggagctcgctgcggtgggaggaggtgtgccgggagcagcagtgtggcagcgtcaactcctatcgagtgctggacgctggtgacccaacatcccgggggctcttctgtccccatcagaagctgtcccagtgccacgaactttgggagagaaattcctactgcaagaaggtgtttgtcacatgccaggatccaaaccccgcaggcctggccgcaggcacggtggcaagcatcatcctggccctggtgctcctggtggtgctgctggtcgtgtgcggcccccttgcctacaagaagctagtgaagaaattccgccagaagaagcagcgccagtggattggcccaacgggaatgaaccaaaacatgtctttccatcgcaaccacacggcaaccgtccgatcccatgctgagaaccccacagcctcccacgtggataacgaatacagccaacctcccaggaactcccacctgtcagcttatccagctctggaaggggctctgcatcgctcctccatgcagcctgacaactcctccgacagtgactatgatctgcatggggctcagaggctgtaaagaactgggatccatgagcaaaaagccgagagccagacctgtttgtcctgagaaaactgtccgctcttcacttgaaatcatgtccctatttctaccccggccagaacatggacagaggccagaagccttccggacaggcgctgctgccccgagtggcaggccagctcacactctgctgcacaacagctcggccgcccctccacttgtggaagctgtggtgggcagagccccaaaacaagcagccttccaactagagactcgggggtgtctgaagggggccccctttccctgcccgctggggagcggcgtctcagtgaaatcggctttctcctcagactctgtccctggtaaggagtgacaaggaagctcacagctgggcgagtgcattttgaatagttttttgtaagtagtgcttttcctccttcctgacaaatcgagcgctttggcctcttctgtgcagcatccacccctgcggatccctctggggaggacaggaaggggactcccggagacctctgcagccgtggtggtcagaggctgctcacctgagcacaaagacagctctgcacattcaccgcagctgccagccaggggtctgggtgggcaccaccctgacccacagcgtcaccccactccctctgtcttatgactcccctccccaaccccctcatctaaagacaccttcctttccactggctgtcaagcccacagggcaccagtgccacccagggcccggcacaaaggggcgcctagtaaaccttaaccaacttggttttttgcttcacccagcaattaaaagtcccaagctgaggtagtttcagtccatcacagttcatcttctaacccaagagtcagagatggggctggtcatgttcctttggtttgaataactcccttgacgaaaacagactcctctagtacttggagatcttggacgtacacctaatcccatggggcctcggcttccttaactgcaagtgagaagaggaggtctacccaggagcctcgggtctgatcaagggagaggccaggcgcagctcactgcggcggctccctaagaaggtgaagcaacatgggaacacatcctaagacaggtcctttctccacgccatttgatgctgtatctcctgggagcacaggcatcaatggtccaagccgcataataagtctggaagagcaaaagggagttactaggatatggggtgggctgctcccagaatctgctcagctttctgcccccaccaacaccctccaaccaggccttgccttctgagagcccccgtggccaagcccaggtcacagatcttcccccgaccatgctgggaatccagaaacagggaccccatttgtcttcccatatctggtggaggtgagggggctcctcaaaagggaactgagaggctgctcttagggagggcaaaggttcgggggcagccagtgtctcccatcagtgccttttttaataaaagctctttcatctatagtttggccaccatacagtggcctcaaagcaaccatggcctacttaaaaaccaaaccaaaaataaagagtttagttgaggagaaa

SEQ ID NO: 178340 - DNA, 1488 bp, Artificial Sequence
  derived and/or modified sequence
atgcccatgggcagcctgcagcccctggccaccctgtacctgctgggcatgctggtggccagctgcctgggcagactgagctggtacgaccccgacttccaggccagactgaccagaagcaacagcaagtgccagggccagctggaggtgtacctgaaggacggctggcacatggtgtgcagccagagctggggcagaagcagcaagcagtgggaggaccccagccaggccagcaaggtgtgccagagactgaactgcggcgtgcccctgagcctgggccccttcctggtgacctacaccccccagagcagcatcatctgctacggccagctgggcagcttcagcaactgcagccacagcagaaacgacatgtgccacagcctgggcctgacctgcctggagccccagaagaccaccccccccaccaccagacccccccccaccaccacccccgagcccaccgccccccccagactgcagctggtggcccagagcggcggccagcactgcgccggcgtggtggagttctacagcggcagcctgggcggcaccatcagctacgaggcccaggacaagacccaggacctggagaacttcctgtgcaacaacctgcagtgcggcagcttcctgaagcacctgcccgagaccgaggccggcagagcccaggaccccggcgagcccagagagcaccagcccctgcccatccagtggaagatccagaacagcagctgcaccagcctggagcactgcttcagaaagatcaagccccagaagagcggcagagtgctggccctgctgtgcagcggcttccagcccaaggtgcagagcagactggtgggcggcagcagcatctgcgagggcaccgtggaggtgagacagggcgcccagtgggccgccctgtgcgacagcagcagcgccagaagcagcctgagatgggaggaggtgtgcagagagcagcagtgcggcagcgtgaacagctacagagtgctggacgccggcgaccccaccagcagaggcctgttctgcccccaccagaagctgagccagtgccacgagctgtgggagagaaacagctactgcaagaaggtgttcgtgacctgccaggaccccaaccccgccggcctggccgccggcaccgtggccagcatcatcctggccctggtgctgctggtggtgctgctggtggtgtgcggccccctggcctacaagaagctggtgaagaagttcagacagaagaagcagagacagtggatcggccccaccggcatgaaccagaacatgagcttccacagaaaccacaccgccaccgtgagaagccacgccgagaaccccaccgccagccacgtggacaacgagtacagccagccccccagaaacagccacctgagcgcctaccccgccctggagggcgccctgcacagaagcagcatgcagcccgacaacagcagcgacagcgactacgacctgcacggcgcccagagactgtag

SEQ ID NO: 178341 - protein, 1301 aa, Artificial Sequence
  derived and/or modified sequence
MKIITYFCIWAVAWAIPVPQSKPLERHVEKSMNLHLLARSNVSVQDELNASGTIKESGVLVHEGDRGRQENTQDGHKGEGNGSKWAEVGGKSFSTYSTLANEEGNIEGWNGDTGKAETYGHDGIHGKEENITANGIQGQVSIIDNAGATNRSNTNGNTDKNTQNGDVGDAGHNEDVAVVQEDGPQVAGSNNSTDNEDEIIENSCRNEGNTSEITPQINSKRNGTKEAEVTPGTGEDAGLDNSDGSPSGNGADEDEDEGSGDDEDEEAGNGKDSSNNSKGQEGQDHGKEDDHDSSIGQNSDSKEYYDPEGKEDPHNEVDGDKTSKSEENSAGIPEDNGSQRIEDTQKLNHRESKRVENRITKESETHAVGKSQDKGIEIKGPSSGNRNITKEVGKGNEGKEDKGQHGMILGKGNVKTQGEVVNIEGPGQKSEPGNKVGHSNTGSDSNSDGYDSYDFDDKSMQGDDPNSSDESNGNDDANSESDNNSSSRGDASYNSDESKDNGNGSDSKGAEDDDSDSTSDTNNSDSNGNGNNGNDDNDKSDSGKGKSDSSDSDSSDSSNSSDSSDSSDSDSSDSNSSSDSDSSDSDSSDSSDSDSSDSSNSSDSSDSSDSSDSSDSSDSSDSKSDSSKSESDSSDSDSKSDSSDSNSSDSSDNSDSSDSSNSSNSSDSSDSSDSSDSSSSSDSSNSSDSSDSSDSSNSSESSDSSDSSDSDSSDSSDSSNSNSSDSDSSNSSDSSDSSNSSDSSDSSDSSNSSDSSDSSDSSNSSDSSDSSDSSDSSDSSNSSDSNDSSNSSDSSDSSNSSDSSNSSDSSDSSDSSDSDSSNSSDSSNSSDSSDSSNSSDSSDSSDSSDGSDSDSSNRSDSSNSSDSSDSSDSSNSSDSSDSSDSNESSNSSDSSDSSNSSDSDSSDSSNSSDSSDSSNSSDSSESSNSSDNSNSSDSSNSSDSSDSSDSSNSSDSSNSSDSSNSSDSSDSNSSDSSDSSNSSDSSDSSDSSDSSDSSDSSNSSDSSDSSDSSDSSNSSDSSNSSDSSNSSDSSDSSDSSDSSDSSDSSDSSDSSNSSDSSDSSDSSDSSDSSDSSDSSDSSESSDSSDSSNSSDSSDSSDSSDSSDSSDSSDSSDSSDSSNSSDSSDSSDSSDSSDSSNSSDSSDSSESSDSSDSSDSSDSSDSSDSSDSSDSSDSSNSSDSSDSSDSSDSSDSSDSSDSSDSSDSSDSSDSSDSSDSSDSSDSSDSSDSNESSDSSDSSDSSDSSNSSDSSDSSDSSDSTSDSNDESDSQSKSGNGNNNGSDSDSDSEGSDSNHSTSDD

SEQ ID NO: 178342 - DNA, 3906 bp, Artificial Sequence
  derived and/or modified sequence
atgaagattataacctacttctgtatttgggcggtggcctgggccatcccagtgcctcagtctaaacctctggaacgccacgttgagaaaagtatgaatttgcacctactggcaaggagtaatgtatctgtccaagatgagctgaacgcatcagggacaatcaaagagtctggagtgttagtgcacgaaggggaccggggccggcaggagaatacccaggacggccacaagggcgagggtaatgggagtaagtgggccgaggttggcggaaagagtttttcaacctactcaacgttagctaatgaggagggaaatatcgagggctggaacggggatacgggtaaggcggaaacttatggtcacgacggcatccacggcaaggaggagaatatcacggctaacggtattcaaggccaggttagtatcatcgacaacgcgggcgccacgaacaggagcaataccaacggcaatacagacaagaacactcagaacggcgacgtcggggacgctggacacaatgaggacgtggcagttgtgcaggaagacggcccccaagtggccggctctaacaactctactgataacgaagatgagatcattgagaactcatgtcgtaacgaggggaacacatccgagataaccccccagatcaacagtaaaagaaacggtacaaaggaagccgaagtgacccccggaacaggggaggacgcggggctcgacaactctgacgggtccccatccggcaacggcgccgatgaggacgaggatgagggcagcggtgatgatgaagatgaggaggcaggcaatggcaaagactccagtaacaatagcaagggtcaagagggccaggaccatggcaaagaggacgaccatgattcatctattgggcagaactctgattcgaaggagtactatgatccggaagggaaagaagacccccataatgaggttgacggagacaaaacaagcaagtcggaggagaattctgcaggcattccagaggacaacggctcgcagcggatcgaggacacacaaaagctcaaccaccgagaatctaaacgggttgagaaccggataacaaaggagtctgaaactcacgccgtgggtaaaagccaggacaaaggcatcgagatcaaggggccttcctccggcaataggaacattacaaaggaggtgggtaagggaaacgaaggaaaggaggacaagggccaacatggtatgatcctgggcaaagggaacgtgaagacacagggcgaggtggtgaatatcgagggcccagggcagaaaagtgagcccggcaataaagttggacacagcaacacaggttccgatagtaatagcgatggatacgatagttacgatttcgacgataagtctatgcaaggggacgaccccaatagttctgatgagagtaatggcaatgacgacgccaacagcgagtccgacaacaactcttctagccgcggggacgccagctacaactccgatgaaagcaaagacaacggtaatggttctgatagcaagggcgccgaggatgatgactctgactcaacctcggacacaaacaatagcgactccaatggaaatggcaacaacgggaatgatgacaacgataagtcagactccgggaagggcaaatccgatagcagtgatagtgactctagcgactcttcgaactcttcagattcatcagatagcagtgattctgactcatccgactctaactctagcagcgactctgacagctccgacagcgattctagtgactcttctgacagcgattccagcgactcttcaaactcctcagactccagtgacagttcagatagcagtgattcaagtgactctagcgattcaagcgacagcaaaagcgactcctccaagagtgagagcgatagttcagactcggactctaagagtgactcaagcgattctaattcttccgactcctcagacaattccgactcgtccgattcatcaaattccagcaactcatctgatagtagcgactcatcagactctagcgattcaagtagtagttcggattcctcaaatagctctgatagctccgactccagcgactcctcaaacagcagcgaaagtagtgacagtagcgacagctctgactccgacagcagtgatagcagcgattcctctaacagtaatagctccgattcagatagtagcaattcctctgatagctcggacagcagtaattcatctgactcatcagacagcagtgactcttccaactctagtgacagttctgactcctcagatagctcaaacagttccgacagctccgacagctccgattccagtgactcctctgatagcagcaacagttctgattccaacgactcctctaacagttccgatagctccgacagttccaattcttccgatagttcaaacagcagcgacagttctgactctagtgatagcagcgattctgatagttctaacagctccgatagctccaattcctctgattcctctgacagttctaactcgtcggactcaagtgactcctctgactcatctgacgggagcgattctgattcctccaacaggtcagacagtagtaactctagtgatagtagtgatagctctgactccagcaactcttctgactcttccgactcttctgacagcaacgagagcagcaactctagcgacagctctgactcatccaacagcagtgattctgacagttcggatagctccaactcttccgattccagtgatagtagcaactcctctgactcctcggagtcttctaattcatcggataattctaatagcagcgactcctcgaacagttctgactcttctgacagctccgattcttctaacagcagtgactctagtaattcttccgactctagtaatagcagtgactcttccgactccaacagttctgactcttcagacagttccaactccagtgactcctctgactcgtcggatagcagtgactcatctgacagctctgatagttcaaatagtagcgactccagtgatagctctgattccagcgattcatccaatagcagcgactcctctaactcttccgactcctctaactccagtgactcatccgattcctccgactcgtccgatagttcagactcctcagactccagcgactcctccgacagcagcaattcttccgatagtagcgactcttcagacagctctgactcctcagacagtagtgacagcagcgattcctctgactctagtgaaagtagcgattcatccgactcctctaattcctccgactcttccgacagcagcgacagtagcgacagcagtgattcttctgactcatctgacagcagtgattcatccgattcgtccaattcctctgactctagtgattctagcgactcttccgactcatctgattcaagtaattcctctgactcatctgacagtagcgagtcctccgactcttctgattcatccgacagcagtgattctagtgattcaagtgattccagcgattcctccgatagctcggactcctctaatagtagtgattcttcagatagttctgactctagcgactcttctgactccagcgacagctctgactcaagcgattcctcagatagctccgactcatccgactcttctgactcctccgacagctcagactcctctgactcgtcagactcatctgacagcaatgaatctagcgattcttccgacagctccgacagttcagacagcagcaattcctccgactcctctgactcttccgattccagcgacagcacctccgattccaatgacgagagcgacagccaatcaaaatctgggaatggaaataataacggttccgattcagacagtgattctgagggctcggactctaaccatagcaccagcgacgactag

SEQ ID NO: 178343 - DNA, 3906 bp, Artificial Sequence
  derived and/or modified sequence
atgaaaatcatcacatacttctgtatctgggctgtggcctgggcaatccccgtgccccaatcaaaacctctggagaggcatgttgagaaaagcatgaacctgcacctgcttgctaggagtaatgtgtccgtgcaggacgagctcaatgcctctggaacaatcaaagagagcggcgtgcttgtgcacgagggggacaggggcagacaggagaacactcaggatggccacaagggcgagggcaatggcagcaaatgggcggaggtgggtggtaaatcattcagtacttacagcactctcgcaaatgaggaagggaacattgaaggctggaatggcgataccggcaaagcagaaacttatggtcacgacggcatccacggaaaggaagagaatattaccgccaatgggatccagggccaggttagtatcattgacaacgctggcgccactaatcggtctaacacaaacggcaataccgataaaaacacccagaatggcgacgtcggagacgccgggcataacgaagatgtggccgtggtccaggaagatggtccccaggtagcaggcagtaacaattctaccgataatgaggacgaaattattgagaactcctgccgcaatgagggaaatacttctgagatcacccctcagatcaattccaaaaggaatgggaccaaagaggctgaggttacccccgggactggagaggacgcaggcctggacaattccgatggaagtcccagcggtaacggcgccgacgaagacgaagacgagggctctggagacgacgaggacgaggaggcggggaacggaaaggatagcagcaataacagtaagggccaagaagggcaggatcatggtaaggaagatgaccacgatagtagcataggacagaacagcgatagtaaagaatactacgatcctgaagggaaggaggatccacacaacgaggtggatggcgacaaaactagtaagagtgaggagaattcagcaggcattcccgaggacaacgggagccagcgcatcgaagatacacaaaagctaaatcatagggagtcaaagagagtggaaaaccgcattactaaggaatctgaaacacacgcagtggggaaaagtcaggataaaggaatcgaaattaaaggtccaagcagcgggaaccgcaacatcacgaaagaggtgggtaagggaaacgagggcaaggaggacaagggtcagcacggaatgattctcggaaagggaaatgtaaagacacagggggaggtggtgaatatcgaaggacccggacagaagagtgagcctgggaacaaggttggtcacagcaatactggctctgattctaactctgatggatacgatagctatgactttgacgataagagtatgcagggggatgacccaaattcttctgacgagagcaacggcaacgatgatgcaaattctgaaagcgataacaacagcagctcacggggtgatgccagttataactccgacgagtcaaaggacaacgggaacggttccgatagcaaaggagcagaagacgatgattctgattccaccagcgatacgaataacagtgacagcaatggcaacggaaataatggtaacgatgacaacgataagtccgattcgggaaaagggaaatctgacagctctgattcggactcctcagacagtagcaacagcagtgacagttcagacagcagtgattcagacagcagcgacagtaattcctcctccgacagtgactcctctgattctgatagctccgattcttctgattcagacagctctgatagctctaacagcagtgactccagcgattcttccgacagctctgactcatccgatagtagtgattcctcagactccaagagcgactccagcaagtccgagtcagacagtagcgactctgatagcaagtctgactctagcgacagtaactctagcgattcctctgacaactcagactccagcgactcaagtaatagcagtaattccagcgactcgtctgatagcagtgattcatccgactcttcgtcctcgtcagactccagtaactcctcagatagcagtgattccagcgattcgtccaacagctcagagtccagcgacagtagtgattcctctgactccgacagcagtgatagttctgactcgagcaacagtaactcatccgattctgatagctcaaattcttccgatagtagcgattcctcaaactcatcagactcatcagactcctccgattcctccaatagctctgattccagtgactcaagcgattcctctaattcttcagactcatctgattcaagtgactcgagtgacagctctgatagctcaaacagttcagattccaacgattcatcaaacagctcagattcttccgactcaagcaacagcagcgacagcagcaattcctctgactcatccgactcttccgactcttccgactcagactccagcaacagttccgactcgtccaactcgtcagactcatcagacagtagtaactctagcgactcgtctgatagctcagactcctcagatggctccgactcggacagcagcaatcggtcagattcatccaactctagcgactcttccgacagtagcgacagttccaattcctcagactctagcgactcttcagacagcaatgaatcaagcaatagctctgattcgtctgatagttctaactcttccgacagcgattcaagtgacagctccaattcttctgattcttcagactcatccaattcaagtgactcttcagaatcgagcaactcatccgataattcaaatagcagcgattcaagcaactcctcagacagctccgacagtagcgatagtagcaactcatctgacagcagcaattcttcagattcatccaacagctctgattcatcagacagcaactcttcagactcaagtgactcgtcaaatagtagtgatagctctgatagcagcgactcctccgattcgtctgactcctcagatagctcaaattcctccgatagctctgattcctccgacagctcagattcctctaacagctctgacagttcaaactcatctgatagcagcaacagctcagacagctccgatagttccgattctagcgatagttccgactcgagtgactctagtgattccagtgactcttccaactcctcagatagtagtgactctagtgactcttcagatagctcggactcctccgacagctctgatagttccgacagcagtgagagtagcgattcctctgatagttccaatagttccgactctagcgattcctctgactccagcgactcctcagactcatctgactctagtgacagcagcgacagcagcgatagcagcaactctagcgactccagcgactcatctgactcctcggattcctccgattccagcaattcttccgactccagtgactcatccgagtcatctgatagcagcgactccagcgactcctcagactctagcgattcctccgactcttccgattcctccgacagctcagattcttcaaacagctcggacagctcggattcaagcgattcttcagatagcagcgatagttcagattcatccgacagctcagatagcagcgacagcagtgactccagtgactcctcggactccagtgactcctccgacagctcagacagtagtgacagcagcgacagcaatgaaagctccgactctagcgacagttctgatagttctgactcttctaatagcagcgacagtagtgattcatctgattcctctgactccacaagtgattcgaacgatgaatccgacagccagtctaaatcaggcaatggtaacaacaacggaagcgacagtgactcagatagtgaaggttcagattccaatcacagtacctccgacgattag

SEQ ID NO: 178344 - DNA, 3906 bp, Artificial Sequence
  derived and/or modified sequence
atgaagatcatcacctacttctgcatctgggccgtggcctgggccatccctgtgccccagagcaagcccctggagagacatgtggagaagtccatgaacctgcacctgctggcccggagcaatgtgtctgtgcaggatgagctgaatgccagcggcaccatcaaggagagcggcgtgctggtgcatgaaggagaccggggccggcaggagaacacccaggacggccacaagggggagggcaatggcagcaagtgggccgaggtgggcggcaagagcttcagcacctacagcaccctggccaatgaggagggcaacatcgagggctggaatggagacaccgggaaggccgagacctacggccatgatggcatccacggcaaggaggagaacatcacagccaacggcatccagggccaggtgtccatcatcgacaatgctggggccaccaacagaagcaacaccaatggaaacacagacaagaacacccagaatggagatgtgggagatgctggccacaatgaagatgtggccgtggtgcaggaggatggcccccaggtggccggcagcaacaacagcacagacaatgaagatgagatcatcgagaacagctgcagaaatgaaggcaacaccagcgagatcaccccccagatcaacagcaagagaaatggcaccaaggaggccgaggtgaccccaggcactggagaagatgctggcctggacaacagtgatggcagccccagcggaaatggagcagatgaagatgaagatgagggcagcggagatgatgaagatgaggaggccggaaatggcaaggacagcagcaacaacagcaagggccaggagggccaggaccacggcaaggaggatgaccatgacagcagcatcggccagaacagcgacagcaaggagtactatgaccctgagggcaaggaggacccccacaatgaggtggatggagacaagaccagcaagtcagaagaaaattctgctggcatccctgaggacaatggcagccagagaattgaggacacccagaagctgaaccaccgggagagcaagagggtggagaaccgcatcaccaaggagagcgagacccatgctgtgggcaagagccaggacaagggcatcgagatcaagggccccagcagcggcaacagaaacatcaccaaggaggtgggcaaaggaaatgaaggcaaggaggacaagggccagcacggcatgatcctgggcaaaggaaatgtgaagacccagggcgaggtggtgaacatcgagggccctggccagaagtctgagcccggcaacaaggtgggccacagcaacacaggcagtgacagcaacagtgatggctatgacagctatgactttgatgacaagtccatgcagggagatgaccccaacagcagtgatgagagcaatggaaatgatgatgccaacagcgagagtgacaacaacagcagcagcagaggagatgccagctacaacagtgatgagagcaaggacaatggaaatggaagtgacagcaaaggagcagaagatgatgacagcgacagcaccagtgacaccaacaacagcgacagcaatggaaatggaaataatggaaatgatgacaatgacaagagtgacagcggcaagggcaagagtgacagcagtgacagcgacagcagtgacagcagcaacagcagtgacagcagtgacagcagtgacagcgacagcagtgacagcaacagcagcagtgacagcgacagcagtgacagcgacagcagtgacagcagtgacagcgacagcagtgacagcagcaacagcagtgacagcagtgacagcagtgacagcagtgacagcagtgacagcagtgacagcagtgacagcaagagtgacagcagcaagtctgagagtgacagcagtgacagcgacagcaagagtgacagcagtgacagcaacagcagtgacagcagtgacaacagcgacagcagtgacagcagcaacagcagcaacagcagtgacagcagtgacagcagtgacagcagtgacagcagcagcagcagtgacagcagcaacagcagtgacagcagtgacagcagtgacagcagcaacagcagcgagagcagtgacagcagtgacagcagtgacagcgacagcagtgacagcagtgacagcagcaacagcaacagcagtgacagcgacagcagcaacagcagtgacagcagtgacagcagcaacagcagtgacagcagtgacagcagtgacagcagcaacagcagtgacagcagtgacagcagtgacagcagcaacagcagtgacagcagtgacagcagtgacagcagtgacagcagtgacagcagcaacagcagtgacagcaatgacagcagcaacagcagtgacagcagtgacagcagcaacagcagtgacagcagcaacagcagtgacagcagtgacagcagtgacagcagtgacagcgacagcagcaacagcagtgacagcagcaacagcagtgacagcagtgacagcagcaacagcagtgacagcagtgacagcagtgacagcagtgatggcagtgacagcgacagcagcaacagaagtgacagcagcaacagcagtgacagcagtgacagcagtgacagcagcaacagcagtgacagcagtgacagcagtgacagcaatgaaagcagcaacagcagtgacagcagtgacagcagcaacagcagtgacagcgacagcagtgacagcagcaacagcagtgacagcagtgacagcagcaacagcagtgacagcagcgagagcagcaacagcagtgacaacagcaacagcagtgacagcagcaacagcagtgacagcagtgacagcagtgacagcagcaacagcagtgacagcagcaacagcagtgacagcagcaacagcagtgacagcagtgacagcaacagcagtgacagcagtgacagcagcaacagcagtgacagcagtgacagcagtgacagcagtgacagcagtgacagcagtgacagcagcaacagcagtgacagcagtgacagcagtgacagcagtgacagcagcaacagcagtgacagcagcaacagcagtgacagcagcaacagcagtgacagcagtgacagcagtgacagcagtgacagcagtgacagcagtgacagcagtgacagcagtgacagcagcaacagcagtgacagcagtgacagcagtgacagcagtgacagcagtgacagcagtgacagcagtgacagcagtgacagcagcgagagcagtgacagcagtgacagcagcaacagcagtgacagcagtgacagcagtgacagcagtgacagcagtgacagcagtgacagcagtgacagcagtgacagcagtgacagcagcaacagcagtgacagcagtgacagcagtgacagcagtgacagcagtgacagcagcaacagcagtgacagcagtgacagcagcgagagcagtgacagcagtgacagcagtgacagcagtgacagcagtgacagcagtgacagcagtgacagcagtgacagcagtgacagcagcaacagcagtgacagcagtgacagcagtgacagcagtgacagcagtgacagcagtgacagcagtgacagcagtgacagcagtgacagcagtgacagcagtgacagcagtgacagcagtgacagcagtgacagcagtgacagcagtgacagcagtgacagcaatgaaagcagtgacagcagtgacagcagtgacagcagtgacagcagcaacagcagtgacagcagtgacagcagtgacagcagtgacagcaccagtgacagcaatgatgaaagtgacagccagagcaagtctggaaatggaaacaacaatggaagtgacagcgacagcgacagcgagggcagtgacagcaaccacagcaccagtgatgactag

SEQ ID NO: 178345 - DNA, 3906 bp, Artificial Sequence
  derived and/or modified sequence
atgaagatcatcacctacttctgcatctgggccgtggcctgggccattcctgtacctcagtcgaagcccttggaaagacacgtcgaaaaatccatgaatctgcacctgctggcccgatccaatgtcagcgtgcaggacgagttgaatgcttctggaaccataaaagagagtggcgtgctggtgcacgaaggggaccgcggccgccaggagaacacacaggatggtcacaagggtgaggggaacggctcaaaatgggccgaagtgggaggcaaaagcttttctacctacagcacactggcaaacgaagaaggtaatatagaaggctggaatggggatacaggtaaggcagagacctacggtcatgatgggatccacggcaaggaggagaatattactgcgaatgggatacagggacaggtaagtatcatcgataacgccggcgctacaaacagatctaataccaatgggaacaccgacaagaatacacaaaacggggacgtgggagatgccggccacaatgaagacgtggcagtggtgcaagaggacggaccccaggtagcagggagcaataacagcacagacaatgaagatgaaataatcgagaacagctgcagaaatgagggcaataccagcgagattacccctcagataaacagcaaacggaatggtacaaaggaggccgaagtcacccccgggacgggagaagatgctggtcttgacaattccgatggtagtccttccggcaacggggcagacgaggatgaggacgagggttctggcgatgacgaagatgaagaggctgggaacggaaaggatagcagcaacaactcaaaaggtcaagagggccaggaccatggtaaggaagacgaccacgattcctctatcggccagaacagcgatagcaaagagtattacgaccccgaaggtaaggaagaccctcacaacgaagtggatggcgacaagacatcaaagagcgaagagaactccgcaggcatccccgaggacaatggtagtcaacgcatcgaagacactcagaaactgaaccaccgcgaatcaaagagggtcgaaaatcggatcacaaaggaatcagagacccatgcagtcggaaaatcacaggataaaggcatcgaaattaaagggcccagctccggaaatagaaatattaccaaagaggtgggaaaaggcaatgaaggaaaggaggataaaggccaacatggtatgattctgggcaagggaaacgttaagactcagggggaagtcgtcaatattgaggggcccgggcagaaatctgaacccggaaacaaagttggtcattcgaatactgggagcgacagcaactctgatgggtatgactcatatgattttgatgataagagcatgcaaggggatgacccaaattctagcgatgagtccaacggcaatgatgacgctaatagtgagtcagacaataactccagtagcagaggcgacgcctcctacaatagcgacgagagcaaagataacggcaatggatcggattcaaaaggagccgaagacgatgacagtgactctacctctgatacgaacaacagtgactctaatggcaatggaaacaacggtaatgacgataatgataagagcgattctggaaagggaaaatcagattctagcgattccgattcctctgatagctcaaattcttcagactcctcggattcttccgacagtgactcaagtgatagtaacagcagctcggactcagacagttcggattcagacagcagcgattctagtgacagtgattctagtgactcctccaatagctcggactcctccgattcaagtgatagctctgattcatccgacagctcggacagttccgacagtaagtctgatagttccaagagtgagtcagactccagcgattccgacagcaaaagcgattcgtctgattctaatagctcggactcctcagataacagtgattcgtccgattcctcaaactcttccaattcctccgactcttcagactcaagtgacagtagcgactctagctcttcaagcgatagctctaacagttctgacagttccgactcctccgattcttctaattcctccgaatccagtgactcctctgatagttccgactcagactcctctgacagtagtgatagttcaaacagcaactcctctgatagcgattccagtaattcctcggattcatcagatagcagcaatagctcggacagcagcgatagctcagattcctccaactcttcggactccagtgattcatccgattcctccaatagctccgattcatcagattcaagcgatagcagcgatagttccgatagcagcaacagctccgattctaacgactcatcaaactcttcagacagcagcgatagtagtaactctagcgattcctcgaactcatctgattccagcgacagcagtgactctagcgacagtgacagcagcaattcgagcgatagtagcaatagttcagattcttctgattcttccaattcttcagactcatccgattcctcagattcatctgacggtagtgacagcgattccagtaaccgctctgactcatcaaacagcagcgactcctccgactcatcagatagtagtaatagctctgattctagtgactcaagtgacagtaatgagtcaagcaactcatccgacagcagcgattcgagcaactcttctgatagcgattctagcgatagctccaactcaagcgattccagcgactcatccaatagtagtgattcctcagagtcctccaactcgtctgacaactcgaactcctccgattcgagtaactcctccgacagctcagatagttcagatagctctaatagttctgacagttccaattccagcgatagtagtaatagttctgatagttcagactccaatagctccgacagctccgatagcagcaactcctccgacagtagcgactcctcagattcttcggactctagcgattccagcgacagttccaactctagtgacagcagtgactccagtgactccagtgattcctccaattccagtgactcatcgaactcctccgactctagtaattcctctgacagctccgactctagcgatagctcggatagttccgactcttcggactctagcgattcttccgattcgagtaatagcagtgacagttctgattcgtccgatagttcggattcctctgactcaagcgattcatcagactcatctgattcatctgagtccagcgacagctctgattcaagcaatagttcagacagttccgatagctctgacagttcagactcatccgactcttccgactcctccgatagcagtgattcatctgatagctccaacagctctgattccagcgattctagtgatagctctgactcctctgatagtagcaattcctcggactccagcgactcctctgaatcctctgatagcagtgactctagtgactcgagcgattccagtgacagctctgattcctcagatagctcggacagctctgattcatcaaacagcagtgacagctctgattcatcagacagttcagattcttcagatagctcagactcaagcgatagctccgacagctctgacagctccgactcaagcgattccagcgacagttccgattccagtgacagctctgattcttccgatagctcggattctaacgagagctctgattcaagcgactcctcggatagctctgacagctcgaattcctctgactctagtgacagtagcgattcttccgactcaacgtccgactcaaatgacgagagcgactcacagagcaagtctgggaatggcaacaacaatggatccgactctgattcggacagcgagggaagcgactctaatcactcaacgagcgacgactag

SEQ ID NO: 178346 - DNA, 3906 bp, Artificial Sequence
  derived and/or modified sequence
atgaagatcatcacctacttctgcatctgggccgtggcctgggccattcccgtgccccaatcaaagcccttggaaaggcatgtagaaaagagcatgaatctacacctgttagcccgctccaatgttagtgtccaggatgagcttaacgccagcggaactatcaaagagtctggggtgttagttcacgagggagatagggggaggcaggagaatacccaggatggacataagggtgaaggcaacggatcaaaatgggctgaggtcggcggaaagtcattttctacctattctacactggcaaacgaggagggcaatatcgaagggtggaatggggataccggcaaggctgagacctatggtcatgatggtatacatggcaaagaggagaatattacagctaatggaattcaaggccaggttagcataatcgataatgcgggggctacaaaccgatctaacaccaatggcaacactgacaagaatacacagaacggcgacgtcggtgacgctggccataacgaggacgtcgcagtggtgcaggaggatggcccccaggtggctggatcaaacaactctactgataatgaggacgagatcattgaaaattcttgcagaaatgaggggaacactagtgagataaccccccagattaactcaaagcggaatggcacgaaggaagccgaagtcacaccggggaccggtgaagatgctggcctcgacaactccgacgggagtccatcagggaacggagcagacgaggatgaggatgaaggctccggcgacgacgaagatgaggaagctggaaatggcaaggattccagcaataattccaagggacaagaaggccaggaccacggcaaggaggatgaccacgacagttccattggtcagaacagcgatagcaaagaatattatgacccggaaggcaaggaggatccgcacaacgaggttgatggagataagaccagtaagtcagaagaaaacagtgccgggattcctgaggacaacggctcccagcgtatagaggacacacaaaaattgaaccatcgcgagagtaaacgggtcgaaaatcggattaccaaagagtcagagacacatgccgtgggcaaatctcaagacaagggaatcgagataaaaggtccatcatctggtaatcgcaatattactaaagaggtgggaaagggaaacgaaggtaaggaggacaaaggacagcacggaatgatcctgggcaaggggaatgtaaaaacgcagggtgaagtcgtcaatatagaaggtccaggacagaagtcggagccgggcaacaaggttggccactctaatacaggatcagactccaacagtgacggttacgattcttatgatttcgatgataaaagtatgcagggtgacgaccccaacagcagcgacgaaagtaacggtaacgacgatgcgaactcagagtccgacaacaattcatcgagcaggggtgacgcaagctacaactcagacgagagcaaggataatggtaatggctccgatagcaaaggggccgaggatgatgacagtgatagcaccagcgacacgaacaacagcgactctaacggcaacggcaacaatggcaatgacgataacgacaagagcgatagcggaaaagggaaatcggattcctcggactccgattcatccgacagcagcaattcctccgatagctctgacagctctgattctgattcctctgatagtaattcctcctctgacagtgatagttctgactctgattctagcgattcctcggactcagactcctccgattccagcaattcaagcgattcaagtgacagtagcgatagctcagattcgtcggactcttctgacagcagtgattcaaaaagcgactccagcaagagcgaatctgacagctcagatagtgatagtaagagcgacagctctgattccaattcctccgactctagcgacaacagcgattctagcgactcaagtaacagctcgaactcatctgactccagtgactctagcgattcttctgacagttcatcttcgagcgactctagcaatagcagcgacagcagcgacagtagcgactctagcaactcttccgaaagcagtgatagctcagattcctccgattccgacagcagtgatagcagcgattcgagtaattctaattcatcagactcagacagttccaacagttcagacagtagcgatagcagtaattcctccgactcttccgattcatctgacagctccaacagctcagatagctccgactcttccgactccagtaattccagtgactcaagtgattcaagcgacagttctgactcctcggattcaagcaattcaagtgacagcaacgatagctctaattcaagtgattctagcgattccagtaacagcagcgattccagtaattcatcggattcatcggactcctcagattcttcagacagcgatagctccaacagctctgattctagcaactcatccgactcgagcgactctagcaattccagcgattccagcgacagctcggattctagcgatgggagcgatagcgactctagcaaccgaagtgatagcagcaattcctccgacagttcagacagctcagatagctccaattcgtcagacagctccgatagttccgacagcaatgagtcttccaatagtagcgacagcagcgattccagtaattcctccgactccgattcttctgactccagtaatagcagtgacagctctgactcttctaactcatctgacagctccgagagcagcaactccagcgacaattccaacagctcggactcttctaatagctctgactcttctgatagctcagattcttcaaactccagcgactctagtaacagcagcgacagttcaaattccagtgattcaagtgatagcaatagcagcgacagctccgattccagtaactcgtctgattctagtgacagctctgactcctcagactcttctgactctagtgatagctccaattccagcgactcttccgattcctccgattctagtgattctagtaacagcagtgacagttctaacagtagtgatagctcaaattcaagtgactcctccgactcctcggattcctccgacagttcggatagcagcgattcctctgatagcagtgacagctccaactcatcagactctagtgactcatccgactccagcgatagctctgattcttccgactcatccgattctagcgatagctcagaatccagtgacagtagtgactcatccaactcatccgattcaagcgattccagtgattccagcgattcttcagatagcagtgactcctccgattctagcgacagctccgattccagcaattctagtgattcatcggatagcagcgactcttcagatagctctgacagctccaacagctcagactcatcagactcgtcagagagtagcgactcatctgattctagtgattcctctgattcaagtgatagtagtgactccagcgactcaagcgactcttctgactccagcaactctagcgactcatctgacagctccgatagcagcgactcctctgacagcagcgatagctctgacagtagcgactcaagcgattcgtctgactcatcagacagttctgatagctcagactcctcagactcctctgatagctccgattcttcggacagcaacgaaagctcagactccagtgattcatctgactcatccgacagctcaaactcatctgactcatctgactcctccgatagttccgactctacaagtgattcaaatgatgagtcagactcacagtcaaaaagcggaaatggaaataacaacggcagcgatagtgacagcgactccgagggtagtgacagcaatcattctactagtgatgattag

SEQ ID NO: 178347 - DNA, 3906 bp, Artificial Sequence
  derived and/or modified sequence
atgaagataattacatatttttgcatctgggcagtggcatgggcaataccggttcctcaaagtaagcctctggaacgacacgtggaaaagagcatgaacttacatctgttggccaggtcaaatgtgtcagtacaggatgagctcaatgccagtggaacgattaaggaatctggagtgctggtgcacgagggagaccgcggaagacaggaaaatacccaagacgggcacaaaggagagggcaacgggagcaaatgggcagaggtggggggtaagagtttcagcacttatagcacccttgcaaacgaagaaggcaacattgagggatggaacggcgataccgggaaggccgagacctacggtcacgacggtattcatgggaaggaagaaaacatcactgcaaacggcatccagggtcaggtgagcatcatcgataatgcgggagcgactaaccgcagcaacactaacggtaatacggataaaaatacgcagaatggagacgtcggcgacgcaggtcataatgaggatgttgccgtggttcaggaggacgggcctcaggtcgccggatcaaataattctactgacaatgaggacgaaatcatcgaaaattcttgcaggaacgaaggcaatacatctgaaatcacaccacagataaacagcaagaggaacgggacgaaagaggccgaggtcacgcctggcactggggaagatgccggactggacaactcagacggctcccccagcgggaacggggctgacgaggacgaagatgaaggcagcggagatgatgaggacgaggaggccggtaacggcaaagacagttcaaacaattccaagggacaagaagggcaggatcacggcaaggaagacgaccatgactcctccatcggacagaattctgacagtaaggagtactacgatccagaggggaaggaagatcctcacaatgaggttgatggagataaaacctcaaaatccgaggagaatagcgcaggtattcctgaagataatggatctcagcggatagaagatacccagaagctgaatcaccgggagtctaaacgcgtcgagaatcgcatcaccaaggagagcgaaacccacgcagtcggtaagagccaagacaagggcattgagatcaaaggaccctcaagtggcaaccgaaatatcaccaaggaagtgggaaaagggaacgagggtaaagaggataaaggtcagcacggaatgatactgggcaaaggcaacgtgaagactcagggagaagtggtgaatatcgagggcccaggccagaagagcgaaccaggaaataaggttgggcattccaacactgggagcgactcaaattctgacggttacgacagttacgacttcgacgataagtcgatgcaaggagacgatcccaactcctccgacgagtctaacggtaacgacgacgcaaactcagagtctgataacaactcaagcagcaggggtgatgcgagctataatagcgatgaaagcaaggacaacggcaacgggtctgactccaaaggggcagaggatgatgatagcgatagtacgtcagataccaacaattcagacagcaacggtaacgggaacaacgggaatgacgataatgataaatctgactctgggaagggaaagtcggatagttcagacagtgatagctccgacagttctaacagctccgattctagtgactcatctgattcagactcgtctgacagtaacagctcctcggactcagattcgagtgactccgactcgagcgatagcagcgattctgatagctctgatagctctaattcctcagattcaagcgactcctcagattcttcggattctagtgatagcagcgattccagtgactccaaaagcgactccagtaaatcagaatctgattctagtgacagcgattctaagagcgatagctcagacagtaactcttccgacagttcagacaactcagatagcagcgattcgagcaactcaagcaattcctccgattcctctgacagctccgatagctccgactcatcatccagctcggactcctcaaattcttccgatagcagtgacagctccgattcatcgaattctagcgaaagctccgattcgagtgatagtagtgattctgactctagcgattcttccgatagtagcaatagtaatagcagtgattctgactcctcaaatagctccgacagctccgacagctctaattcctctgactctagtgattcatccgattcatccaactctagcgacagttctgattcttccgacagcagcaactcttccgattcaagcgatagttccgactcttccgacagttccgactcttccaatagctctgatagcaacgactcatctaattccagtgacagctctgatagcagcaactcttcagattctagcaactcatctgatagttcggacagcagcgattccagcgactcggattccagcaacagcagcgatagtagcaacagtagcgactcatctgactcatccaactcatcagatagtagcgattctagtgatagctccgatggatctgattctgattcttccaacagatcagactctagcaactcctcagattcatcagattcctctgacagttccaactcaagcgactcaagcgatagttctgacagcaacgagtcgtccaacagcagcgactctagcgatagctctaattctagcgactccgattcttcagattcaagtaactcctcggattcgtccgatagtagcaacagctccgattcttctgaatcctcaaactctagtgataactccaactcaagcgattcttcaaattcgtctgattccagtgattcttccgatagtagtaatagcagtgattcctctaactccagcgactccagcaattctagcgactcctcggactccaatagctctgatagctccgatagcagtaatagttcagattcttccgacagcagcgattccagtgacagtagcgattcgagcgactcttctaactccagcgacagcagcgactcttctgattcatcagattccagcaacagctctgacagctccaacagctccgactcatctaatagtagtgattcttcagactcatccgatagctctgactcctccgactcgtcagattccagcgactcaagtgactcaagcaacagctccgattccagcgactcatctgattcaagcgactcctctgatagctctgactcaagcgactcttcagacagctccgagtcctcagattcatcagacagctctaattcttctgattcttccgactcctccgactcctctgattcgtctgactcgtctgattcatctgacagcagcgactcatcagacagctctaatagttcggactcctcggactcctccgacagctctgatagctcggattcttccaactccagcgattcgtctgacagcagtgagtcctcagattcttccgacagttccgacagcagcgactcttctgattcctccgacagctcggactctagcgattcctcagacagtagcaactccagtgattccagcgactcctctgattcttctgacagctcagattccagtgatagctctgactcttcagattcctctgactccagcgatagctcagacagctcagactctagtgactcttctgattccagtgatagttcggatagttctgatagtaacgaatcatcggatagctcagattcgtccgatagtagtgactcttctaattctagcgattcaagcgattcctccgattcctctgactctacaagtgattcaaacgatgaatcggacagtcagtccaaaagcggcaatggaaataataacgggtcggacagcgacagcgatagtgaaggctcagattcaaatcactctactagtgacgactag

SEQ ID NO: 178348 - DNA, 3906 bp, Artificial Sequence
  derived and/or modified sequence
atgaaaataatcacgtatttctgtatctgggccgtggcctgggcaatacctgtgccacagagcaagcctcttgagcgccacgtggagaagagtatgaaccttcatttgttagctcggagcaatgtatccgtccaagatgagctcaacgcgtccggaacaattaaggagtccggtgtgttagtacacgagggcgatcgtggtaggcaggagaacactcaggacggccacaagggggaggggaatgggtccaaatgggcagaagtgggaggtaagtcattttcaacctatagtactctggccaacgaagagggaaacatagaggggtggaacggggacacagggaaggctgagacttatggccacgacggcattcatgggaaagaggaaaacataaccgcaaatgggattcaaggacaggtatctatcatcgataacgccggagccaccaatcggtcaaatacgaacgggaacaccgacaaaaatacccagaacggagacgtgggagacgctgggcataatgaagatgtcgccgtggtgcaagaggacggacctcaggtggcaggatctaacaattccacagataacgaagacgagattatagagaactcttgcagaaacgagggaaacactagcgaaattactccccaaattaatagcaagcggaacggcacgaaagaagccgaggtgacgcccggaacgggcgaggatgcaggcctcgataacagtgatggaagtccgtccggcaatggtgccgatgaagatgaggacgaaggctccggagatgacgaggatgaggaagccggaaatggcaaggatagctctaataacagcaagggacaggagggccaagaccatgggaaggaggatgatcacgactcgagcattggacagaactcggacagcaaggagtattacgatcccgaaggtaaggaagacccacataacgaggtcgatggcgacaaaacctccaaaagcgaagagaactccgccggtataccagaggacaacgggagccagcgcatcgaggatacacagaagttaaaccaccgtgagagtaaacgagtcgaaaacagaattaccaaggaaagcgaaacccatgctgtgggcaaatctcaagacaaaggaatagagattaaggggcctagcagcggcaacaggaatattactaaagaggtgggaaaggggaacgagggaaaggaagacaagggtcaacacggcatgatcctcggcaagggtaacgttaagacccaaggggaggtggttaatatagaaggaccgggtcaaaagtctgagcctggcaataaggtcggacactccaacacggggtctgacagcaactccgacggctacgattcctatgattttgatgacaaatcaatgcagggggacgaccctaatagctccgacgagtctaatggtaatgacgacgctaacagtgagagtgacaataacagttcctcccgcggtgatgcttcttacaacagcgacgagagtaaggataacggcaacggatctgattctaagggagcagaggacgacgactccgattccacaagcgacacgaacaatagcgattccaacggaaacggcaataacggaaatgatgacaatgataagtccgactccggaaagggcaagtcagatagttccgactctgattcctctgactcgtccaattcttccgattcctctgattcatctgattctgacagctcagactctaatagttctagcgatagcgatagcagcgattctgacagctccgactctagtgatagcgatagcagtgattcttctaattcctccgatagctccgactcttctgactcttctgatagcagtgactcctccgactcaagtgacagtaaatccgatagtagcaagagtgaatccgatagctccgatagcgattcgaagtcagactcttccgatagcaattcctccgattctagcgacaattcggactcttctgattcaagcaactccagcaatagtagcgacagttcagactcctccgactcatcagactccagttcttcttccgactcgtccaattcttccgatagttccgacagctccgatagttcaaactcatcagaatcaagcgattcatccgactcttcagactccgattccagtgatagtagtgactcttcgaattccaacagctctgattctgacagctctaactcatccgacagttctgacagctccaactcaagcgacagttctgattcttccgactcatccaacagcagtgactctagcgattcaagtgattcatccaatagctcagactcctcagattcctcagactcctccgattcatcagacagcagcaattcaagcgacagtaacgattcgtccaactcgtcagactcgagtgatagttccaactcctctgattccagcaattcttctgactcttcagattcgagcgacagttctgattccgactcatctaattcttccgactcctcgaactcaagcgatagcagcgacagcagtaactccagcgactctagcgattcctcggactctagtgatgggtcagattcagacagttctaaccgcagcgactccagtaacagtagcgactcatcagacagtagcgactcgtccaactcctcagattctagcgacagctctgactcaaatgagtcctctaactcttccgacagctctgactctagtaacagctctgactctgattcatctgacagttctaattcttccgattcctcagactcctctaatagctccgacagttctgagtcaagcaactcctcagataactcaaattcaagtgatagctcaaacagctcagactcaagtgatagctccgattcgagtaacagtagcgatagcagcaactcttccgattcctctaacagtagcgattctagcgatagcaattctagcgactcgtccgattcgtccaatagtagcgacagcagcgatagttccgattcctccgattcttccgattccagcgactccagtaacagtagcgattcttctgactctagcgactcctccgattcttcaaacagtagcgattcatccaacagctccgacagctctaattccagcgactcttccgattcctccgattccagcgattcttcagacagcagtgattcttctgattcgtccgactcctctaactcttccgactcatctgattccagcgatagcagtgacagtagtgactcctcagacagctcagattctagcgactctagcgaaagttccgactcttcggatagcagcaattcctccgatagttccgatagctccgacagcagcgatagctcagacagctctgacagctccgacagctcagatagctcagatagcagtaacagttctgactcatcggatagttccgacagcagcgattctagcgacagctctaacagttctgacagtagcgattccagcgagtcctctgactcctcggactcaagcgactcttccgattcctccgatagttccgacagcagcgactccagtgatagttctgatagctccaattcctctgattcgagcgatagctccgactcaagcgattcctccgacagcagtgactcgagcgactcgtcagactcctctgatagcagcgatagcagcgattctagcgattcgagtgatagcagtgattcttccgactccagtgactcatccgatagtaacgagagttccgatagtagtgattcgtcagactccagtgattcttcaaactcttccgacagcagcgatagttcagattcaagcgattctacctccgactctaacgatgagagcgactctcagtctaagtccggcaatggcaacaataacgggtcagactctgatagtgactccgaaggctccgatagcaaccacagtacctccgatgactag

SEQ ID NO: 178349 - DNA, 3906 bp, Artificial Sequence
  derived and/or modified sequence
atgaagatcatcacctacttctgcatctgggccgtggcctgggccatccccgtgccccagagcaagcccctggagagacacgtggagaagagcatgaacctgcacctgctggccagaagcaacgtgagcgtgcaggacgagctgaacgccagcggcaccatcaaggagagcggcgtgctggtgcacgagggcgacagaggcagacaggagaacacccaggacggccacaagggcgagggcaacggcagcaagtgggccgaggtgggcggcaagagcttcagcacctacagcaccctggccaacgaggagggcaacatcgagggctggaacggcgacaccggcaaggccgagacctacggccacgacggcatccacggcaaggaggagaacatcaccgccaacggcatccagggccaggtgagcatcatcgacaacgccggcgccaccaacagaagcaacaccaacggcaacaccgacaagaacacccagaacggcgacgtgggcgacgccggccacaacgaggacgtggccgtggtgcaggaggacggcccccaggtggccggcagcaacaacagcaccgacaacgaggacgagatcatcgagaacagctgcagaaacgagggcaacaccagcgagatcaccccccagatcaacagcaagagaaacggcaccaaggaggccgaggtgacccccggcaccggcgaggacgccggcctggacaacagcgacggcagccccagcggcaacggcgccgacgaggacgaggacgagggcagcggcgacgacgaggacgaggaggccggcaacggcaaggacagcagcaacaacagcaagggccaggagggccaggaccacggcaaggaggacgaccacgacagcagcatcggccagaacagcgacagcaaggagtactacgaccccgagggcaaggaggacccccacaacgaggtggacggcgacaagaccagcaagagcgaggagaacagcgccggcatccccgaggacaacggcagccagagaatcgaggacacccagaagctgaaccacagagagagcaagagagtggagaacagaatcaccaaggagagcgagacccacgccgtgggcaagagccaggacaagggcatcgagatcaagggccccagcagcggcaacagaaacatcaccaaggaggtgggcaagggcaacgagggcaaggaggacaagggccagcacggcatgatcctgggcaagggcaacgtgaagacccagggcgaggtggtgaacatcgagggccccggccagaagagcgagcccggcaacaaggtgggccacagcaacaccggcagcgacagcaacagcgacggctacgacagctacgacttcgacgacaagagcatgcagggcgacgaccccaacagcagcgacgagagcaacggcaacgacgacgccaacagcgagagcgacaacaacagcagcagcagaggcgacgccagctacaacagcgacgagagcaaggacaacggcaacggcagcgacagcaagggcgccgaggacgacgacagcgacagcaccagcgacaccaacaacagcgacagcaacggcaacggcaacaacggcaacgacgacaacgacaagagcgacagcggcaagggcaagagcgacagcagcgacagcgacagcagcgacagcagcaacagcagcgacagcagcgacagcagcgacagcgacagcagcgacagcaacagcagcagcgacagcgacagcagcgacagcgacagcagcgacagcagcgacagcgacagcagcgacagcagcaacagcagcgacagcagcgacagcagcgacagcagcgacagcagcgacagcagcgacagcagcgacagcaagagcgacagcagcaagagcgagagcgacagcagcgacagcgacagcaagagcgacagcagcgacagcaacagcagcgacagcagcgacaacagcgacagcagcgacagcagcaacagcagcaacagcagcgacagcagcgacagcagcgacagcagcgacagcagcagcagcagcgacagcagcaacagcagcgacagcagcgacagcagcgacagcagcaacagcagcgagagcagcgacagcagcgacagcagcgacagcgacagcagcgacagcagcgacagcagcaacagcaacagcagcgacagcgacagcagcaacagcagcgacagcagcgacagcagcaacagcagcgacagcagcgacagcagcgacagcagcaacagcagcgacagcagcgacagcagcgacagcagcaacagcagcgacagcagcgacagcagcgacagcagcgacagcagcgacagcagcaacagcagcgacagcaacgacagcagcaacagcagcgacagcagcgacagcagcaacagcagcgacagcagcaacagcagcgacagcagcgacagcagcgacagcagcgacagcgacagcagcaacagcagcgacagcagcaacagcagcgacagcagcgacagcagcaacagcagcgacagcagcgacagcagcgacagcagcgacggcagcgacagcgacagcagcaacagaagcgacagcagcaacagcagcgacagcagcgacagcagcgacagcagcaacagcagcgacagcagcgacagcagcgacagcaacgagagcagcaacagcagcgacagcagcgacagcagcaacagcagcgacagcgacagcagcgacagcagcaacagcagcgacagcagcgacagcagcaacagcagcgacagcagcgagagcagcaacagcagcgacaacagcaacagcagcgacagcagcaacagcagcgacagcagcgacagcagcgacagcagcaacagcagcgacagcagcaacagcagcgacagcagcaacagcagcgacagcagcgacagcaacagcagcgacagcagcgacagcagcaacagcagcgacagcagcgacagcagcgacagcagcgacagcagcgacagcagcgacagcagcaacagcagcgacagcagcgacagcagcgacagcagcgacagcagcaacagcagcgacagcagcaacagcagcgacagcagcaacagcagcgacagcagcgacagcagcgacagcagcgacagcagcgacagcagcgacagcagcgacagcagcgacagcagcaacagcagcgacagcagcgacagcagcgacagcagcgacagcagcgacagcagcgacagcagcgacagcagcgacagcagcgagagcagcgacagcagcgacagcagcaacagcagcgacagcagcgacagcagcgacagcagcgacagcagcgacagcagcgacagcagcgacagcagcgacagcagcgacagcagcaacagcagcgacagcagcgacagcagcgacagcagcgacagcagcgacagcagcaacagcagcgacagcagcgacagcagcgagagcagcgacagcagcgacagcagcgacagcagcgacagcagcgacagcagcgacagcagcgacagcagcgacagcagcgacagcagcaacagcagcgacagcagcgacagcagcgacagcagcgacagcagcgacagcagcgacagcagcgacagcagcgacagcagcgacagcagcgacagcagcgacagcagcgacagcagcgacagcagcgacagcagcgacagcagcgacagcagcgacagcaacgagagcagcgacagcagcgacagcagcgacagcagcgacagcagcaacagcagcgacagcagcgacagcagcgacagcagcgacagcaccagcgacagcaacgacgagagcgacagccagagcaagagcggcaacggcaacaacaacggcagcgacagcgacagcgacagcgagggcagcgacagcaaccacagcaccagcgacgactag

SEQ ID NO: 178350 - DNA, 4281 bp, Artificial Sequence
  derived and/or modified sequence
tacagccattgattattattattcctaaagaaaatgaagataattacatatttttgcatttgggcagtagcatgggccattccagttcctcaaagcaaaccactggagagacatgtcgaaaaatccatgaatttgcatctcctagcaagatcaaatgtgtcagtacaggatgagttaaatgccagtggaaccatcaaagaaagtggtgtcctggtgcatgaaggtgatagaggaaggcaagagaatacccaagatggtcacaagggagaagggaatggctctaagtgggcagaagtaggagggaagagtttttctacatattccacattagcaaacgaagaggggaatattgagggctggaatggggacacaggaaaagcagaaacatatggtcatgatggaatacatgggaaagaagaaaacatcacagcaaatggcatccagggacaagtaagcatcattgacaatgctggagccacaaacagaagcaacactaatggaaatactgataagaatacccaaaatggggatgttggcgatgcaggtcacaatgaggatgtcgctgttgtccaagaagatggacctcaagtagctggaagcaataacagtacagacaatgaggatgaaataattgagaattcctgtagaaacgagggtaatacaagtgaaataacacctcagatcaacagcaagagaaatgggactaaggaagctgaggtaacaccaggcactggagaagatgctggcctggataattccgatgggagtcctagtgggaatggagcagatgaggatgaagacgagggttctggtgatgatgaagatgaagaagcagggaatggaaaagacagtagtaataacagcaagggccaggagggccaggaccatgggaaagaagatgatcatgatagtagcataggtcaaaattcagatagtaaagaatattatgaccctgaaggcaaagaagatccccataatgaagttgatggagacaagacctccaagagtgaggagaattctgctggtattccagaagacaatggcagccaaagaatagaggacacccagaagctcaaccatagagaaagcaaacgcgtagaaaatagaatcaccaaagaatcagagacacatgctgttgggaagagccaagataagggaatagaaatcaagggtcccagcagtggcaacagaaatattaccaaagaagttgggaaaggcaacgaaggtaaagaggataaaggacaacatggaatgatcttgggcaaaggcaatgtcaagacacaaggagaggttgtcaacatagaaggacctggccaaaaatcagaaccaggaaataaagttggacacagcaatacaggtagtgacagcaatagtgatggatatgacagttatgattttgatgataagtccatgcaaggagatgatcccaatagcagtgatgaatctaatggcaatgatgatgctaattcagaaagtgacaataacagcagtagccgaggagatgcttcttataactctgatgaatcaaaagataatggcaatggcagtgactcaaaaggagcagaagatgatgacagtgatagcacatcagacactaataatagtgacagtaatggcaatggtaacaatgggaatgatgacaatgacaaatcagacagtggcaaaggtaaatcagatagcagtgacagtgatagtagtgatagcagcaatagcagtgatagtagtgacagcagtgacagtgacagcagtgatagcaacagtagcagtgatagtgacagcagtgacagtgacagcagtgatagcagtgacagtgatagtagtgatagcagcaatagcagtgacagtagtgacagcagtgatagcagtgacagtagtgatagtagtgacagcagtgacagcaagtcagacagcagcaaatcagagagcgacagcagtgatagtgacagtaagtcagacagcagtgacagcaacagcagtgacagtagtgacaacagtgatagcagcgacagcagcaatagcagtaacagcagtgatagtagtgacagcagtgatagcagtgacagcagcagtagcagtgacagcagcaacagcagtgatagtagtgacagtagtgacagcagcaatagcagtgagagcagtgatagtagtgacagcagtgatagtgacagcagtgatagtagtgacagcagtaatagtaacagcagcgatagtgacagcagcaacagcagcgatagcagtgacagcagcaacagcagtgacagcagtgatagcagtgacagcagcaacagcagtgacagtagcgatagcagtgacagcagcaacagcagtgacagcagtgatagcagtgacagcagtgatagtagtgacagcagcaacagcagtgatagcaacgacagcagcaatagcagtgacagcagtgatagcagcaacagcagtgatagcagcaacagcagtgatagcagtgatagcagtgacagcagtgatagcgacagcagcaatagcagtgacagcagtaatagtagtgacagcagcgatagcagcaacagcagtgatagcagcgacagcagcgatagcagtgacggcagtgatagcgacagcagcaatagaagtgacagtagtaatagtagtgacagcagcgatagcagtgacagcagcaacagcagtgacagcagtgatagcagtgacagcaacgaaagcagcaatagcagtgacagcagtgatagcagcaacagcagtgatagtgacagcagtgatagcagcaacagcagtgacagcagtgatagcagcaacagcagtgatagcagtgaaagcagtaatagtagtgacaacagcaatagcagtgacagcagcaacagcagtgacagcagtgatagcagtgacagcagtaatagtagtgacagcagcaatagcagtgacagcagcaacagcagtgacagcagtgatagcaatagcagcgacagcagtgacagcagcaacagcagcgatagcagtgacagcagtgatagcagtgacagcagtgacagcagtgatagcagcaacagcagtgatagcagtgacagcagtgacagcagtgatagcagtaatagtagtgacagcagcaatagcagtgacagcagcaacagcagtgacagcagcgatagcagtgacagcagcgatagcagtgacagcagcgatagcagtgacagcagtgacagcagcaatagcagtgacagcagtgacagcagcgacagcagtgatagcagtgacagcagtgacagcagcgacagcagtgatagcagtgaaagcagtgatagcagtgacagcagcaatagcagtgacagcagcgatagcagcgacagcagcgacagcagcgatagcagtgacagcagcgatagcagtgacagcagtgacagcagcaatagcagtgacagcagtgacagcagcgacagcagtgatagcagtgacagcagcaacagcagtgacagcagtgacagcagtgaaagcagcgacagcagtgacagcagcgacagcagtgacagcagcgatagcagcgacagcagcgacagcagcgatagcagtgacagcagcaatagcagtgatagcagcgacagcagtgatagcagtgacagcagcgacagcagcgatagcagcgacagcagcgatagtagtgatagcagtgacagcagtgacagcagcgacagcagtgacagcagcgacagcagtgacagcagcgacagcagtgacagcaatgaaagcagcgacagcagtgacagcagcgatagcagtgacagcagcaacagcagtgacagcagcgacagcagtgatagcagtgacagcacatctgacagcaatgatgagagtgacagccagagcaagtctggtaacggtaacaacaatggaagtgacagtgacagtgacagtgaaggcagtgacagtaaccactcaaccagtgatgattagaacaaaagaaaaacccgtaagattccttttgtgaaaagtttggtaatgggataggaaaaaaagatttccaagaaagtaaagaaaggggagaaataaacataagacgtatgtaaacaaaaacaactgggggaatcaaatcaaacagttggattcagaaccaagacctaactcctgcagagacagactctgaatgcatgacctttggtacatgcctgttaatattcatgttctgaaaatattttgttaaaagtgtaaatctaaacataaaagaacaattaaaatattctttaatacttcacacagaaacctcaagtaatcactacatgataacttcaatttaag

SEQ ID NO: 178351 - DNA, 4331 bp, Artificial Sequence
  derived and/or modified sequence
atgcaaaagtccaggacagtgggccactttcagtcttcaaagagaaagataagaaattctggattttcaaaatccttttgaagccttttaagccattgattattattattcctaaagaaaatgaagataattacatatttttgcatttgggcagtagcatgggccattccagttcctcaaagcaaaccactggagagacatgtcgaaaaatccatgaatttgcatctcctagcaagatcaaatgtgtcagtacaggatgagttaaatgccagtggaaccatcaaagaaagtggtgtcctggtgcatgaaggtgatagaggaaggcaagagaatacccaagatggtcacaagggagaagggaatggctctaagtgggcagaagtaggagggaagagtttttctacatattccacattagcaaacgaagaggggaatattgagggctggaatggggacacaggaaaagcagaaacatatggtcatgatggaatacatgggaaagaagaaaacatcacagcaaatggcatccagggacaagtaagcatcattgacaatgctggagccacaaacagaagcaacactaatggaaatactgataagaatacccaaaatggggatgttggcgatgcaggtcacaatgaggatgtcgctgttgtccaagaagatggacctcaagtagctggaagcaataacagtacagacaatgaggatgaaataattgagaattcctgtagaaacgagggtaatacaagtgaaataacacctcagatcaacagcaagagaaatgggactaaggaagctgaggtaacaccaggcactggagaagatgctggcctggataattccgatgggagtcctagtgggaatggagcagatgaggatgaagacgagggttctggtgatgatgaagatgaagaagcagggaatggaaaagacagtagtaataacagcaagggccaggagggccaggaccatgggaaagaagatgatcatgatagtagcataggtcaaaattcagatagtaaagaatattatgaccctgaaggcaaagaagatccccataatgaagttgatggagacaagacctccaagagtgaggagaattctgctggtattccagaagacaatggcagccaaagaatagaggacacccagaagctcaaccatagagaaagcaaacgcgtagaaaatagaatcaccaaagaatcagagacacatgctgttgggaagagccaagataagggaatagaaatcaagggtcccagcagtggcaacagaaatattaccaaagaagttgggaaaggcaacgaaggtaaagaggataaaggacaacatggaatgatcttgggcaaaggcaatgtcaagacacaaggagaggttgtcaacatagaaggacctggccaaaaatcagaaccaggaaataaagttggacacagcaatacaggtagtgacagcaatagtgatggatatgacagttatgattttgatgataagtccatgcaaggagatgatcccaatagcagtgatgaatctaatggcaatgatgatgctaattcagaaagtgacaataacagcagtagccgaggagatgcttcttataactctgatgaatcaaaagataatggcaatggcagtgactcaaaaggagcagaagatgatgacagtgatagcacatcagacactaataatagtgacagtaatggcaatggtaacaatgggaatgatgacaatgacaaatcagacagtggcaaaggtaaatcagatagcagtgacagtgatagtagtgatagcagcaatagcagtgatagtagtgacagcagtgacagtgacagcagtgatagcaacagtagcagtgatagtgacagcagtgacagtgacagcagtgatagcagtgacagtgatagtagtgatagcagcaatagcagtgacagtagtgacagcagtgatagcagtgacagtagtgatagtagtgacagcagtgacagcaagtcagacagcagcaaatcagagagcgacagcagtgatagtgacagtaagtcagacagcagtgacagcaacagcagtgacagtagtgacaacagtgatagcagcgacagcagcaatagcagtaacagcagtgatagtagtgacagcagtgatagcagtgacagcagcagtagcagtgacagcagcaacagcagtgatagtagtgacagtagtgacagcagcaatagcagtgagagcagtgatagtagtgacagcagtgatagtgacagcagtgatagtagtgacagcagtaatagtaacagcagcgatagtgacagcagcaacagcagcgatagcagtgacagcagcaacagcagtgacagcagtgatagcagtgacagcagcaacagcagtgacagtagcgatagcagtgacagcagcaacagcagtgacagcagtgatagcagtgacagcagtgatagtagtgacagcagcaacagcagtgatagcaacgacagcagcaatagcagtgacagcagtgatagcagcaacagcagtgatagcagcaacagcagtgatagcagtgatagcagtgacagcagtgatagcgacagcagcaatagcagtgacagcagtaatagtagtgacagcagcgatagcagcaacagcagtgatagcagcgacagcagcgatagcagtgacggcagtgatagcgacagcagcaatagaagtgacagtagtaatagtagtgacagcagcgatagcagtgacagcagcaacagcagtgacagcagtgatagcagtgacagcaacgaaagcagcaatagcagtgacagcagtgatagcagcaacagcagtgatagtgacagcagtgatagcagcaacagcagtgacagcagtgatagcagcaacagcagtgatagcagtgaaagcagtaatagtagtgacaacagcaatagcagtgacagcagcaacagcagtgacagcagtgatagcagtgacagcagtaatagtagtgacagcagcaatagcagtgacagcagcaacagcagtgacagcagtgatagcaatagcagcgacagcagtgacagcagcaacagcagcgatagcagtgacagcagtgatagcagtgacagcagtgacagcagtgatagcagcaacagcagtgatagcagtgacagcagtgacagcagtgatagcagtaatagtagtgacagcagcaatagcagtgacagcagcaacagcagtgacagcagcgatagcagtgacagcagcgatagcagtgacagcagcgatagcagtgacagcagtgacagcagcaatagcagtgacagcagtgacagcagcgacagcagtgatagcagtgacagcagtgacagcagcgacagcagtgatagcagtgaaagcagtgatagcagtgacagcagcaatagcagtgacagcagcgatagcagcgacagcagcgacagcagcgatagcagtgacagcagcgatagcagtgacagcagtgacagcagcaatagcagtgacagcagtgacagcagcgacagcagtgatagcagtgacagcagcaacagcagtgacagcagtgacagcagtgaaagcagcgacagcagtgacagcagcgacagcagtgacagcagcgatagcagcgacagcagcgacagcagcgatagcagtgacagcagcaatagcagtgatagcagcgacagcagtgatagcagtgacagcagcgacagcagcgatagcagcgacagcagcgatagtagtgatagcagtgacagcagtgacagcagcgacagcagtgacagcagcgacagcagtgacagcagcgacagcagtgacagcaatgaaagcagcgacagcagtgacagcagcgatagcagtgacagcagcaacagcagtgacagcagcgacagcagtgatagcagtgacagcacatctgacagcaatgatgagagtgacagccagagcaagtctggtaacggtaacaacaatggaagtgacagtgacagtgacagtgaaggcagtgacagtaaccactcaaccagtgatgattagaacaaaagaaaaacccgtaagattccttttgtgaaaagtttggtaatgggataggaaaaaaagatttccaagaaagtaaagaaaggggagaaataaacataagacgtatgtaaacaaaaacaactgggggaatcaaatcaaacagttggattcagaaccaagacctaactcctgcagagacagactctgaatgcatgacctttggtacatgcctgttaatattcatgttctgaaaatattttgttaaaagtgtaaatctaaacataaaagaacaattaaaatattctttaatacttcacacagaa

SEQ ID NO: 178352 - protein, 236 aa, Artificial Sequence
  derived and/or modified sequence
MPTDMEHTGHYLHLAFLMTTVFSLSPGTKANYTRLWANSTSSWDSVIQNKTGRNQNENINTNPITPEVDYKGNSTNMPETSHIVALTSKSEQELYIPSVVSNSPSTVQSIENTSKSHGEIFKKDVCAENNNNMAMLICLIIIAVLFLICTFLFLSTVVLANKVSSLRRSKQVGKRQPRSNGDFLASGLWPAESDTWKRTKQLTGPNLVMQSTGVLTATRERKDEEGTEKLTNKQIG

SEQ ID NO: 178353 - protein, 232 aa, Artificial Sequence
  derived and/or modified sequence
MEHTGHYLHLAFLMTTVFSLSPGTKANYTRLWANSTSSWDSVIQNKTGRNQNENINTNPITPEVDYKGNSTNMPETSHIVALTSKSEQELYIPSVVSNSPSTVQSIENTSKSHGEIFKKDVCAENNNNMAMLICLIIIAVLFLICTFLFLSTVVLANKVSSLRRSKQVGKRQPRSNGDFLASGLWPAESDTWKRTKQLTGPNLVMQSTGVLTATRERKDEEGTEKLTNKQIG

SEQ ID NO: 178354 - DNA, 711 bp, Artificial Sequence
  derived and/or modified sequence
atgccgacagacatggagcatactggtcactatctccacctcgccttcctcatgacgacagtattctccctatctcccggtacaaaagccaattacactagactctgggctaactccaccagctcttgggacagtgtcatccagaacaaaaccggaagaaatcagaatgagaatattaacaccaacccaataactcctgaggtggattataagggaaacagcaccaatatgcctgagacttcccacatcgtagccctcactagcaaaagcgaacaggaactgtacattcccagcgtggtaagcaatagccccagcacagtgcaatcaattgaaaatacatccaagtcccatggggagatcttcaaaaaggatgtgtgcgcggaaaacaataataatatggctatgctaatctgtctcattataattgcagtgttgttccttatttgcactttcctgttccttagtaccgtcgttctcgcgaataaagtgtcaagcctgagacggtctaaacaagtgggtaaacggcagccacgtagcaacggcgatttccttgcctctggcctatggcctgccgagagcgacacctggaagcgcacaaagcagctgaccggccctaatctggttatgcagagtaccggagtcttgacggctacccgggagcgcaaagatgaagagggcaccgagaagctgacaaataaacagatcgggtag

SEQ ID NO: 178355 - DNA, 711 bp, Artificial Sequence
  derived and/or modified sequence
atgccaacggacatggagcatactggtcactacctgcacttagcatttctgatgacaaccgtattctcgctctctccgggaactaaagctaactacaccaggctctgggcgaactctacgtcatcatgggatagtgtcatacagaataagacaggaaggaaccaaaacgaaaatattaatactaaccccattacaccagaggtggattacaaaggaaattccaccaacatgccagaaacaagccatatagtggccctaacatccaaaagtgagcaggagctgtatattccctctgtggtgagtaattctccctccactgttcagagcatcgaaaacacttctaaatctcacggagagatttttaagaaggatgtgtgtgcagaaaacaataataatatggccatgctgatctgcctcatcattattgctgttctgtttctgatctgcaccttcctcttcctttccactgtggtgctggcaaacaaagtgagttcactgcgaagaagtaagcaggtgggaaagcggcagcctaggtctaacggggatttcctggcaagcggactttggccagccgagagtgatacatggaagcggacaaagcaactgactgggcctaacctggtaatgcagtccactggcgttctaactgctactcgtgagaggaaggatgaggagggcaccgagaaactgacaaataagcagatcggttag

SEQ ID NO: 178356 - DNA, 699 bp, Artificial Sequence
  derived and/or modified sequence
atggagcacactggccactatctgcacctcgcgttcttaatgactacggtgttttcattaagccccggcacaaaagccaactacactagactgtgggccaatagcacctctagctgggacagcgtaattcaaaataagaccggccgaaatcagaacgaaaatatcaacactaatcctataactcccgaggttgactacaaaggcaattctactaatatgcccgaaacatcccacattgtcgccctgacttctaaaagcgagcaggagctctatattccgagcgtcgtgtctaactctccttctactgtacagtcaatcgaaaataccagcaaaagccacggggaaattttcaagaaggatgtttgtgccgagaataacaataatatggctatgctaatttgtctgataataattgccgtgttgttcttaatttgcacatttctcttcctgagtactgtggttctcgccaacaaagtgtcaagtctaagacgatcaaaacaagtggggaaaaggcaacctagatcaaatggcgactttctagcctcgggactctggcctgcggagagtgacacctggaagcgaaccaagcaacttacaggaccaaatttggtaatgcagtccacaggtgtcctgaccgctacccgcgaacgcaaggatgaagaaggcaccgaaaaactcacaaacaagcaaattggatag

SEQ ID NO: 178357 - DNA, 711 bp, Artificial Sequence
  derived and/or modified sequence
atgcccacagacatggagcacacaggccactacctgcacctggccttcctgatgaccaccgtcttcagcctgagccctggcaccaaggccaactacacccggctgtgggccaacagcaccagctcctgggacagcgtcatccagaacaagacaggaagaaaccagaatgaaaacatcaacaccaaccccatcaccccagaggtggactacaagggcaacagcaccaacatgcctgagaccagccacatcgtggccctgaccagcaagtctgagcaggagctgtacatccccagcgtggtgagcaacagccccagcacagtgcagagcattgagaacaccagcaagagccatggagagatcttcaagaaggatgtgtgtgccgagaacaacaacaacatggccatgctgatctgcctgatcatcatcgctgtgctcttcctgatctgcaccttcctgttcctgagcacagtggtgctggccaacaaggtgagcagcctgcggcgcagcaagcaggtgggcaagaggcagcccaggagcaatggagacttcctggccagcggcctgtggccagctgagagtgacacctggaagaggaccaagcagctgaccggccccaacctggtgatgcagagcactggagtgctgacagccacccgggagaggaaggatgaggagggcacagagaagctgaccaacaagcagattggatag

SEQ ID NO: 178358 - DNA, 699 bp, Artificial Sequence
  derived and/or modified sequence
atggagcacacaggccactacctgcacctggccttcctgatgaccaccgtcttcagcctgagccctggcaccaaggccaactacacccggctgtgggccaacagcaccagctcctgggacagcgtcatccagaacaagacaggaagaaaccagaatgaaaacatcaacaccaaccccatcaccccagaggtggactacaagggcaacagcaccaacatgcctgagaccagccacatcgtggccctgaccagcaagtctgagcaggagctgtacatccccagcgtggtgagcaacagccccagcacagtgcagagcattgagaacaccagcaagagccatggagagatcttcaagaaggatgtgtgtgccgagaacaacaacaacatggccatgctgatctgcctgatcatcatcgctgtgctcttcctgatctgcaccttcctgttcctgagcacagtggtgctggccaacaaggtgagcagcctgcggcgcagcaagcaggtgggcaagaggcagcccaggagcaatggagacttcctggccagcggcctgtggccagctgagagtgacacctggaagaggaccaagcagctgaccggccccaacctggtgatgcagagcactggagtgctgacagccacccgggagaggaaggatgaggagggcacagagaagctgaccaacaagcagattggatag

SEQ ID NO: 178359 - DNA, 711 bp, Artificial Sequence
  derived and/or modified sequence
atgcccaccgacatggagcacaccggccactacctgcacctggcctttctgatgaccacggtgttttcactgtcgcccggcactaaggccaactacacgaggctgtgggctaactccacatcctcgtgggactccgtgattcagaacaaaaccgggcgcaaccaaaatgagaacatcaacactaatcctatcacgccggaagtcgactataaaggaaatagcaccaacatgccagagacctcacatattgtggccttgacgtccaaaagcgagcaggagctgtacatcccctctgttgttagcaattctccaagcactgtacagtcaattgaaaacaccagcaaatcccatggcgaaatcttcaagaaggatgtttgcgccgagaacaacaataatatggcgatgctgatttgtctgattatcatcgctgtgctgtttctaatctgcacattcctttttctgtcgacagttgtgctggccaataaggtctctagccttagaagatctaaacaggttggaaagcgtcaaccacgctcgaatggggatttcctagctagcggactctggcctgctgagtcagacacgtggaaaagaaccaagcagcttaccggacctaaccttgtcatgcaatccaccggggttctcacagccacccgcgagcggaaagatgaggaaggcacagagaaactgacaaataaacaaatcgggtag

SEQ ID NO: 178360 - DNA, 711 bp, Artificial Sequence
  derived and/or modified sequence
atgcccaccgacatggagcacaccggccactacctgcacctggccttcctcatgaccaccgtgttcagtctgagccctgggactaaggcaaactacaccagactatgggccaacagtacaagtagctgggactcagtgatacagaataaaactggtaggaatcagaatgaaaacatcaatactaatcctattactcctgaggtggactataagggtaactctacgaatatgccggagaccagtcatattgtcgctctcacctctaagtccgagcaggaactgtatattccctctgttgtgtccaactccccatcaacagtacagtccatcgaaaacacaagcaaatcacacggcgaaattttcaagaaagatgtctgtgccgaaaataacaataacatggcaatgctgatctgcctcatcataattgccgtccttttcctgatttgcacattcctatttctcagcaccgtagtgcttgcgaacaaggtttcatcgctgcgtagaagtaaacaggtcggtaagagacagcctcggagtaatggggacttcctagcaagcggactgtggcctgctgaatccgacacgtggaagcgaaccaagcagctgacaggccccaacctggtgatgcagtctactggcgtcctgactgcaactcgggaaagaaaagacgaagagggcactgagaaattgaccaataaacagattggctag

SEQ ID NO: 178361 - DNA, 699 bp, Artificial Sequence
  derived and/or modified sequence
atggagcacaccggccactacctgcacctggccttcctgatgaccacggttttcagcttgtcaccaggcaccaaggccaattatactagactttgggcgaattctactagttcttgggactcagtgatccagaataagactggtagaaatcagaacgagaacatcaatacaaatcccatcacacccgaagtcgactacaaaggcaacagcaccaatatgccagagacttcccacatcgtcgcattgacttcaaagtctgaacaggaactttacatcccgagcgtcgtttcgaatagtccctctactgtgcagtcaatcgaaaatacatccaagtcacatggcgagatctttaaaaaggacgtatgcgccgaaaataacaacaacatggccatgttgatctgcctcatcatcatcgccgtgctcttccttatctgcaccttcctcttccttagcacagtggtcctagcaaataaagtctccagtcttcgtcgctcaaagcaggttggtaaaaggcaaccgcgcagtaatggcgatttcctggcgtcaggcttatggcctgcggaaagtgacacttggaaaagaactaagcaactgacgggacccaatctcgtcatgcaaagcaccggggttctcacggcaacacgggagcggaaggacgaggaaggtacagagaaactcactaataagcagatagggtag

SEQ ID NO: 178362 - DNA, 711 bp, Artificial Sequence
  derived and/or modified sequence
atgcccaccgatatggagcataccgggcattacctgcacctggcctttttaatgactacagtcttttcactcagccccggaactaaagcgaactacaccagactgtgggcaaactctaccagctcctgggacagtgttattcaaaataaaaccggccgaaatcagaacgaaaatatcaacacaaatcccatcactccagaagtggactacaagggcaacagtacgaacatgcccgagactagtcacatcgtggcgctgacgtcgaagagcgagcaagagttatatatccccagcgtggtctcaaattcccccagcacagtccagagcattgagaacacgagcaagtcccacggggagatcttcaagaaagacgtttgcgctgaaaacaacaataacatggccatgcttatctgtttgataatcattgcagttctgtttctcatttgcactttcctgtttctgagcacggtggtgctagcgaacaaggtgtcctctctgcggagaagcaaacaagtaggtaaacgccagcctcggagtaacggcgatttcctggccagcggattgtggcctgctgagtccgatacctggaaacggaccaagcagctcaccggtccaaatctagtcatgcagagcacgggggtcctcacagccacaagggagagaaaggacgaggaggggaccgaaaagctcactaataaacaaattgggtag

SEQ ID NO: 178363 - DNA, 711 bp, Artificial Sequence
  derived and/or modified sequence
atgcctactgacatggagcacaccggccactacttacacctagccttcctgatgactacggtgttcagtctgtcccccggtactaaggccaattatacacgcttgtgggccaatagcacctcatcttgggacagcgtgatccaaaacaaaaccggcaggaaccagaatgaaaatataaacaccaacccaattacccccgaagtggactacaaagggaattcaaccaatatgcccgagacaagtcatatcgtggctctcaccagcaagagcgaacaggaactctacataccaagcgttgttagcaacagccccagcacagtccagtcaatagaaaatacatctaagagccatggagagatattcaaaaaagacgtgtgcgcggaaaataacaacaacatggctatgctgatctgcctgatcatcatagccgttctttttctgatctgtacgttcctgttcctgtcaacggtcgtacttgcaaataaggtttcctccctgcgacgatccaagcaagtgggcaagaggcagcccagatccaacggcgatttcttagcctccggactgtggccagcggagagtgacacctggaagagaaccaaacaactgaccggtcctaacctggtgatgcagtcaaccggagttctgaccgcaacccgagagagaaaagacgaggagggcaccgaaaaactaacaaacaagcagatcggctag

SEQ ID NO: 178364 - DNA, 699 bp, Artificial Sequence
  derived and/or modified sequence
atggagcatacggggcactaccttcacctcgcatttctgatgacaacggtgtttagcctttcacctgggacaaaggcaaactacacacgcctgtgggccaattccacctcttcttgggactctgtgattcaaaacaagaccggacggaatcagaatgaaaatattaacaccaatccaataacacctgaggtggactacaaggggaattctactaacatgcccgagacgtcacatatcgttgccctgacatccaagagcgagcaagagctttacattccctctgtggtgtccaactccccgtccactgttcaatcaattgaaaatacctctaagtcccatggcgagatttttaagaaggatgtgtgcgctgagaataacaataacatggccatgctgatttgccttatcatcatagcagtgctttttctgatttgcacatttttgtttctctctaccgtggtgcttgccaacaaagtgtccagccttagacgcagtaaacaggttgggaagagacagccccgttctaacggggacttcttggctagcggactgtggccagcggagtcagacacctggaagcgcaccaagcagttgacagggccaaacctggtcatgcagtcaacaggcgtgctgacagccactagagaaaggaaagacgaggagggaactgagaagctaactaacaagcaaattgggtag

SEQ ID NO: 178365 - DNA, 711 bp, Artificial Sequence
  derived and/or modified sequence
atgcccaccgacatggagcacaccggccactacctgcacctggccttcctgatgaccaccgtgttcagcctgagccccggcaccaaggccaactacaccagactgtgggccaacagcaccagcagctgggacagcgtgatccagaacaagaccggcagaaaccagaacgagaacatcaacaccaaccccatcacccccgaggtggactacaagggcaacagcaccaacatgcccgagaccagccacatcgtggccctgaccagcaagagcgagcaggagctgtacatccccagcgtggtgagcaacagccccagcaccgtgcagagcatcgagaacaccagcaagagccacggcgagatcttcaagaaggacgtgtgcgccgagaacaacaacaacatggccatgctgatctgcctgatcatcatcgccgtgctgttcctgatctgcaccttcctgttcctgagcaccgtggtgctggccaacaaggtgagcagcctgagaagaagcaagcaggtgggcaagagacagcccagaagcaacggcgacttcctggccagcggcctgtggcccgccgagagcgacacctggaagagaaccaagcagctgaccggccccaacctggtgatgcagagcaccggcgtgctgaccgccaccagagagagaaaggacgaggagggcaccgagaagctgaccaacaagcagatcggctag

SEQ ID NO: 178366 - DNA, 699 bp, Artificial Sequence
  derived and/or modified sequence
atggagcacaccggccactacctgcacctggccttcctgatgaccaccgtgttcagcctgagccccggcaccaaggccaactacaccagactgtgggccaacagcaccagcagctgggacagcgtgatccagaacaagaccggcagaaaccagaacgagaacatcaacaccaaccccatcacccccgaggtggactacaagggcaacagcaccaacatgcccgagaccagccacatcgtggccctgaccagcaagagcgagcaggagctgtacatccccagcgtggtgagcaacagccccagcaccgtgcagagcatcgagaacaccagcaagagccacggcgagatcttcaagaaggacgtgtgcgccgagaacaacaacaacatggccatgctgatctgcctgatcatcatcgccgtgctgttcctgatctgcaccttcctgttcctgagcaccgtggtgctggccaacaaggtgagcagcctgagaagaagcaagcaggtgggcaagagacagcccagaagcaacggcgacttcctggccagcggcctgtggcccgccgagagcgacacctggaagagaaccaagcagctgaccggccccaacctggtgatgcagagcaccggcgtgctgaccgccaccagagagagaaaggacgaggagggcaccgagaagctgaccaacaagcagatcggctag

SEQ ID NO: 178367 - protein, 304 aa, Artificial Sequence
  derived and/or modified sequence
MFNSVNLGNFCSPSRKERGADFGERGSCASNLYLPSCTYYMPEFSTVSSFLPQAPSRQISYPYSAQVPPVREVSYGLEPSGKWHHRNSYSSCYAAADELMHRECLPPSTVTEILMKNEGSYGGHHHPSAPHATPAGFYSSVNKNSVLPQAFDRFFDNAYCGGGDPPAEPPCSGKGEAKGEPEAPPASGLASRAEAGAEAEAEEENTNPSSSGSAHSVAKEPAKGAAPNAPRTRKKRCPYSKFQIRELEREFFFNVYINKEKRLQLSRMLNLTDRQVKIWFQNRRMKEKKLSRDRLQYFSGNPLL

SEQ ID NO: 178368 - DNA, 2100 bp, Artificial Sequence
  derived and/or modified sequence
gtgctcagagagagagagactaagacggataacgcgtcatctcgccttcccaaattttcccccctcgctagaccgggtccaaaacctccatccggagccggcaggagaggagaacgatgtttaactcggtcaacctgggcaacttctgctctccgtcgcgcaaggagaggggcgcagatttcggcgagcgagggagctgcgcctccaacctctatctgcccagttgcacttactacatgcccgagttctccacggtctcctccttcctgccccaggccccctctcgtcagatctcctatccctactcggcccaagtgcccccggtccgggaggtctcctacggcctggagccatccggcaagtggcaccatcggaacagctactcctcctgctatgcggcggccgacgagcttatgcaccgggagtgcctgcctccttccaccgtcaccgagatcctcatgaaaaacgaaggctcctacggcggccaccaccaccccagcgccccgcacgcaacccccgccggcttctactcctcagtcaacaagaacagcgtcctgcctcaagccttcgaccgtttcttcgacaacgcctactgcggtggcggcgacccgcccgccgagcccccctgctccggcaagggcgaggccaagggggagcccgaggcacccccggcctcgggactggcgtcccgggctgaggcgggtgccgaggcggaggctgaggaggagaacacaaatcccagctcgtccggttcagcccactccgtggccaaggagccggccaaaggagccgcccccaacgccccccgcacccgcaagaagcgctgcccttattcgaaattccagatccgggaactggagcgagagtttttcttcaacgtgtatatcaacaaagagaagcggctgcagctgtcccggatgctgaacctgacggaccgacaagtgaaaatttggtttcagaacagaaggatgaaagaaaagaaactgagcagagaccggctgcagtatttctcgggaaatcctctgctgtaacctgcagaccgggcccttttgggggcggggggaggggaaaattattttattttatttttattttttattttctaactcgtcttctttccgccggtggaaaactggactgtggccagggctggcccccaccgctgtggccggcactccattccggaacctcctggaccctctatctgactctcgctgtgggacagggaccgggcctggaaagggggtgaagggaagtgtctgatgcacggcgagtgaacaccgttggcgccgaggccaagactttgatttaaaagaaaacacacctcggcgacaatgtcttgctgctcggattaggtgggggaggggcgacagtagtgagcgcctgagccgaacaatcctcgaactaaaagccttcccttgcccatgtgaaaagatccgctaagacagcatgtctgccagcggaaacttctcgagctcccccctctaccccgccccaccttgccccactactttagggggcagctaaatgtgatcctgccttgctgtgaaatttctgtaccttcaacctggtgttaggtgtgcaaagtccgtgtcctacctccgtcttcgccaaggccccgcccgagcctagttgttctccccctgaatgtgtagaaccttcctttgaaatttcttaatcggtgcattgaggtttccacatctttttccaagcagtgccccacttcatggatttatagctatagtctatgcagtcgttacctcttttttttttttttttaagaaaattgaagattggggtggtggaggcagtagggagatgggattgggcacctcccccgtgctggggcctggatttttgtaaataaatttcccaagcgtttctttccacctggagggaaagggggggacgcccccagtgagattcaaatcacgcatctctactcctctgcgtgagtgcgtgtgtacatgtgcactccccaccctgctcccttcccagagggattgctgtgaaatttttttggtggcaaataaagataaatttcattctgttcaaaaaaaaaaaaaaaaaaaaaaaaaaaaaaaaaaaaaaaaaaaaaaa

SEQ ID NO: 178369 - DNA, 915 bp, Artificial Sequence
  derived and/or modified sequence
atgttcaactcggtgaatcttggtaatttctgctcaccgtctcgcaaggaacgaggtgcagattttggggaaagggggagctgcgcaagtaacttgtacttgcccagttgcacgtactatatgcctgagttctccacagtaagctcatttctcccccaagccccttctaggcaaatatcctatccgtattccgcccaggtccctcctgtgagagaggtgtcctacggactggaacctagcggcaaatggcatcaccgcaactcttactcttcttgttatgccgccgccgacgaactgatgcaccgggaatgcctgccaccctccactgtcacagagatcttaatgaagaacgaaggtagctacggtggacatcaccatcccagcgcccctcatgccactccagccggtttttactccagtgtgaataagaacagtgtgcttccacaggcgtttgaccgtttttttgacaatgcatactgcggagggggcgacccacccgcagaacccccctgctccgggaaaggggaggccaaaggtgagcctgaagcgccacccgccagcggcttggcgtcaagagccgaggccggcgctgaggccgaagcagaggaggagaacaccaatccgtcttcgtcagggtccgcacacagcgtcgccaaagagccagccaagggtgcagcgcccaacgctccccggactcgaaagaaacggtgtccctatagcaagttccagatcagagagttggaacgtgaattttttttcaacgtctatatcaacaaggagaaacgattgcagctgtcacgcatgttgaacctgactgaccggcaggtgaaaatatggttccaaaacagaagaatgaaggaaaaaaagttatctcgagaccggcttcaatatttctcgggaaacccactcttgtag

SEQ ID NO: 178370 - DNA, 3261 bp, Artificial Sequence
  derived and/or modified sequence
gtgctcagagagagagagactaagacggataacgcgtcatctcgccttcccaaattttcccccctcgctagaccgggtccaaaacctccatccggagccggcaggagaggagaacgatgtttaactcggtcaacctgggcaacttctgctctccgtcgcgcaaggagaggggcgcagatttcggcgagcgagggagctgcgcctccaacctctatctgcccagttgcacttactacatgcccgagttctccacggtctcctccttcctgccccaggccccctctcgtcagatctcctatccctactcggcccaagtgcccccggtccgggaggtctcctacggcctggagccatccggcaagtggcaccatcggaacagctactcctcctgctatgcggcggccgacgagcttatgcaccgggagtgcctgcctccttccaccgtcaccgagatcctcatgaaaaacgaaggctcctacggcggccaccaccaccccagcgccccgcacgcaacccccgccggcttctactcctcagtcaacaagaacagcgtcctgcctcaagccttcgaccgtttcttcgacaacgcctactgcggtggcggcgacccgcccgccgagcccccctgctccggcaagggcgaggccaagggggagcccgaggcacccccggcctcgggactggcgtcccgggctgaggcgggtgccgaggcggaggctgaggaggagaacacaaatcccagctcgtccggttcagcccactccgtggccaaggagccggccaaaggagccgcccccaacgccccccgcacccgcaagaagcgctgcccttattcgaaattccagatccgggaactggagcgagagtttttcttcaacgtgtatatcaacaaagagaagcggctgcagctgtcccggatgctgaacctgacggaccgacaagtgaaaatttggtttcagaacagaaggatgaaagaaaagaaactgagcagagaccggctgcagtatttctcgggaaatcctctgctgtaacctgcagaccgggcccttttgggggcggggggaggggaaaattattttattttatttttattttttattttctaactcgtcttctttccgccggtggaaaactggactgtggccagggctggcccccaccgctgtggccggcactccattccggaacctcctggaccctctatctgactctcgctgtgggacagggaccgggcctggaaagggggtgaagggaagtgtctgatgcacggcgagtgaacaccgttggcgccgaggccaagactttgatttaaaagaaaacacacctcggcgacaatgtcttgctgctcggattaggtgggggaggggcgacagtagtgagcgcctgagccgaacaatcctcgaactaaaagccttcccttgcccatgtgaaaagatccgctaagacagcatgtctgccagcggaaacttctcgagctcccccctctaccccgccccaccttgcagctaaatgtgatcctgccttgctgtgaaatttctgtaccttcaacctggtgttaggtgtgcaaagtccgtgtcctacctccgtcttcgccaaggccccgcccgagcctagttgttctccccctgaatgtgtagaaccttcctttgaaatttcttaatcggtgcattgaggtttccacatctttttccaagcagtgccccacttcatggatttatagctatagtctatgcagtcgttacctcttttttttttttttttaagaaaattgaagattggggtggtggaggcagtagggagatgggattgggcacctcccccgtgctggggcctggatttttgtaaataaatttcccaagcgtttctttccacctggagggaaagggggggacgcccccagtgagattcaaatcacgcatctctactcctctgcgtgagtgcgtgtgtacatgtgcactccccaccctgctcccttcccagagggattgctgtgaaatttttttggtggcaaataaagataaatttcattctgttcaatattatgattttatttgacccttttattaacccctctcctcttaaaatcctccatgctcccatggcagcggcggaggaggaggaggcaggcaggcagagcccagcgggtgaggacaggcaggcagaggtgagataggccggtgctagccggcctggagctcctctccgctggcagggccaagagtatggccgtagtctcctcacattctcaagctgaggacattccatagctactctgaagctctcctttctcacgtgcagctcgagctgtgtccaaacgcccagcaacggctttctgtttaagtacacgtttgttgtggagttaattgtaaccatcatcgaatttaaatttataggaatttttttggctccaccgcccttctgccagatgtctccgtctgtcgcagttaaatgtgtagtgtggaggttagggcttttttttttttttctctaggagaaatctgtattggaatttttatacactgtttttaaggaaggaggggacagaaggagaaaccagccccctccctctcctctccacagctcctgggggtgggaaggtggggcctggctgctttccctctggcacaaatggccaggctcttccagacacaacaagacgcctatactggggccaccctgatgtttatacattgggtgtcccacagtagaaagccccagaggtttgttttgtaggggttggcactggggatggagatgacctgcggggacagtcaccatacccatctatatttgctgcatgtttcttctgtataaagataatcatggcccttgcagtgctttcagtgagggcacttcgttggtctctgtttcaaattcgttatttgggggcagaggttcaggacaactcatctcatctttccctcctctttctgtctttgtataattcaaagaaaatatttttgtcaatacaattctgttggatgaaaggaaaaagcatcatgactatcaaatctaggttctgtcatttttgatggtaggaatccctgcagcttaggtatctaaatttctaatttgtaaacgtgggtcgggtcgtgagacaagatttgcaaactagggtgtatatgcagcccacaattccctcatgtgcccacacacaaacgttttatttaactcggtgtgcctatgggtgcacataagaaggaatattatttatatgcttttgtctgttgcatggagtaaacctgaccacatacacatcta

SEQ ID NO: 178371 - DNA, 915 bp, Artificial Sequence
  derived and/or modified sequence
atgttcaacagcgtgaacctgggcaacttctgcagccccagcaggaaggagagaggagctgactttggagagcggggcagctgtgccagcaacctgtacctgcccagctgcacctactacatgcctgagttcagcacagtgtcctccttcctgccccaggcccccagccggcagatctcctacccctacagcgcccaggtgccccctgtgcgggaggtgtcctatggcctggagcccagcggcaagtggcaccacaggaacagctacagcagctgctacgccgctgctgatgagctgatgcacagagaatgtctgccccccagcacagtgacagagatcctgatgaagaatgaaggcagctatggaggccaccaccaccccagcgcccctcatgccaccccagctggcttctacagctctgtgaacaagaacagcgtgctgccccaggcctttgaccgcttctttgacaatgcctactgcggcggcggggaccccccagctgagcccccctgcagcggcaagggggaggccaagggggagcctgaggcccccccagccagcggcctggccagcagagctgaggccggggctgaggccgaggccgaggaggagaacaccaaccccagcagcagcggcagcgcccacagcgtggccaaggagcccgccaagggagctgccccaaatgcccccaggaccaggaagaagcgctgcccctacagcaagttccagatccgggagctggagcgggagttcttcttcaacgtgtacatcaacaaggagaagaggctgcagctgagcaggatgctgaacctgacagaccggcaggtgaagatctggttccagaacagaaggatgaaggagaagaagctgagccgggaccggctgcagtacttcagcggcaaccccctgctgtag

SEQ ID NO: 178372 - DNA, 915 bp, Artificial Sequence
  derived and/or modified sequence
atgttcaacagcgtgaacctgggcaacttctgcagccccagccggaaggaaaggggggcagatttcggagagcgcgggtcttgcgccagcaacctgtatctcccgtcatgcacctattatatgcctgaattcagcacggtttcttcatttctacctcaggcacccagtcgccaaatttcatacccatactccgcgcaggtgcctccagttagggaagtctcttatgggctggaacctagcgggaagtggcaccaccggaatagctattccagctgctatgctgccgccgatgagctgatgcaccgagagtgtttgcccccatccaccgtaacagaaattctcatgaaaaacgagggaagctacgggggacaccaccacccctcggctccacacgctactccagctggattttacagttcggttaataagaatagcgtgttgccccaggccttcgataggttttttgataacgcatactgcggaggaggggaccccccagcagagccaccctgttcgggaaagggtgaagccaaaggcgagccagaagcccctcccgcaagcggattggctagccgggccgaagccggagcggaggctgaagcggaggaggaaaacacaaatccttcgtcttctggcagcgctcattcggtggcgaaggaaccggccaagggggctgcccccaacgccccccggacacgcaaaaagcggtgcccatattccaaattccaaatccgggagcttgagcgggagttttttttcaatgtttacattaataaggaaaaaaggctccagttgagcaggatgctcaaccttacagatcgtcaggttaagatctggtttcagaatcgcagaatgaaagagaagaagttgtccagagaccggctgcagtacttttccgggaatcccctactgtag

SEQ ID NO: 178373 - DNA, 915 bp, Artificial Sequence
  derived and/or modified sequence
atgtttaattctgttaacttgggtaacttctgtagcccctcgcgcaaagagagaggcgctgacttcggggagcgagggtcctgtgcatctaacttgtacctgccatcttgcacctactacatgcccgaattcagcacagttagcagctttttgccgcaggcaccctctaggcagatctcttacccctatagcgcccaggttcctccggtgagggaggtcagctacgggcttgagccaagtgggaagtggcatcacagaaattcgtactctagttgttatgctgccgcagacgaactgatgcaccgcgaatgcctgcctccttccactgtgaccgagatccttatgaaaaatgaggggtcctatgggggacaccatcaccctagcgcaccacacgctacccctgccggattctatagcagtgttaataagaactcagtactgccacaggctttcgataggttttttgataatgcttattgtgggggaggtgacccgcctgcggaaccaccatgctccgggaagggtgaggctaaaggcgaaccagaggctccccctgccagcgggctcgcatcccgggcagaggcgggagcggaggcggaagcagaagaagagaatactaacccatcatcatctggcagtgcacatagcgtcgccaaggaacctgccaaaggggctgcgcctaacgctccacgcacacgtaaaaagcgctgcccttactccaaattccagattcgcgagttggagcgggagttcttctttaacgtgtacatcaataaggagaaaaggttgcagctaagccgcatgctcaatttaactgaccgtcaagttaagatatggttccagaatcgccgtatgaaagagaagaaactcagtcgggataggctgcagtatttctctgggaatcccctgctctag

SEQ ID NO: 178374 - DNA, 915 bp, Artificial Sequence
  derived and/or modified sequence
atgttcaacagcgtgaacctgggcaacttctgcagccccagcagaaaggagagaggcgccgacttcggcgagagaggcagctgcgccagcaacctgtacctgcccagctgcacctactacatgcccgagttcagcaccgtgagcagcttcctgccccaggcccccagcagacagatcagctacccctacagcgcccaggtgccccccgtgagagaggtgagctacggcctggagcccagcggcaagtggcaccacagaaacagctacagcagctgctacgccgccgccgacgagctgatgcacagagagtgcctgccccccagcaccgtgaccgagatcctgatgaagaacgagggcagctacggcggccaccaccaccccagcgccccccacgccacccccgccggcttctacagcagcgtgaacaagaacagcgtgctgccccaggccttcgacagattcttcgacaacgcctactgcggcggcggcgacccccccgccgagcccccctgcagcggcaagggcgaggccaagggcgagcccgaggccccccccgccagcggcctggccagcagagccgaggccggcgccgaggccgaggccgaggaggagaacaccaaccccagcagcagcggcagcgcccacagcgtggccaaggagcccgccaagggcgccgcccccaacgcccccagaaccagaaagaagagatgcccctacagcaagttccagatcagagagctggagagagagttcttcttcaacgtgtacatcaacaaggagaagagactgcagctgagcagaatgctgaacctgaccgacagacaggtgaagatctggttccagaacagaagaatgaaggagaagaagctgagcagagacagactgcagtacttcagcggcaaccccctgctgtag

SEQ ID NO: 178375 - protein, 352 aa, Artificial Sequence
  derived and/or modified sequence
MLGGSAGRLKMSSSGTLSNYYVDSLIGHEGDEVFAARFGPPGPGAQGRPAGVADGPAATAAEFASCSFAPRSAVFSASWSAVPSQPPAAAAMSGLYHPYVPPPPLAASASEPGRYVRSWMEPLPGFPGGAGGGGGGGGGGPGRGPSPGPSGPANGRHYGIKPETRAAPAPATAASTTSSSSTSLSSSSKRTECSVARESQGSSGPEFSCNSFLQEKAAAATGGTGPGAGIGAATGTGGSSEPSACSDHPIPGCSLKEEEKQHSQPQQQQLDPNNPAANWIHARSTRKKRCPYTKYQTLELEKEFLFNMYLTRDRRYEVARILNLTERQVKIWFQNRRMKMKKMSKEKCPKGD

SEQ ID NO: 178376 - DNA, 1902 bp, Artificial Sequence
  derived and/or modified sequence
cgcgaccaatggtggaggctgcagcctgcgaactagtcggtggctcgggcgccggcggggagctgctcggcggcggacagtgtaatgttgggtgggagtgcgggacgcctcaaaatgtcttccagtggcaccctcagcaactactacgtggactcgcttataggccatgagggcgacgaggtgttcgcggcgcgcttcgggccgccggggccaggcgcgcagggccggcctgcaggtgtggctgatggcccggccgccaccgccgccgagttcgcctcgtgtagttttgcccccagatcggccgtgttctctgcctcgtggtccgcggtgccctcccagcccccggcagcggcggcgatgagcggcctctaccacccgtacgttcccccgccgcccctggccgcctctgcctccgagcccggccgctacgtgcgctcctggatggagccgctgcccggcttcccgggcggtgcgggcggtggcggtggtggtggaggcggcggtccgggccgcggtcccagccctggccccagcggcccagccaacgggcgccactacgggattaagcctgaaacccgagcggccccggcccccgccacggccgcctccaccacctcctcctcctccacttccttatcctcctcctccaaacggactgagtgctccgtggcccgggagtcccaggggagcagcggccccgagttctcgtgcaactcgttcctgcaggagaaggcggcagcggcgacggggggaaccgggcctggggcagggatcggggccgcgactgggacgggcggctcgtcggagccctcagcttgcagcgaccacccgatcccaggctgttcgctgaaggaggaggagaagcagcattcgcagccgcagcagcagcaacttgacccaaacaaccccgccgcgaactggatccacgctcgctccacccggaaaaagcgctgtccctacaccaaataccagacgcttgagctggagaaagaattcctcttcaacatgtacctcacccgggaccggcgctacgaggtggccaggattctcaacctaacagagagacaggtcaaaatctggtttcagaaccgtaggatgaaaatgaaaaagatgagcaaggagaaatgccccaaaggagactgacccggcgcggtgctggcgggagcgctcaagggcagcggatttgttgttgttgctgttttcctttgtgggtgtttggtgcttgatttccagaaactctccagcgacttggacttcttcttctttttttttttctttttagatagaagtgactgtgtggttggtctctgaggtatttgggggactctgtatttgctcgtttacgtgttggaaaaaccaagtggctttggggtttcgccctatcccactccctctctttcctgctccattggttccttaagaaatgctatattttgtgagtgcaagctggcttggggagccctctcttgtgtaaatgtcccccatgtttctgaaaagtgctgtagtttagtcccctcacccccagcactgcccaaacaggggccaagtgcgccccaattccaagaatgaaggcagagcgacaacagtgcggacaccccggctgctagcccacggtgaagcccggcggggttgcccaccagttgcgaaagccccctttcctcagggagcacgcgggacctcggtggagatctccagtgaggcttagaggagcccagggcctcgggcgggttggggtttgtcctcagtgcattggacgcgctgctctctcccctgaaggctgggctcgcgtgggcggccgcgggtggtggccctcccggttcctgcccgaggaccagttgtaaatgttactgcttcctactaataaatgctgacctgatcaaatggaaaaaaaaaaaaaaaaaa

SEQ ID NO: 178377 - DNA, 1059 bp, Artificial Sequence
  derived and/or modified sequence
atgttggggggatccgcaggccgtttaaaaatgagttcttctgggaccctttcaaattactacgtggactcactgattggacatgagggtgatgaggtattcgccgccaggtttgggcctcccggtccaggcgcccaggggcgacccgcgggcgtggccgacggacctgccgctacagcagccgaatttgcttcctgtagtttcgctcccaggtctgctgttttctcggcaagttggagcgcagtccctagtcaaccgcccgccgctgccgccatgtccggcttgtatcacccatatgtgccaccaccacctctagccgcatccgcttcagagccaggtcggtacgtacgatcttggatggaaccactgcccggattccccgggggggccggcgggggggggggcggcggcggcgggggacccgggcgagggccaagcccagggccaagcggacctgcaaacgggcgtcattacggcatcaaacccgaaacaagggccgcccctgcacccgctacagccgccagcactaccagctcgtcctccacctccctgtcaagttcttccaagagaacagagtgttctgtcgcccgcgagtcacaaggaagctccgggcctgagttttcttgtaattcttttctgcaggagaaggcagcggcagcgaccggcggaactggtcctggcgcaggcatcggagccgctacaggcacaggcggcagttcagagccctcggcttgcagcgaccaccccatccctggctgctccctgaaagaagaagaaaagcagcactctcagccacagcagcagcagcttgaccccaataatcctgctgctaattggatccatgcgaggtccactcgtaagaagcgatgtccatacaccaaatatcagacactcgaattggagaaagagtttctgttcaatatgtatttaaccagggatagaagatatgaggtggcaagaatactgaatctgacagaaaggcaggttaaaatctggttccagaaccggagaatgaagatgaagaagatgtctaaggagaaatgcccaaagggtgactag

SEQ ID NO: 178378 - DNA, 2418 bp, Artificial Sequence
  derived and/or modified sequence
gcggccgctccgtgtgccctggactcgccgcccgcggctcggaagctggagagtcagcgacggggcccgactgcgggaccgagggctgcaagaagaagcgaacaaatagtccccagcgcctcctctggatgcggtcgcgtctgtggtcctggcagccgctgggcgggccaggccaggtcgggccgggccgagccgggcacatggacctgggcctgcgggctctaattgcggcgcttatgttgatgattttttttttaatcacagcagcccccagtttagcggactgatttactcccggtattggtaaatatgatcacgtgggccgcgcgaccaatggtggaggctgcagcctgcgaactagtcggtggctcgggcgccggcggggagctgctcggcggcggacagtgtaatgttgggtgggagtgcgggacgcctcaaaatgtcttccagtggcaccctcagcaactactacgtggactcgcttataggccatgagggcgacgaggtgttcgcggcgcgcttcgggccgccggggccaggcgcgcagggccggcctgcaggtgtggctgatggcccggccgccaccgccgccgagttcgcctcgtgtagttttgcccccagatcggccgtgttctctgcctcgtggtccgcggtgccctcccagcccccggcagcggcggcgatgagcggcctctaccacccgtacgttcccccgccgcccctggccgcctctgcctccgagcccggccgctacgtgcgctcctggatggagccgctgcccggcttcccgggcggtgcgggcggtggcggtggtggtggaggcggcggtccgggccgcggtcccagccctggccccagcggcccagccaacgggcgccactacgggattaagcctgaaacccgagcggccccggcccccgccacggccgcctccaccacctcctcctcctccacttccttatcctcctcctccaaacggactgagtgctccgtggcccgggagtcccaggggagcagcggccccgagttctcgtgcaactcgttcctgcaggagaaggcggcagcggcgacggggggaaccgggcctggggcagggatcggggccgcgactgggacgggcggctcgtcggagccctcagcttgcagcgaccacccgatcccaggctgttcgctgaaggaggaggagaagcagcattcgcagccgcagcagcagcaacttgacccaaacaaccccgccgcgaactggatccacgctcgctccacccggaaaaagcgctgtccctacaccaaataccagacgcttgagctggagaaagaattcctcttcaacatgtacctcacccgggaccggcgctacgaggtggccaggattctcaacctaacagagagacaggtcaaaatctggtttcagaaccgtaggatgaaaatgaaaaagatgagcaaggagaaatgccccaaaggagactgacccggcgcggtgctggcgggagcgctcaagggcagcggatttgttgttgttgctgttttcctttgtgggtgtttggtgcttgatttccagaaactctccagcgacttggacttcttcttctttttttttttctttttagatagaagtgactgtgtggttggtctctgaggtatttgggggactctgtatttgctcgtttacgtgttggaaaaaccaagtggctttggggtttcgccctatcccactccctctctttcctgctccattggttccttaagaaatgctatattttgtgagtgcaagctggcttggggagccctctcttgtgtaaatgtcccccatgtttctgaaaagtgctgtagtttagtcccctcacccccagcactgcccaaacaggggccaagtgcgccccaattccaagaatgaaggcagagcgacaacagtgcggacaccccggctgctagcccacggtgaagcccggcggggttgcccaccagttgcgaaagccccctttcctcagggagcacgcgggacctcggtggagatctccagtgaggcttagaggagcccagggcctcgggcgggttggggtttgtcctcagtgcattggacgcgctgctctctcccctgaaggctgggctcgcgtgggcggccgcgggtggtggccctcccggttcctgcccgaggaccagttgtaaatgttactgcttcctactaataaatgctgacctgatcaaatggagcccagacgctggccctaaacattgtgtgcctgctttctctgcctctctgcaaaatatcacactcaggatatttctcctctacccctgggagtgagacattgttaaaaattcagggcccttccacctgacagatctctctgatgtgtctctgccttctctgcctcacatccctttgtgtaggcagatgcagcagcacagaccctgtgg

SEQ ID NO: 178379 - DNA, 1059 bp, Artificial Sequence
  derived and/or modified sequence
atgctgggcggcagcgctggccgcctgaagatgagcagcagcggcaccctgagcaactactacgtggacagcctcatcggccacgagggagatgaggtgtttgctgcccgcttcggccccccaggccctggggcccagggccggcctgctggggtggctgatggccctgctgccacagctgctgagtttgccagctgcagctttgcccccaggtctgctgtgttcagcgcctcctggagcgctgtgcccagccagcccccagctgctgctgccatgagcggcctgtaccacccctacgtgcccccaccacccctggccgccagcgccagcgagcccggccgctacgtgcgctcctggatggagcccctgcccggcttccctggaggagctgggggcggcggcggcggcggcggcggcggccctggccggggccccagccctggccccagcggccctgccaacggccgccactacggcatcaagccagagacccgggccgccccagccccagccacagctgccagcaccaccagcagcagcagcaccagcctgagcagcagcagcaagaggacagagtgcagcgtggcccgggagagccagggcagcagcggccctgagttcagctgcaacagcttcctgcaggagaaggctgctgctgccactggaggcaccggccctggggccggcatcggggccgccaccggcaccggcggcagcagcgagcccagcgcctgcagcgaccaccccatccctggctgcagcctgaaggaggaggagaagcagcacagccagccccagcagcagcagctggaccccaacaacccagctgccaactggattcatgcccggagcaccaggaagaagcgctgcccctacaccaagtaccagaccctggagctggagaaggagttcctgttcaacatgtacctgacccgggaccggcgctatgaggtggcccgcatcctgaacctgacagagcggcaggtgaagatctggttccagaacagaaggatgaagatgaagaagatgagcaaggagaagtgccccaagggggactag

SEQ ID NO: 178380 - DNA, 1059 bp, Artificial Sequence
  derived and/or modified sequence
atgctgggcggcagcgccggccggctgaagatgagcagcagcggcacactgtcgaattactacgttgatagtcttatcggacacgaaggagacgaagtatttgcggcacgcttcgggccacccggcccgggagctcagggacgcccagccggagtcgctgatggacctgccgcaactgccgctgagtttgcgagttgttcctttgcgcccaggagcgcagtgttctctgcctcatggagtgcggttcccagccagccgcctgcagcggccgcaatgagcggcttgtaccacccttacgtaccaccacctccgctggctgccagcgccagcgaacctgggagatatgttcgtagttggatggaacccctgcctggatttcctgggggcgctggtggtgggggcggcggcggaggtggcggcccaggccgcggtcccagccctggcccctctgggcccgctaacggacgacactacggtatcaaacccgaaacgagggccgcacctgctcccgctaccgcggcatccactacatcatcctcatctacaagcctctcttcttcctcaaagcgcaccgagtgttcagttgcgcgggagtcacaagggagtagcgggcccgaattttcctgcaacagcttcctgcaagagaaagccgccgccgcaacaggcggaactggtcccggcgctgggatcggtgcagcgacaggcactggaggatcatctgagccaagcgcctgcagcgaccatcccattccaggctgttctctaaaggaggaagagaagcagcattctcagccacaacagcagcagttggaccccaataaccctgcagccaattggatccacgcccgcagcacaagaaaaaaaagatgtccatacacaaagtatcagacgttggaactggagaaggagttcctgtttaacatgtatctcaccagagataggaggtacgaagtcgcgcgcattctgaacctgaccgaacgtcaggttaaaatttggttccagaaccggcggatgaagatgaaaaaaatgtcaaaagaaaagtgtccaaaaggcgattag

SEQ ID NO: 178381 - DNA, 1059 bp, Artificial Sequence
  derived and/or modified sequence
atgcttggcggttccgcgggacggctcaagatgtcctctagcggcactctgtcaaactattacgtagactcactcatcggccacgagggggatgaggtgttcgccgctcgcttcggtccccctggccctggcgcacagggacgaccagcaggggtggctgacggcccagccgctaccgcagccgagttcgcaagctgctcgttcgctcctagatctgccgtgttcagcgcttcatggagcgccgtccctagccaaccccctgcagcagccgcaatgagcggcttataccacccctatgtgcctcccccacccttagccgcttcagcctccgagccaggaagatacgtgcggagttggatggaacccctgcccggttttcccggaggggctggcggtggcggaggtggtgggggagggggacctggtaggggtccatccccgggtccttctggtccagctaacggcagacattatggaatcaagcctgaaacccgcgctgcgccagccccagctacagccgcaagcacaacaagctcatcatccaccagcctttcttcaagcagcaaaagaactgagtgcagcgtggcccgtgagtctcagggctcttctggccctgagttctcttgcaactctttcctccaggagaaagctgcggctgctaccggaggcacagggccaggtgccggtatcggggctgcaaccggcactggcggttcatcagagccctccgcctgttccgaccacccaatccctgggtgttcactgaaggaagaggagaaacagcactcccaaccgcagcaacagcagttggatcctaacaatcccgcagcaaattggatccatgcaaggtctactcgaaagaaacgttgtccatataccaagtatcagacattagaacttgaaaaagagtttctctttaacatgtatttgacacgtgaccgcagatacgaggttgcgagaattctcaacttaacggagcggcaagtgaagatttggttccagaatcggaggatgaagatgaagaaaatgagcaaagagaagtgcccaaaaggggactag

SEQ ID NO: 178382 - DNA, 1059 bp, Artificial Sequence
  derived and/or modified sequence
atgctgggcggcagcgccggcagactgaagatgagcagcagcggcaccctgagcaactactacgtggacagcctgatcggccacgagggcgacgaggtgttcgccgccagattcggcccccccggccccggcgcccagggcagacccgccggcgtggccgacggccccgccgccaccgccgccgagttcgccagctgcagcttcgcccccagaagcgccgtgttcagcgccagctggagcgccgtgcccagccagccccccgccgccgccgccatgagcggcctgtaccacccctacgtgccccccccccccctggccgccagcgccagcgagcccggcagatacgtgagaagctggatggagcccctgcccggcttccccggcggcgccggcggcggcggcggcggcggcggcggcggccccggcagaggccccagccccggccccagcggccccgccaacggcagacactacggcatcaagcccgagaccagagccgcccccgcccccgccaccgccgccagcaccaccagcagcagcagcaccagcctgagcagcagcagcaagagaaccgagtgcagcgtggccagagagagccagggcagcagcggccccgagttcagctgcaacagcttcctgcaggagaaggccgccgccgccaccggcggcaccggccccggcgccggcatcggcgccgccaccggcaccggcggcagcagcgagcccagcgcctgcagcgaccaccccatccccggctgcagcctgaaggaggaggagaagcagcacagccagccccagcagcagcagctggaccccaacaaccccgccgccaactggatccacgccagaagcaccagaaagaagagatgcccctacaccaagtaccagaccctggagctggagaaggagttcctgttcaacatgtacctgaccagagacagaagatacgaggtggccagaatcctgaacctgaccgagagacaggtgaagatctggttccagaacagaagaatgaagatgaagaagatgagcaaggagaagtgccccaagggcgactag

SEQ ID NO: 178383 - protein, 288 aa, Artificial Sequence
  derived and/or modified sequence
MKPSGEDQAALAAGPWEECFQAAVQLALRAGQIIRKALTEEKRVSTKTSAADLVTETDHLVEDLIISELRERFPSHRFIAEEAAASGAKCVLTHSPTWIIDPIDGTCNFVHRFPTVAVSIGFAVRQELEFGVIYHCTEERLYTGRRGRGAFCNGQRLRVSGETDLSKALVLTEIGPKRDPATLKLFLSNMERLLHAKAHGVRVIGSSTLALCHLASGAADAYYQFGLHCWDLAAATVIIREAGGIVIDTSGGPLDLMACRVVAASTREMAMLIAQALQTINYGRDDEK

SEQ ID NO: 178384 - protein, 85 aa, Artificial Sequence
  derived and/or modified sequence
MKPSGEDQAALAAGPWEECFQAAVQLALRAGQIIRKALTEEKRVSTKTSAADLVTETDHLVEDLIISELRERFPSHRSPFSLVHM

SEQ ID NO: 178385 - DNA, 867 bp, Artificial Sequence
  derived and/or modified sequence
atgaaaccctccggcgaggatcaagctgcactggccgccggcccctgggaagaatgtttccaggccgcagttcaactggctctgcgggcagggcagatcattagaaaagcattaaccgaggaaaaacgcgtttctactaagacatcggcggctgatctcgtcacagaaacggaccacctggtagaagacctgataatttcagagctgcgcgaacggtttccaagccatcggtttatcgctgaagaggccgccgcttctggtgctaagtgcgtgttaacacacagtccaacatggattatcgaccctatagacggcacttgcaatttcgtccaccgatttcctactgttgctgtaagtatcggtttcgcggtgaggcaggaactcgagtttggagtgatctaccactgcacagaagaaagactttacacgggcagaagaggacgtggagctttctgtaacggtcaacgattacgggtgtccggagaaacagatttgtccaaagcgttggtactgacagagatcggtcctaagagggatccagccactttgaagttgtttctgagcaacatggaaagactattacacgcaaaggcccacggagttcgggtgataggatcatcaaccctggcgttgtgtcacttagcttcaggcgccgccgacgcatactatcagttcggcctacattgctgggaccttgcggcagctacggtgattattcgcgaagctggaggaatcgtaatcgatacatctggaggcccactggacttgatggcttgccgcgtagtggcagcttctacccgcgagatggccatgttgatagcccaggcattacagaccattaattacggtagggatgatgaaaaatag

SEQ ID NO: 178386 - DNA, 258 bp, Artificial Sequence
  derived and/or modified sequence
atgaaaccatctggggaagaccaggccgcgctggctgcaggaccatgggaggagtgctttcaggctgccgtgcaactggctttacgagccgggcagatcatacggaaggctctgaccgaagaaaaacgggtgagcacgaaaacaagcgcagccgacctagtcacggagacagatcatctggtggaagacctcatcatcagcgagctgagggagaggtttccttcccaccggtcaccgtttagcctggtccatatgtag

SEQ ID NO: 178387 - DNA, 1528 bp, Artificial Sequence
  derived and/or modified sequence
gctgggctgggctcggcacggggcggggcggagggtggggagcggaaagcaggacgcacggctcccgcggcccgctggctgcccttcccgccagcgcaggtgtgggacgggcggcggactaggcacagagctgcgggagcaggcacagggagtgtggagcctggcggcgggacggcgggatccggtgggagccggagtcccgccgaggggggctggaggtggaggggcccggcgaggccgcgatgaagccgagcggcgaggaccaggcggcgctggcggccggcccctgggaggagtgcttccaggcggccgtgcagctggcgctgcgggcaggacagatcatcagaaaagcccttactgaggaaaaacgtgtctcaacaaaaacatcagctgcagatcttgtgacagaaacagatcaccttgtggaagatttaattatttctgagttgcgagagaggtttccttcacacaggttcattgcagaagaggccgcggcttctggggccaagtgtgtgctcacccacagcccgacgtggatcatcgaccccatcgacggcacctgcaattttgtgcacagattcccgactgtggcggttagcattggatttgctgttcgacaagagcttgaattcggagtgatttaccactgcacagaggagcggctgtacacgggccggcggggtcggggcgccttctgcaatggccagcggctccgggtctccggggagacagatctctcaaaggccttggttctgacagaaattggccccaaacgtgaccctgcgaccctgaagctgttcctgagtaacatggagcggctgctgcatgccaaggcgcatggggtccgagtgattggaagctccacattggcactctgccacctggcctcaggggccgcggatgcctattaccagtttggcctgcactgctgggatctggcggctgccacagtcatcatcagagaagcaggcggcatcgtgatagacacttcgggtggacccctcgacctcatggcttgcagagtggttgcggccagcacccgggagatggcgatgctcatagctcaggccttacagacgattaactatgggcgggatgatgagaagtgactgcggctgaggcaaagctgctcccaaggcctccctgggctgctgtgggctcctggggaggtggccctcgtggcccacgctccatgccagtggctcacgctctgctcctggctaccccagagggagttgtcacgctacagtgagtggctggccttttaaatcgacgtctctctcaccaggatttggtgtttagctgtttctctctttaatctcacgtagcctttttcaggttagtacgtgttcttctgtcagggccaaaactcaaatctcctgtgaaatacgtattgataatccaatcttgatttttccccccagaatataaatctcaggtaataaggctttagaactgctgataaagcggatcgttctcaggccctccccccggagtacttcagaatgcaataaatcaaaataatggc

SEQ ID NO: 178388 - DNA, 867 bp, Artificial Sequence
  derived and/or modified sequence
atgaagcccagcggggaggaccaggccgccctggccgccggcccctgggaggagtgcttccaggccgctgtgcagctggccctgcgggccggccagatcatcaggaaggccctgacagaggagaagagggtgtccaccaagaccagcgctgctgacctggtgacagaaacagaccacctggtggaggacctgatcatcagcgagctgcgggagcgcttccccagccaccgcttcatcgccgaggaggccgccgccagcggggccaagtgtgtgctgacccacagccccacctggatcatcgaccccattgatggcacctgcaactttgtgcaccgcttccccaccgtggccgtgtccatcggctttgctgtgcggcaggagctggagtttggagtcatctaccactgcacagaggagcggctgtacacaggaagaagaggccgcggggccttctgcaatggccagaggctgcgggtgtctggagaaacagacctgagcaaggccctggtgctgacagagatcggccccaagagggaccctgccaccctgaagctgttcctgagcaacatggagcggctgctgcacgccaaggcccatggagtgcgggtcatcggcagcagcaccctggccctgtgccacctggccagcggggctgctgatgcctactaccagtttggcctgcactgctgggacctggccgccgccaccgtcatcatccgggaggccggcggcatcgtgattgacaccagcggcggccccctggacctgatggcctgccgggtggtggccgccagcacccgggagatggccatgctgattgcccaggccctgcagaccatcaactacggcagagatgatgagaagtag

SEQ ID NO: 178389 - DNA, 258 bp, Artificial Sequence
  derived and/or modified sequence
atgaagcccagcggggaggaccaggccgccctggccgccggcccctgggaggagtgcttccaggccgctgtgcagctggccctgcgggccggccagatcatcaggaaggccctgacagaggagaagagggtgtccaccaagaccagcgctgctgacctggtgacagaaacagaccacctggtggaggacctgatcatcagcgagctgcgggagcgcttccccagccacaggagccccttcagcctggtgcacatgtag

SEQ ID NO: 178390 - DNA, 867 bp, Artificial Sequence
  derived and/or modified sequence
atgaagcccagcggcgaggaccaggccgccctggccgccggcccctgggaggaatgcttccaggccgcggtgcagctggcgctgagagccggccagatcatccggaaagctctgactgaggagaagagagtcagtaccaaaacttcagccgctgacctcgtgactgagacagaccacctggtggaggatttaatcatcagcgagctacgcgagcgctttccaagccatcgattcatcgcagaggaggccgccgcaagtggagcaaagtgcgtattgacacactcacctacctggataattgacccaattgacgggacttgtaacttcgtccatcgcttcccaaccgtcgccgtgagcataggcttcgccgttaggcaagaactggaatttggggtcatctatcactgtacagaggagaggctctacacggggagaaggggtagaggcgccttttgtaacggacagaggttaagagttagcggggagacagatctgagcaaggctctcgtgctgaccgagataggaccaaaaagagatcctgccaccctgaagctttttttaagcaatatggagaggctgctgcatgcaaaagcccacggcgtgcgggtgattgggtcaagcactctggctctctgtcacttggcctcaggcgccgccgacgcatactaccagtttggcctccattgttgggacctcgcagcagcaactgtcatcatcagagaggctggtggcattgtgatcgatacttctggtggtccactcgacctgatggcttgcagagtagtggctgcatccacacgagaaatggcaatgctgattgcgcaagccctccagaccatcaactacggccgagacgacgaaaagtag

SEQ ID NO: 178391 - DNA, 258 bp, Artificial Sequence
  derived and/or modified sequence
atgaagcccagcggcgaggaccaggccgccctggccgccggcccctgggaagagtgcttccaggcagccgtgcagctggcccttcgcgcagggcagatcattagaaaagctcttaccgaggaaaaacgtgtatcgaccaagacctccgccgctgatctcgtgacagaaaccgatcatctagtggaggacttgatcatcagcgagctgagagaaagatttcccagtcaccgctctcccttctccctggtgcatatgtag

SEQ ID NO: 178392 - DNA, 867 bp, Artificial Sequence
  derived and/or modified sequence
atgaagccctcaggcgaggaccaggcggcactggctgccggtccctgggaggaatgcttccaggcggctgtccaactagcactgagggcgggtcagattatccgcaaagctctgaccgaagagaagagagtgtcaactaaaacatcagcggctgatcttgtgactgagactgatcaccttgtggaggacctcattatcagcgagcttcgcgagcggttcccaagccataggttcatcgccgaagaggccgcagctagtggtgctaagtgcgttctcactcacagcccaacatggatcattgaccctatcgacgggacatgcaactttgtgcaccgttttcccaccgtcgccgtgtctatcggattcgctgttagacaagaactggaattcggggtcatctaccattgcaccgaggaacgcctctacaccggacgacgcggaaggggagcattctgtaacggtcagaggctgagggtgtctggggaaacagacctgtctaaggccctggtgctgaccgagatcggacccaagcgcgacccggctactctgaaactgtttttgagtaatatggagcgtcttcttcatgctaaagcccacggagtgcgcgtaattggctctagtactctggctctgtgccatttggcgtccggcgcagccgatgcctattaccagttcggcctgcactgttgggatctcgctgccgcaacagttatcattcgtgaggcaggtggcatcgtgatcgacaccagtgggggtcccctcgacctgatggcctgtagggttgtcgccgcttcaactagggaaatggccatgctgattgctcaagctcttcagacaatcaactacggacgggatgacgagaaatag

SEQ ID NO: 178393 - DNA, 258 bp, Artificial Sequence
  derived and/or modified sequence
atgaagccgagcggggaggatcaggctgctttggccgctggtccttgggaggagtgcttccaggccgcagtgcagcttgcgctgagagcgggtcagatcattcgcaaagccctaacagaggagaaacgggtcagcaccaagacctccgcagcagatttagtcaccgagaccgaccacctggttgaggacctgattatatctgagttacgtgagcgttttccctcccaccggagtccattctcactggtgcatatgtag

SEQ ID NO: 178394 - DNA, 867 bp, Artificial Sequence
  derived and/or modified sequence
atgaagcccagcggcgaggaccaggccgccctggccgccggcccctgggaggagtgcttccaggccgccgtgcagctggccctgagagccggccagatcatcagaaaggccctgaccgaggagaagagagtgagcaccaagaccagcgccgccgacctggtgaccgagaccgaccacctggtggaggacctgatcatcagcgagctgagagagagattccccagccacagattcatcgccgaggaggccgccgccagcggcgccaagtgcgtgctgacccacagccccacctggatcatcgaccccatcgacggcacctgcaacttcgtgcacagattccccaccgtggccgtgagcatcggcttcgccgtgagacaggagctggagttcggcgtgatctaccactgcaccgaggagagactgtacaccggcagaagaggcagaggcgccttctgcaacggccagagactgagagtgagcggcgagaccgacctgagcaaggccctggtgctgaccgagatcggccccaagagagaccccgccaccctgaagctgttcctgagcaacatggagagactgctgcacgccaaggcccacggcgtgagagtgatcggcagcagcaccctggccctgtgccacctggccagcggcgccgccgacgcctactaccagttcggcctgcactgctgggacctggccgccgccaccgtgatcatcagagaggccggcggcatcgtgatcgacaccagcggcggccccctggacctgatggcctgcagagtggtggccgccagcaccagagagatggccatgctgatcgcccaggccctgcagaccatcaactacggcagagacgacgagaagtag

SEQ ID NO: 178395 - DNA, 258 bp, Artificial Sequence
  derived and/or modified sequence
atgaagcccagcggcgaggaccaggccgccctggccgccggcccctgggaggagtgcttccaggccgccgtgcagctggccctgagagccggccagatcatcagaaaggccctgaccgaggagaagagagtgagcaccaagaccagcgccgccgacctggtgaccgagaccgaccacctggtggaggacctgatcatcagcgagctgagagagagattccccagccacagaagccccttcagcctggtgcacatgtag

SEQ ID NO: 178396 - protein, 1297 aa, Artificial Sequence
  derived and/or modified sequence
MAVPSLWPWGACLPVIFLSLGFGLDTVEVCPSLDIRSEVAELRQLENCSVVEGHLQILLMFTATGEDFRGLSFPRLTQVTDYLLLFRVYGLESLRDLFPNLAVIRGTRLFLGYALVIFEMPHLRDVALPALGAVLRGAVRVEKNQELCHLSTIDWGLLQPAPGANHIVGNKLGEECADVCPGVLGAAGEPCAKTTFSGHTDYRCWTSSHCQRVCPCPHGMACTARGECCHTECLGGCSQPEDPRACVACRHLYFQGACLWACPPGTYQYESWRCVTAERCASLHSVPGRASTFGIHQGSCLAQCPSGFTRNSSSIFCHKCEGLCPKECKVGTKTIDSIQAAQDLVGCTHVEGSLILNLRQGYNLEPQLQHSLGLVETITGFLKIKHSFALVSLGFFKNLKLIRGDAMVDGNYTLYVLDNQNLQQLGSWVAAGLTIPVGKIYFAFNPRLCLEHIYRLEEVTGTRGRQNKAEINPRTNGDRAACQTRTLRFVSNVTEADRILLRWERYEPLEARDLLSFIVYYKESPFQNATEHVGPDACGTQSWNLLDVELPLSRTQEPGVTLASLKPWTQYAVFVRAITLTTEEDSPHQGAQSPIVYLRTLPAAPTVPQDVISTSNSSSHLLVRWKPPTQRNGNLTYYLVLWQRLAEDGDLYLNDYCHRGLRLPTSNNDPRFDGEDGDPEAEMESDCCPCQHPPPGQVLPPLEAQEASFQKKFENFLHNAITIPISPWKVTSINKSPQRDSGRHRRAAGPLRLGGNSSDFEIQEDKVPRERAVLSGLRHFTEYRIDIHACNHAAHTVGCSAATFVFARTMPHREADGIPGKVAWEASSKNSVLLRWLEPPDPNGLILKYEIKYRRLGEEATVLCVSRLRYAKFGGVHLALLPPGNYSARVRATSLAGNGSWTDSVAFYILGPEEEDAGGLHVLLTATPVGLTLLIVLAALGFFYGKKRNRTLYASVNPEYFSASDMYVPDEWEVPREQISIIRELGQGSFGMVYEGLARGLEAGEESTPVALKTVNELASPRECIEFLKEASVMKAFKCHHVVRLLGVVSQGQPTLVIMELMTRGDLKSHLRSLRPEAENNPGLPQPALGEMIQMAGEIADGMAYLAANKFVHRDLAARNCMVSQDFTVKIGDFGMTRDVYETDYYRKGGKGLLPVRWMAPESLKDGIFTTHSDVWSFGVVLWEIVTLAEQPYQGLSNEQVLKFVMDGGVLEELEGCPLQLQELMSRCWQPNPRLRPSFTHILDSIQEELRPSFRLLSFYYSPECRGARGSLPTTDAEPDSSPTPRDCSPQNGGPGH

SEQ ID NO: 178397 - DNA, 3894 bp, Artificial Sequence
  derived and/or modified sequence
atggctgtcccttccctgtggccttggggcgcttgtctgcctgtgatctttttgtcccttggcttcggactcgatacggttgaggtatgtccctccttggacatccggtctgaggtcgccgagctgaggcagctcgaaaactgctcagtcgtcgagggccacttgcaaatcttgctcatgttcaccgctactggagaggactttaggggattgtcatttcccagattaactcaagttactgattacctgctcttattccgggtgtacgggctggagtcattacgggacctgtttcctaatctggcagtaatccgcggtacacgtttgttccttgggtatgcccttgtgatattcgagatgccacatctgcgggacgtcgccctcccagccttaggagctgttttacgtggagccgtgcgagtagaaaagaatcaggaactgtgccacctgtctacgatcgattggggactgttgcagccagctcccggggcaaatcatatcgtgggcaataagctgggtgaggaatgcgcggacgtctgccccggggtgctgggagccgccggggagccctgcgcgaagaccactttcagcgggcatactgattacaggtgctggacaagcagccactgtcagcgggtttgcccatgccctcatggaatggcctgcaccgctaggggagaatgctgccatacggagtgccttggcggctgtagtcaacccgaggacccaagagcctgcgttgcctgtcgccatctttattttcagggcgcctgcctgtgggcatgtccacccggcacatatcagtatgagtcgtggcgctgtgtgaccgctgaacgctgtgcgtccctccacagtgtgccagggcgggcgagcaccttcggcattcaccagggctcgtgtcttgcacaatgtccgtccgggtttacacgaaactcgagctccatcttttgccacaaatgtgaagggttgtgccctaaagagtgcaaggttggaaccaagacaatcgattcaatccaggccgctcaggacttagtgggttgcactcacgtggaagggagcttgatcctgaatcttcgccaaggctataacctcgagccacagttgcagcacagcctgggcctggtcgagacgatcacaggattcctcaaaatcaaacattctttcgccctggtgtccctgggctttttcaagaacttgaaactgatcaggggagacgctatggttgatggcaactatactctctatgtgctggacaaccagaacttacaacaactgggatcctgggtggcagccggcctaacaatcccggtgggtaagatttattttgcattcaatccacgcttgtgcctagaacacatatacaggctggaggaggttactggaacacgcggcaggcagaataaggccgaaatcaatcccaggaccaacggagatcgcgctgcttgccagacccgcaccttgaggttcgtaagcaacgtgactgaggccgatcgaatccttctcaggtgggagaggtacgagccgcttgaagcgcgggatctcctatcttttattgtctactataaggaaagccccttccagaatgctaccgaacacgtgggacctgacgcttgcggaacgcagagttggaacttgctcgatgtggaactgcctctgagccggacacaagaaccaggcgtcacacttgcatccctaaaaccttggacccagtacgctgtgttcgtgcgggccattactctgactaccgaagaggacagccctcaccagggcgctcagtccccgatcgtgtacttgagaacgcttccagctgcaccaacagtaccccaggacgtgatcagtactagcaattcgagcagtcatctgttggtgcggtggaagccccctacgcaaaggaacgggaacctcacatattacctggtgttgtggcagagactcgcagaggacggggacttatacttgaacgattactgtcacagaggcctgcgactgcctacttccaataacgaccctaggtttgatggagaggacggtgacccggaggcagagatggagtccgactgctgtccgtgtcaacatccccctcctggccaggttctgcccccgctggaagcacaggaagcttcattccagaagaaatttgagaacttcctgcataacgctattactatccccataagcccttggaaggtcacaagtattaacaaaagcccacagcgggactctggcaggcatagacgtgctgcgggacctttacgcctaggtggaaatagctccgatttcgagatccaggaggacaaagtgcctagagagagagcagtactctcgggtctccgccactttacggaataccggattgacatacacgcttgcaatcatgccgcccacaccgtcggatgtagcgcagcaactttcgtgtttgccagaacaatgcctcatcgggaggccgatggaattcccggtaaagtggcctgggaggcatcctctaaaaattccgtactgcttcggtggctcgaaccacccgatcccaatggcctgatcctaaaatacgagattaaatatcgaaggctgggagaagaggccactgtgttgtgtgtgtcacgcctgaggtacgctaagttcggcggggttcacctggcccttctccctcccggcaattactccgcccgagtgcgggctacgagtttggccggcaatgggagctggacggatagcgtcgccttctacatactcggcccggaagaggaagacgccggaggcctccatgtcctgcttactgctacccctgtgggtctgactctactgattgtactggccgcactggggttcttctacggaaaaaaaaggaacagaaccctatacgcaagcgtaaacccggaatattttagtgcttcggatatgtacgttcctgatgagtgggaagtgccacgagagcagatcagtattatccgtgaacttggtcagggtagcttcggaatggtctacgagggcctggcaaggggtctggaggccggggaggaatccactcccgtagcacttaaaacagtcaacgagctggccagccccagggagtgtatcgaatttcttaaagaagcgtctgtgatgaaggccttcaagtgccatcacgttgtgcgcctgctcggcgtggtcagccaaggccaaccaaccctggtcattatggaacttatgactagaggggacctgaaatcacacctgagatctctgcgacccgaggccgagaataaccctggactgcctcagcctgccctgggcgagatgattcaaatggctggtgagattgctgacgggatggcatatctggctgccaacaagttcgttcacagggacctggccgctcgcaattgcatggtgtcacaggacttcacagtgaagataggtgatttcgggatgactcgcgatgtctacgagactgattattatcggaaaggcgggaagggcttgctgcctgtacggtggatggcccccgagagcctgaaagatgggatttttactacccattcagatgtctggtcattcggagttgtgctttgggagattgtcactctggccgaacaaccttaccagggacttagcaacgagcaagttctgaagttcgtgatggacgggggggtcttggaggagctggaggggtgccccctacagttgcaagagctgatgagcagatgctggcaacccaaccctcggctcagaccctctttcactcacatactggacagcatccaggaagagcttcgtcctagctttcgcctgttgtctttctattattcccccgagtgtaggggcgctcggggcagtttacccacaaccgatgctgaacctgattccagcccgacgcctagggattgttcgcctcagaatggtggccctgggcactag

SEQ ID NO: 178398 - DNA, 5101 bp, Artificial Sequence
  derived and/or modified sequence
cccccgctgccctccttgggagcggtccccagcctgctgctccgccctcagggttggctggcctctcggcctgccttttgctcagaaccctgtgtcattttctccctctggaggcccgagactctccctgtcactgtctgcatctctgtccccatctctcaatctcatgctgagtctctctgtctccaactgcctgtcactgtctttgtgtctctgtgactctcatttctttttttctgtctcctgctgtctctgtgtgggattccttgtctctctgcccctgccctccctctcctatctgaaccctggtctctgtgtcccttagggcttatcacaccgttctccccagagtcaccgggaggagagccgggactggacacaagccagggctgggacaatggcagtgcctagtctgtggccctggggagcatgcctgcctgtgatcttcctctccttgggatttggcctggatacagtagaggtgtgccccagcctggatattcgctcagaggtggcagagcttcgtcagctggagaactgcagcgtggtggagggccacctgcagatcctgctcatgttcacagccaccggggaggacttccgcggcctcagcttccctcgcctcacccaggtcaccgactacctgctgctcttccgtgtctacggactggagagcctgcgcgacctcttccccaacctagcagtcatccgcgggacgcgcctcttcctgggctatgcactggtcatctttgagatgccacatctgcgtgacgtggcactgcctgcacttggggccgtgctgcgtggggctgtgcgtgtggagaagaaccaggagctctgccacctctccaccattgactggggactgctgcagccagcacctggcgccaaccacatcgtgggcaacaagctgggcgaggagtgtgctgacgtgtgccctggtgtgctgggtgctgctggtgagccctgtgccaagaccaccttcagcgggcacactgactacagatgctggacctccagccactgccagagagtgtgcccctgcccccatgggatggcttgcacagcgaggggcgagtgctgccacaccgaatgcctggggggctgcagccagccagaagaccctcgtgcctgtgtagcttgccgccacctctacttccagggtgcctgcctgtgggcctgcccgccaggcacctaccagtatgagtcctggcgctgtgtcacagctgagcgctgtgccagcctgcactctgtgcccggccgtgcctccaccttcggcatacaccagggcagttgcctggcccagtgcccttctggcttcacccgtaatagcagcagcatattctgccacaagtgcgaggggctgtgccctaaagagtgcaaggtaggcaccaagaccatcgactccatccaggcggcacaggatcttgtgggctgcacgcatgtggagggaagcctcatcctcaaccttcgccagggctacaacctggagccacagctgcagcacagcctggggctggtagaaaccattactggcttcctcaaaatcaagcactcctttgccctcgtgtccctgggctttttcaagaacctcaaactaatccggggagacgccatggtggatgggaactacactctctacgtgctggacaaccagaacctacaacagctagggtcctgggtggccgcggggctcaccattcccgtgggcaagatctacttcgccttcaacccgcgcctctgcttggaacacatctaccgactggaggaggtgacaggcacgcgaggtcggcagaacaaggctgagatcaacccccgcaccaacggagaccgcgccgcctgccagactcgcaccctgcgcttcgtgtccaacgtgacggaggcagaccgcatcctgctacgctgggagcgctatgagccactggaggcccgcgacctgctcagcttcatcgtgtactacaaggagtccccattccagaacgccacagagcacgtgggtccagatgcttgtggaacccagagctggaacctgctggatgtggagctgcccctaagccgcacccaggagccaggggtgaccctagcctccctcaagccttggacacagtacgcagtgtttgtgcgggccatcacgctaaccactgaggaggacagccctcatcaaggagcccagagtcccatcgtctacctccgaacgctgcctgcagctcccacggtgccccaagacgtcatctccacgtccaactcctcctcccacctcctggtgcgctggaagccaccgacccagcgcaatgggaacctcacctactacctggtgctgtggcagcggctggcagaggacggcgacctctacctcaatgactactgccaccgcggcttgcggctgcccaccagcaacaacgatccgcgcttcgacggcgaagacggggatcctgaggccgagatggagtccgactgctgcccttgccagcacccacctcctggtcaggttctgcccccgctggaggcgcaagaggcctcgttccagaagaagtttgaaaactttctacacaacgcgatcaccatccccatatccccttggaaggtgacgtccatcaacaagagcccccaaagggactcagggcggcaccgccgggcagctgggcccctccggctggggggcaacagctcggatttcgagatccaggaggacaaggtgccccgtgagcgagcggtgctgagcggcctgcgccacttcacggaataccggatcgacatccatgcctgcaaccacgcggcgcacaccgtgggctgcagcgccgccaccttcgtctttgcgcgcaccatgccccacagagaggctgatggtattccaggaaaggtggcctgggaggcctccagcaagaacagtgtccttctgcgctggctcgagccaccagaccccaacggactcatcctcaagtacgaaatcaagtaccgccgcttgggagaggaggccacagtgctgtgtgtgtcccgtcttcgatatgcgaagtttgggggagtccacctggccctgctgccccctggaaactactctgccagggttagggcaacctcactggctggcaatggctcttggacagacagtgttgccttctacatccttggcccagaggaggaggatgctggggggctgcatgtcctcctcactgccacccctgtggggctcacgctgctcatcgttcttgctgcccttggtttcttctacggcaagaagagaaacagaaccctgtatgcttctgtgaatccagagtacttcagcgcctctgatatgtatgtccctgatgaatgggaggtgcctcgggagcagatctcgataatccgggaactgggccagggctcttttgggatggtatatgaggggctggcacgaggacttgaggctggagaggagtccacacccgtggccctgaagacggtgaatgagctggccagcccacgggaatgcattgagttcctcaaggaagcttctgtcatgaaagccttcaagtgtcaccatgtggtgcgtctcctgggtgtggtatctcagggccagccaactctggtcatcatggagttaatgacccgtggggacctcaagagccatcttcgatctttgcggcctgaggcagagaacaaccctgggctcccacagccagcattgggggaaatgatccaaatggctggtgagattgcagacggcatggcctaccttgctgccaacaagtttgtgcaccgagatctagcagcccgcaactgcatggtgtcccaggacttcaccgtcaagatcggggacttcgggatgactcgggacgtgtatgagacagactattaccgcaagggtgggaaggggctgctgcccgtgcgctggatggcccccgagtccctcaaagatgggatcttcaccacccactcggatgtctggtcctttggcgtggtactctgggagattgtgaccctggcagaacaaccctaccagggcctgtccaatgagcaggtgctgaagttcgtcatggatggcggggtcctggaggagctggagggctgtccccttcagctgcaggagctgatgagccgctgctggcagccgaacccacgcctgcgcccatctttcacacacattctggacagcatacaggaggagctgcggccctccttccgcctcctctccttctactacagcccggaatgccggggggcccggggctccctgcctaccaccgatgcagagcctgactcctcacccactccaagagactgcagccctcaaaatgggggtccagggcactgaggggcacctcattccctggctggcctcccatggggagacaggaagggacccgacctctgtggctgagacgcctgaatgttcacccccaccccaactcagggcaagggatggccgagggtggggcagagaacaggagcagggaaggctgtgggggtgggcagaggggtctcaccataggagtttctcagactctgagtccctcgggggagagcaagcagggtcaaagccagaggagtagagatcaggtcagggagagatgtcctgccctcagaggtagggaccccactcagactaggaagagggggcccgcccaccctagaggccctgcccctcagtttggggtctcctctggacaggtagggccagcgacatgtttgaaatcagatgagcaatcagaagcaggcctggggcgctctccatgcatgtatgggaggggggtggggctccacatgactgccttgcttgccactggtttcacctcctcccctcagctccactgaccaggtggcatggggagaacccaggggcctggggagtggttcccagcctgcccgccctcacctcctcctctccttttgccctgcccagggctccccaagcttggtgctccttcctccttttctccaggggcatcccttggagtacagtcaccctttcttcagtccctcccctcaatgattagccctggatgcttaaggctttcagagcctcatcttcctccctcccctcaccctcacccagccccgcccccacccctgcctctcatgggaagactggagaaggcacaataaatgctgaggcctgtttgta

SEQ ID NO: 178399 - DNA, 3894 bp, Artificial Sequence
  derived and/or modified sequence
atggctgtgcccagcctgtggccctggggcgcctgcctgcccgtcatcttcctgagcctgggcttcggcctggacacagtggaggtgtgccccagcctggacatccgctctgaggtggccgagctgcggcagctggagaactgcagcgtggtggagggccacctgcagatcctgctgatgttcaccgccaccggggaggacttccggggcctgtccttcccccggctgacccaggtgacagactacctgctgctcttccgggtgtatggcctggagagcctgcgggacctcttccccaacctggccgtcatccggggcaccaggctcttcctgggctacgccctggtgatctttgagatgccccacctgagagatgtggccctgcctgccctgggcgctgtgctgcggggagctgtgcgggtggagaagaaccaggagctgtgccacctgagcaccatcgactggggcctgctgcagcctgcccctggggccaaccacatcgtgggcaacaagctgggggaggagtgtgctgatgtgtgccctggggtgctgggcgctgctggggagccctgtgccaagaccaccttcagcggccacacagactaccgctgctggaccagcagccactgccagagggtgtgcccctgcccccacggcatggcctgcacagcccggggggagtgctgccacacagagtgcctgggcggctgcagccagcctgaggacccccgggcctgtgtggcctgccgccacctgtacttccagggcgcctgcctgtgggcctgccccccaggcacctaccagtatgaatcctggaggtgtgtgacagctgagcgctgtgccagcctgcacagcgtgcccggccgggccagcaccttcggcatccaccagggcagctgcctggcccagtgccccagcggcttcaccaggaacagcagcagcatcttctgccacaagtgtgagggcctgtgccccaaggagtgcaaggtgggcaccaagaccatcgacagcatccaggccgcccaggacctggtgggctgcacccacgtggagggcagcctcatcctgaacctgcggcagggctacaacctggagccccagctgcagcacagcctgggcctggtggagaccatcaccggcttcctgaagatcaagcacagctttgccctggtgtccctgggcttcttcaagaacctgaagctgatcagaggagatgccatggtggatggcaactacaccctgtatgtgctggacaaccagaacctgcagcagctgggctcctgggtggccgccggcctgaccatccctgtgggcaagatctactttgccttcaacccccggctgtgcctggagcacatctaccgcctggaggaggtgacaggcacccggggccggcagaacaaggccgagatcaaccccaggaccaacggggaccgggccgcctgccagaccaggaccctgcgctttgtgtccaatgtgacagaggccgaccgcatcctgctgcgctgggagagatatgagcccctggaggcccgggacctgctgtccttcatcgtgtactacaaggagagccccttccagaatgccacagagcacgtgggcccagatgcctgtggcacccagagctggaacctgctggatgtggagctgcccctgagcaggacccaggagcccggggtgaccctggccagcctgaagccctggacccagtatgctgtgtttgtgcgggccatcaccctgaccacagaggaggacagcccccaccagggcgcccagagccccatcgtgtacctgcggaccctgcctgctgcccccaccgtgccccaggacgtcatcagcaccagcaacagcagcagccacctgctggtgcgctggaagccacccacccagagaaatggaaacctgacctactacctggtgctgtggcagaggctggctgaagatggagacctgtacctgaatgactactgccaccggggcctgcggctgcccaccagcaacaatgaccccaggtttgatggagaagatggagaccctgaggccgagatggagagtgactgctgcccctgccagcaccccccacctggccaggtgctgccccccctggaggcccaggaggccagcttccagaagaagtttgagaacttcctgcacaatgccatcaccatccccatcagcccctggaaggtgaccagcatcaacaagagcccccagagggacagcggccgccacagaagagctgctggccccctgcggctgggcggcaacagcagtgactttgagatccaggaggacaaggtgccccgggagagagctgtgctgagcggcctgcggcacttcacagagtacagaattgacatccacgcctgcaaccacgccgcccacacagtgggctgcagcgctgccacctttgtgtttgcccggaccatgccccaccgggaggctgatggcatccctgggaaggtggcctgggaggccagcagcaagaacagcgtgctgctgcgctggctggagcccccagaccccaacggcctcatcctgaagtatgagatcaagtaccgccgcctgggggaggaggccaccgtgctgtgtgtgtcccggctgcgctatgccaagtttggaggagtgcacctggccctgctgcccccaggcaactacagcgcccgggtgcgggccaccagcctggccggaaatggctcctggacagacagcgtggccttctacatcctgggccctgaggaggaggatgctgggggcctgcacgtgctgctgacagccacccctgtgggcctgaccctgctgattgtgctggccgccctgggcttcttctacggcaagaagaggaacagaaccctgtatgcctctgtgaaccctgagtacttcagcgccagtgacatgtatgtgcctgatgagtgggaggtgccccgggagcagatcagcatcatccgggagctgggccagggcagctttggcatggtgtatgagggcctggcccggggcctggaggccggggaggagagcacccctgtggccctgaagacagtgaatgagctggccagccccagagaatgtattgagttcctgaaggaggcctctgtgatgaaggccttcaagtgccaccacgtggtgcggctgctgggcgtggtgtcccagggccagcccaccctggtgatcatggagctgatgaccaggggggacctgaagagccacctgcggagcctgcggcctgaggccgagaacaaccctggcctgccccagcctgccctgggggagatgatccagatggccggggagattgctgatggcatggcctacctggccgccaacaagtttgtgcaccgggacctggccgccaggaactgcatggtgtcccaggacttcaccgtgaagattggagactttggcatgaccagagatgtgtatgaaacagactactacaggaagggcggcaagggcctgctgcctgtgcgctggatggcccctgagagcctgaaggatggcatcttcaccacccacagtgatgtgtggagctttggagtggtgctgtgggagatcgtgaccctggccgagcagccctaccagggcctgagcaatgagcaggtgctgaagtttgtgatggatggaggagtgctggaggagctggagggctgccccctgcagctgcaggagctgatgagccgctgctggcagcccaacccccggctgcggcccagcttcacccacatcctggacagcatccaggaggagctgcggcccagcttccggctgctgtccttctactacagccctgagtgccgcggggcccggggcagcctgcccaccacagatgctgagccagacagcagccccaccccccgggactgcagcccccagaatggaggccctggccactag

SEQ ID NO: 178400 - DNA, 3894 bp, Artificial Sequence
  derived and/or modified sequence
atggccgtgcccagcctgtggccctggggcgcctgcctgcccgtgatcttcctctctcttgggttcggcttggatacagttgaggtttgtccctccctggatattagatccgaggtggccgaactgcggcaactggaaaattgctccgtggtcgaaggccacctgcaaatattgctgatgttcacagccacaggtgaggactttcgtggattgagtttcccgcgtctgacacaagtgactgactatctgctgctgttccgcgtgtatggactggaatctctgcgggatttgttccctaatctcgctgtgattaggggaacacgactgttcctagggtacgctttagttatctttgagatgccacacctgcgtgatgtggctcttcctgctctgggggccgttttacgcggcgcagtcagagtggagaaaaatcaagaattgtgccacctgagcaccatagattggggcctgttgcagccagctccaggggcaaatcatatcgttgggaacaagctcggcgaggagtgcgctgatgtctgtccaggtgtgcttggagcagctggggaaccttgcgctaagaccacattttccggacatactgattatagatgttggacgtctagccactgccagcgcgtttgcccctgcccacacggaatggcttgtactgctaggggagagtgttgccatactgagtgccttgggggttgcagtcagcccgaggatccccgggcatgcgtagcctgccgacacctctactttcagggcgcctgtctgtgggcttgcccccctggtacctatcaatatgagtcatggagatgtgtgactgcagagagatgtgcgagtcttcattctgtgccaggccgcgcttcaacatttgggattcaccagggatcatgcctggcacagtgcccgtctggatttacacgtaactcctcttcaattttctgtcataagtgtgagggcctctgtccaaaagagtgcaaagtcggcacaaagaccattgatagcatacaagctgctcaggatctcgttgggtgcacgcacgtggaaggttcattaattctgaatctgcgtcaaggctacaatcttgagcctcaactgcagcacagtctgggtctcgtggagaccattaccggtttcttgaagatcaaacattcgttcgctctggtctcgctgggctttttcaagaatctgaagctgatccgcggagacgccatggttgacggaaactatacactgtatgtactcgacaaccagaaccttcagcagctgggttcatgggtagcggccggcttgactattcccgtgggaaagatctactttgcttttaaccccagactgtgcctggagcacatctaccgcttggaggaggtcaccggcacccgaggcaggcaaaataaagctgagatcaatccccgcaccaatggggatagagccgcgtgccagactcgcaccttgcggtttgtcagcaacgtgacagaagctgatcgcattctgttgcgatgggaaagatacgaaccgctggaggccagagacctcctgagtttcattgtgtactacaaagagagtccctttcagaacgcaacagaacacgtcggtcctgatgcctgcggcacgcaaagctggaacctgttagatgtggagttgcctttgagcagaacgcaagagcccggggtaactctggcctcactgaagccatggactcagtacgcggtcttcgtccgcgcaatcaccctcactactgaagaagattccccacatcagggcgcccagtcacccatcgtctacttgcgtaccctcccagctgctccaactgtaccacaggatgtcatttcaacctctaattcttcttctcatctgctagtccgctggaaaccccctacccagagaaatgggaatctgacctactacctcgtgctttggcaaagactagccgaggacggggacttgtacctgaatgattattgccatcggggattaagactgccgacatcaaacaatgacccacggtttgacggggaagacggagacccagaagcagagatggagtctgattgttgtccctgtcagcatccgccccctggtcaggtactcccgcccctggaggcccaggaagcatcattccagaagaagtttgagaatttcctacataatgccattacaatcccgatcagtccttggaaagtgacatctatcaataagagccctcagcgggacagcggccgacatcgtagagcggccggccccctgcgacttgggggcaattcatctgactttgaaatccaggaagataaggtgcctagggaacgggccgtgctctctggcttgcggcacttcacagagtaccgaatcgacattcatgcgtgtaaccacgcagctcacactgtagggtgctctgccgccacttttgttttcgccaggacaatgcctcatagggaagccgacggaatccctggcaaagtggcatgggaggcctcttccaagaactcagttcttctcaggtggctggagcccccggatccgaatgggctgatcctcaagtacgagataaagtaccggcggttaggagaggaagccacagtgctgtgcgttagcaggttaaggtatgccaaatttggtggtgtgcacttggcactcttgcctcccggcaactactctgctagggtccgggctacttctctagctgggaacggaagctggacagatagcgtagcattctatatactcgggccagaagaggaggacgctggaggactccatgtgttgctgacagccactcccgttggattaaccctattaatagtgctcgcggctctagggttcttctatggcaagaaacggaatcgcactttatacgcttcagtcaaccccgagtacttctctgcatccgacatgtacgtgccggacgagtgggaggtgccacgggagcaaatctctatcattcgcgagctgggccagggatccttcgggatggtttacgagggtctggcgcgggggctcgaggccggagaggaatccactcccgtggctttgaaaacggtgaatgaactggctagcccccgcgagtgcatagaattcctaaaggaagctagcgtcatgaaagcttttaaatgccaccacgtcgttagactgctgggtgttgtttcccagggccaaccgaccctggttataatggagctgatgacgagaggtgaccttaagagccacctgcggtcactgaggcccgaagccgagaacaaccctgggttacctcagccggcgcttggcgaaatgatccagatggctggagagatagccgatggcatggcttacctggcggccaacaagttcgtccatagggatctggcagcacgaaattgtatggtgtcacaggattttacagtgaagataggcgacttcgggatgacgcgggatgtctacgaaaccgactactacaggaagggcggcaaggggttactgccggtgaggtggatggcgccagaaagcctcaaggacggcatctttacaacccatagtgatgtatggtcatttggggttgtactctgggagatcgttaccttggcagaacagccatatcaaggcttgtcaaatgagcaggtgttgaagtttgtaatggacggaggcgtgctggaagaactagagggttgtccgctacagcttcaggagttaatgtcaaggtgttggcaaccaaacccaagattgagaccgtcatttacgcacattttggattccattcaagaagagctacgcccatcattccgcctcttgtcattttattatagccccgaatgcaggggggcgaggggttcgcttcccaccacggacgcggaacctgattcgagccctacaccgcgcgactgtagtccgcagaatggcggacctggacattag

SEQ ID NO: 178401 - DNA, 3894 bp, Artificial Sequence
  derived and/or modified sequence
atggctgtaccgtccctgtggccttggggtgcctgtctgccggttatcttcttaagcctcggattcggtctcgacaccgtcgaggtctgcccctctctcgacattcggagcgaagtagcagaactgcggcagcttgagaattgctcagtcgttgagggacacctgcagatcctgcttatgtttacagcaacaggggaagatttccgtggactaagttttccaaggcttacgcaggtgaccgactacctgctgctgttcagggtgtacggactcgagtcactccgagatctatttcctaacttagcagtgatcaggggaacccgtctctttctgggatacgccttagtgatttttgaaatgccccacttgcgagacgtggcactccccgctctaggcgctgtgctgcggggtgctgtgagggtggagaaaaaccaggaactctgccacctctccacaatcgactggggtctcctacagccggctcctggcgctaatcacattgttgggaacaagctcggcgaggagtgcgcggatgtgtgtccaggagtgcttggggcagccggtgaaccctgtgcgaagacaaccttttccggacatacagattaccgctgctggactagttcccattgccagagggtttgcccatgcccacacggcatggcatgcacggcgcgaggggaatgttgccacactgagtgcctgggcggttgttcccagcctgaggacccaagggcctgtgtggcctgcaggcatctttactttcagggcgcatgcctatgggcttgccctcctggcacataccagtacgagagttggaggtgcgtaaccgctgaaagatgtgcatccctacacagcgtcccgggacgcgctagcacctttgggatacatcagggaagctgccttgcccagtgtccgagcggattcacccggaactctagctccatattttgccacaagtgtgaggggttatgtccgaaagaatgtaaggttgggaccaaaacgatcgacagcatccaagctgctcaggacctggttgggtgcacccatgtggagggttcgttgatcctgaacctgcgccaaggctataacctggaacctcagctccaacatagtctgggactggttgaaactattacgggctttttaaagattaaacattcttttgccctggtgtcactcggattcttcaagaacctgaaactaatccggggagacgctatggttgacggaaactatactttgtatgtgttggataatcagaaccttcagcagctggggagctgggtggcagcgggactgacaattcccgtggggaaaatttactttgcctttaatcctaggctttgtctcgaacatatctacagacttgaggaggtgacaggcactaggggcaggcagaataaggcggagatcaaccccagaactaatggcgatcgggctgcctgtcagactcgcacactccggtttgtttccaacgtgacagaagctgatcggatcttactcagatgggagcgttacgagcctttggaggccagagaccttttgtcctttatcgtctactacaaggagtcacctttccaaaacgctactgaacacgtgggccctgatgcttgcggcactcaaagctggaatctgctggatgtcgaactgcctctctcaaggacacaggagccaggcgttactttggcctccttgaagccctggacccagtacgcagtctttgtacgggctatcactttaacaacggaggaggatagcccccaccaaggagcccaatctcccatagtgtacctacggaccctgcctgctgccccaaccgtgccacaggacgttatttccacttctaatagttccagccatctgctagttcgatggaagccccctacccaacgcaacggaaatctcacatactatcttgtgttgtggcaacggctggctgaggatggggacctgtaccttaatgactactgtcacaggggattacgtctgcccacatcaaataatgaccctaggtttgatggtgaagacggcgacccggaggccgagatggagagtgactgctgcccctgccagcatccaccccctgggcaggtattgccccctttggaggctcaggaagcttctttccagaaaaagtttgagaacttcctccacaacgcgattacaatccccatcagtccatggaaagtcacatctatcaataaatcccctcaacgcgatagtgggaggcacagacgcgcagccggtcctcttaggcttggaggcaactcctctgacttcgaaatacaggaagataaagtgcccagggagagagcagtcctgagtggactccgccattttacagaatataggatagacatccacgcctgcaaccatgctgcgcacacagtgggctgctcagcagctacttttgtcttcgctcgcacaatgccacaccgggaggccgacggcatcccaggcaaggtggcctgggaggcctcctcaaaaaactcagtgctccttaggtggctggagcctcctgaccctaatgggctaatcctcaagtacgaaattaaataccgtagactgggggaagaggccacggtgctgtgtgttagtcgactgcggtatgcaaaattcgggggtgtgcacctagctctacttcctcctgggaactattctgcgagagtcagggctacatcgctggctgggaatgggtcctggacagattctgttgcattctatatcctgggtcccgaggaagaggatgctggcggactccacgtgctgctaaccgccacccctgtaggcctgaccttgttgatcgtgcttgctgcattgggctttttctacggcaagaagaggaatcgcaccctttatgcgtcagtgaacccagagtatttttcagcctccgacatgtatgtcccagatgagtgggaagtgcccagagagcagatttctattatcagggaactggggcagggatcattcggaatggtgtacgaaggtttggccagggggttggaagcgggtgaagagtcaacaccagtggctcttaagacagttaatgaactggctagtccaagagagtgtatcgagttcctgaaggaagcttccgtcatgaaggcctttaaatgtcatcacgtggtccggcttcttggagtggtttcccagggacagcccacacttgtcatcatggagctgatgacccgtggagatctgaagtctcacctgagaagcttaaggccggaggccgagaacaaccctggcctgccccagcctgcactaggggaaatgattcagatggcgggagagatcgccgatggcatggcctacctggctgccaataagttcgtgcatcgcgacctggcggcacggaactgcatggtaagccaggactttacagtgaaaatcggagatttcgggatgacccgggacgtgtacgagactgactattacagaaagggcggtaaagggcttctgcccgtgagatggatggcccctgagtctctgaaagacggaatctttacaacacacagtgacgtgtggtcttttggcgtcgtgctgtgggagatcgtgacactggctgagcagccgtatcagggcttaagcaacgaacaggtgctcaaatttgttatggacggtggagtcctcgaagaactggaaggctgcccacttcagctgcaagaactgatgagccgctgttggcagcctaatcccagactccggccatccttcactcatattttagattccatccaggaggagctgcgcccttccttcagactgctttccttttattattctcctgagtgccgcggtgcccgaggcagcctaccaactactgacgcggagcctgatagcagcccgaccccgagagactgttccccacagaacggagggccagggcattag

SEQ ID NO: 178402 - DNA, 3894 bp, Artificial Sequence
  derived and/or modified sequence
atggccgtgcccagcctgtggccctggggcgcctgcctgcccgtgatcttcctgagcctgggcttcggcctggacaccgtggaggtgtgccccagcctggacatcagaagcgaggtggccgagctgagacagctggagaactgcagcgtggtggagggccacctgcagatcctgctgatgttcaccgccaccggcgaggacttcagaggcctgagcttccccagactgacccaggtgaccgactacctgctgctgttcagagtgtacggcctggagagcctgagagacctgttccccaacctggccgtgatcagaggcaccagactgttcctgggctacgccctggtgatcttcgagatgccccacctgagagacgtggccctgcccgccctgggcgccgtgctgagaggcgccgtgagagtggagaagaaccaggagctgtgccacctgagcaccatcgactggggcctgctgcagcccgcccccggcgccaaccacatcgtgggcaacaagctgggcgaggagtgcgccgacgtgtgccccggcgtgctgggcgccgccggcgagccctgcgccaagaccaccttcagcggccacaccgactacagatgctggaccagcagccactgccagagagtgtgcccctgcccccacggcatggcctgcaccgccagaggcgagtgctgccacaccgagtgcctgggcggctgcagccagcccgaggaccccagagcctgcgtggcctgcagacacctgtacttccagggcgcctgcctgtgggcctgcccccccggcacctaccagtacgagagctggagatgcgtgaccgccgagagatgcgccagcctgcacagcgtgcccggcagagccagcaccttcggcatccaccagggcagctgcctggcccagtgccccagcggcttcaccagaaacagcagcagcatcttctgccacaagtgcgagggcctgtgccccaaggagtgcaaggtgggcaccaagaccatcgacagcatccaggccgcccaggacctggtgggctgcacccacgtggagggcagcctgatcctgaacctgagacagggctacaacctggagccccagctgcagcacagcctgggcctggtggagaccatcaccggcttcctgaagatcaagcacagcttcgccctggtgagcctgggcttcttcaagaacctgaagctgatcagaggcgacgccatggtggacggcaactacaccctgtacgtgctggacaaccagaacctgcagcagctgggcagctgggtggccgccggcctgaccatccccgtgggcaagatctacttcgccttcaaccccagactgtgcctggagcacatctacagactggaggaggtgaccggcaccagaggcagacagaacaaggccgagatcaaccccagaaccaacggcgacagagccgcctgccagaccagaaccctgagattcgtgagcaacgtgaccgaggccgacagaatcctgctgagatgggagagatacgagcccctggaggccagagacctgctgagcttcatcgtgtactacaaggagagccccttccagaacgccaccgagcacgtgggccccgacgcctgcggcacccagagctggaacctgctggacgtggagctgcccctgagcagaacccaggagcccggcgtgaccctggccagcctgaagccctggacccagtacgccgtgttcgtgagagccatcaccctgaccaccgaggaggacagcccccaccagggcgcccagagccccatcgtgtacctgagaaccctgcccgccgcccccaccgtgccccaggacgtgatcagcaccagcaacagcagcagccacctgctggtgagatggaagccccccacccagagaaacggcaacctgacctactacctggtgctgtggcagagactggccgaggacggcgacctgtacctgaacgactactgccacagaggcctgagactgcccaccagcaacaacgaccccagattcgacggcgaggacggcgaccccgaggccgagatggagagcgactgctgcccctgccagcaccccccccccggccaggtgctgccccccctggaggcccaggaggccagcttccagaagaagttcgagaacttcctgcacaacgccatcaccatccccatcagcccctggaaggtgaccagcatcaacaagagcccccagagagacagcggcagacacagaagagccgccggccccctgagactgggcggcaacagcagcgacttcgagatccaggaggacaaggtgcccagagagagagccgtgctgagcggcctgagacacttcaccgagtacagaatcgacatccacgcctgcaaccacgccgcccacaccgtgggctgcagcgccgccaccttcgtgttcgccagaaccatgccccacagagaggccgacggcatccccggcaaggtggcctgggaggccagcagcaagaacagcgtgctgctgagatggctggagccccccgaccccaacggcctgatcctgaagtacgagatcaagtacagaagactgggcgaggaggccaccgtgctgtgcgtgagcagactgagatacgccaagttcggcggcgtgcacctggccctgctgccccccggcaactacagcgccagagtgagagccaccagcctggccggcaacggcagctggaccgacagcgtggccttctacatcctgggccccgaggaggaggacgccggcggcctgcacgtgctgctgaccgccacccccgtgggcctgaccctgctgatcgtgctggccgccctgggcttcttctacggcaagaagagaaacagaaccctgtacgccagcgtgaaccccgagtacttcagcgccagcgacatgtacgtgcccgacgagtgggaggtgcccagagagcagatcagcatcatcagagagctgggccagggcagcttcggcatggtgtacgagggcctggccagaggcctggaggccggcgaggagagcacccccgtggccctgaagaccgtgaacgagctggccagccccagagagtgcatcgagttcctgaaggaggccagcgtgatgaaggccttcaagtgccaccacgtggtgagactgctgggcgtggtgagccagggccagcccaccctggtgatcatggagctgatgaccagaggcgacctgaagagccacctgagaagcctgagacccgaggccgagaacaaccccggcctgccccagcccgccctgggcgagatgatccagatggccggcgagatcgccgacggcatggcctacctggccgccaacaagttcgtgcacagagacctggccgccagaaactgcatggtgagccaggacttcaccgtgaagatcggcgacttcggcatgaccagagacgtgtacgagaccgactactacagaaagggcggcaagggcctgctgcccgtgagatggatggcccccgagagcctgaaggacggcatcttcaccacccacagcgacgtgtggagcttcggcgtggtgctgtgggagatcgtgaccctggccgagcagccctaccagggcctgagcaacgagcaggtgctgaagttcgtgatggacggcggcgtgctggaggagctggagggctgccccctgcagctgcaggagctgatgagcagatgctggcagcccaaccccagactgagacccagcttcacccacatcctggacagcatccaggaggagctgagacccagcttcagactgctgagcttctactacagccccgagtgcagaggcgccagaggcagcctgcccaccaccgacgccgagcccgacagcagccccacccccagagactgcagcccccagaacggcggccccggccactag

SEQ ID NO: 178403 - protein, 411 aa, Artificial Sequence
  derived and/or modified sequence
MAAPDLLDPKSAAQNSKPRLSFSTKPTVLASRVESDTTINVMKWKTVSTIFLVVVLYLIIGATVFKALEQPHEISQRTTIVIQKQTFISQHSCVNSTELDELIQQIVAAINAGIIPLGNTSNQISHWDLGSSFFFAGTVITTIGFGNISPRTEGGKIFCIIYALLGIPLFGFLLAGVGDQLGTIFGKGIAKVEDTFIKWNVSQTKIRIISTIIFILFGCVLFVALPAIIFKHIEGWSALDAIYFVVITLTTIGFGDYVAGGSDIEYLDFYKPVVWFWILVGLAYFAAVLSMIGDWLRVISKKTKEEVGEFRAHAAEWTANVTAEFKETRRRLSVEIYDKFQRATSIKRKLSAELAGNHNQELTPCRRTLSVNHLTSERDVLPPLLKTESIYLNGLTPHCAGEEIAVIENIK

SEQ ID NO: 178404 - DNA, 1236 bp, Artificial Sequence
  derived and/or modified sequence
atggcagcgcctgatcttctagatccaaaatctgccgcccagaatagcaagcctaggctctcatttagcacaaagcctaccgtgctggcgtccagagtggagagtgacaccactattaacgtcatgaagtggaaaacagtgtctacaatattcctggtggtggtgttgtacctaattatcggcgcaacagtcttcaaggccctcgagcaacctcatgagataagccagagaaccacgatagtaatacagaagcagacctttatctctcaacacagctgtgtcaacagtacggagctcgatgagttaattcagcagatagtggctgctattaatgctggaatcatcccgctaggcaacacctctaatcagatatcccattgggatttaggcagctcattctttttcgccggcaccgtcataactactattggtttcggtaatatcagccctagaaccgagggcgggaaaatattctgcattatctacgcactgctcggaatacccctgtttggcttcctcctcgcgggggttggagaccagttggggacgatctttggaaaaggcattgccaaggttgaggacacctttatcaagtggaacgtgtctcagactaaaatcagaatcatttcaactattatctttatcctgttcggctgtgtcttgtttgtggcgctccctgccatcatctttaagcacattgagggatggtcagcactcgacgcaatttacttcgtggtgattacactgacaacgataggctttggggactacgtcgcaggtgggtccgacatcgaatatttggacttctataagcccgtggtctggttttggatactggtgggtctcgcctatttcgccgccgttctgtccatgattggcgattggctgcgtgttatttctaagaagacaaaagaggaggtaggggagtttcgggcacatgcagcagagtggacggcgaacgtgactgctgagttcaaggaaacaaggcgccggctttctgtggaaatttacgacaagttccaacgagctacctctataaaaaggaagctgtccgccgagctggctggaaatcacaatcaggagctgacaccgtgcagaaggactttgtcagttaatcacttaacatctgaacgggacgttctccctcctttgctgaagacagagagcatttatctgaatgggctgaccccacactgcgccggcgaggagatagcagtcatagagaatatcaaatag

SEQ ID NO: 178405 - DNA, 1236 bp, Artificial Sequence
  derived and/or modified sequence
atggccgccccagacctgctggaccccaagtctgctgcccagaacagcaagccccggctgtccttcagcaccaagcccaccgtgctggccagccgggtggagagtgacaccaccatcaacgtgatgaagtggaagacagtgtccaccatcttcctggtggtggtgctgtacctgatcatcggggccaccgtcttcaaggccctggagcagccccatgagatcagccagaggaccaccatcgtcatccagaagcagaccttcatcagccagcacagctgtgtgaacagcacagagctggatgagctgatccagcagatcgtggccgccatcaatgccggcatcatccccctgggcaacaccagcaaccagatcagccactgggacctgggcagcagcttcttctttgctggcaccgtcatcaccaccatcggctttggaaacatcagccccaggacagagggcggcaagatcttctgcatcatctatgccctgctgggcatccccctgtttggcttcctgctggccggcgtgggggaccagctgggcaccatctttggaaaaggaattgccaaggtggaggacaccttcatcaagtggaatgtgtcccagaccaagatccgcatcatcagcaccatcatcttcatcctgtttggctgtgtgctgtttgtggccctgcctgccatcatcttcaagcacatcgagggctggagcgccctggatgccatctactttgtggtgatcaccctgaccaccatcggctttggagactatgtggccggcggcagtgacatcgagtacctggacttctacaagcctgtggtgtggttctggatcctggtgggcctggcctactttgctgctgtgctgtccatgattggagactggctgcgggtcatcagcaagaagaccaaggaggaggtgggggagttccgggcccacgccgctgagtggacagccaacgtgacagctgagttcaaggagacccggcggcggctgtctgtggagatctatgacaagttccagagggccaccagcatcaagaggaagctgtctgctgagctggccggcaaccacaaccaggagctgaccccctgcaggaggaccctgtctgtgaaccacctgaccagcgagagagatgtgctgccccccctgctgaagacagagagcatctacctgaatggcctgaccccccactgtgccggggaggagattgctgtgattgagaacatcaagtag

SEQ ID NO: 178406 - DNA, 1236 bp, Artificial Sequence
  derived and/or modified sequence
atggccgcccccgacctgctggaccccaagagcgccgcccagaactcgaagccccgactgtcattttcaaccaagcctaccgtattagcatctagagtggaaagcgatacaacgataaatgtgatgaagtggaaaactgtttcaactatttttttagtggtggtattgtacctcattataggggcaacagtttttaaggccttagaacagccacacgaaatctctcagagaacaacaatagtgatccaaaaacaaacctttataagccagcacagctgcgtgaactctacagaacttgatgagctgatccaacagatcgtggcggctataaacgccggaataataccattaggtaatacttcgaaccagatcagccactgggacctgggctccagctttttttttgctggcaccgttatcaccacaattggttttggcaatattagcccacgaaccgaggggggcaaaatcttctgcataatttatgctcttctgggcatacctctcttcggattcctgctcgccggcgtgggggaccagctagggacgattttcggcaaggggatagccaaagtcgaggacacattcattaagtggaatgtctcccagaccaagattcgaattatcagtactatcatcttcatcctgttcggatgcgtgcttttcgtggccctgccagctataattttcaagcacatcgagggatggtctgctttggacgctatctattttgtggttattacactgaccactatcggatttggagactacgttgccggaggcagtgacatcgagtatttggacttttataaacccgtggtgtggttttggattctggtcgggttggcttatttcgccgcagtattatctatgataggggattggctcagggtgataagcaaaaagacgaaagaggaagttggggagtttcgggcgcacgctgccgaatggacagcgaatgtgactgcagagttcaaagaaacccgcaggcggctgtccgttgaaatttacgacaagttccaaagagctaccagcatcaaaagaaagctgagcgccgagctggctgggaaccataaccaggaactgaccccatgccggaggacgctgtcagtcaaccatttgacaagtgagcgcgatgttctgcccccgcttctaaagactgaatctatttatctcaatgggctaacaccacattgcgccggcgaagaaattgctgtgatcgagaacatcaagtag

SEQ ID NO: 178407 - DNA, 1491 bp, Artificial Sequence
  derived and/or modified sequence
ggcctccgcctcgccctctgcccagcccgccggtgtcccctccttcccgcgatttcgtttcttctcacgctcccccccccgccccctcccgcgtccagccccgctctccccaccttgtaaaacaaagccggggaaaatgcctgcccgtgcagctcggagcgcgcagcccgtctctgaataagaatggcggcacctgacttgctggatcctaaatctgccgctcagaactccaaaccgaggctctcgttttccacgaaacccacagtgcttgcttcccgggtggagagtgacacgaccattaatgttatgaaatggaagacggtctccacgatattcctggtggttgtcctctatctgatcatcggagccaccgtgttcaaagcattggagcagcctcatgagatttcacagaggaccaccattgtgatccagaagcaaacattcatatcccaacattcctgtgtcaattcgacggagctggatgaactcattcagcaaatagtggcagcaataaatgcagggattataccgttaggaaacacctccaatcaaatcagtcactgggatttgggaagttccttcttctttgctggcactgttattacaaccataggatttggaaacatctcaccacgcacagaaggcggcaaaatattctgtatcatctatgccttactgggaattcccctctttggttttctcttggctggagttggagatcagctaggcaccatatttggaaaaggaattgccaaagtggaagatacgtttattaagtggaatgttagtcagaccaagattcgcatcatctcaacaatcatatttatactatttggctgtgtactctttgtggctctgcctgcgatcatattcaaacacatagaaggctggagtgccctggacgccatttattttgtggttatcactctaacaactattggatttggtgactacgttgcaggtggatccgatattgaatatctggacttctataagcctgtcgtgtggttctggatccttgtagggcttgcttactttgctgctgtcctgagcatgattggagattggctccgagtgatatctaaaaagacaaaagaagaggtgggagagttcagagcacacgctgctgagtggacagccaacgtcacagccgaattcaaagaaaccaggaggcgactgagtgtggagatttatgacaagttccagcgggccacctccatcaagcggaagctctcggcagaactggctggaaaccacaatcaggagctgactccttgtaggaggaccctgtcagtgaaccacctgaccagcgagagggatgtcttgcctcccttactgaagactgagagtatctatctgaatggtttgacgccacactgtgctggtgaagagattgctgtgattgagaacatcaaatagccctctctttaaataaccttaggcatagccataggtgaggacttctctatgctctttatgactgttgctggt

SEQ ID NO: 178408 - DNA, 1236 bp, Artificial Sequence
  derived and/or modified sequence
atggccgcacccgacctgctcgaccctaaaagcgctgctcagaacagcaaacctaggctgtctttttcgaccaagcctacggtgttggcaagcagggtagagagtgacactacaattaacgttatgaaatggaagacagtgtccacaatatttttggtggtagtgctgtacctgataattggagctacagtttttaaagctttggagcagccacacgagatcagtcagcgcaccaccatcgtgatacagaagcaaacgttcatatcccagcactcttgcgttaacagcacagaattggatgaactcattcagcaaatagtggccgcaataaatgctggcattattccactcggaaacaccagtaaccagatttctcattgggatctggggagtagctttttcttcgccggaactgttatcaccaccattgggttcggaaatatcagtcctagaaccgaaggagggaaaatcttttgcataatttatgccttactcgggatccctctttttggatttctgctggcaggtgtgggcgatcagctgggaacaatcttcggaaagggcatcgccaaggttgaggatacttttatcaaatggaatgtcagtcagacaaaaatacggatcatcagcaccattatttttatccttttcggatgtgtcctgttcgtggccctgcccgctattatcttcaagcacattgaggggtggtcggcgctggatgccatctacttcgtggtaatcaccctcaccactattggcttcggcgattacgtagccggtggcagcgacattgagtatctggatttttacaaaccagtggtatggttctggattttagtcgggctcgcctattttgctgccgtgctgtctatgatcggagactggttgagagtcatttctaagaagactaaagaggaagtaggcgaattcagagcccacgcggctgagtggaccgccaatgtcaccgctgagtttaaggagactaggaggcggctgagtgtggagatttacgacaaatttcagcgggctaccagcatcaaacgcaagctgtctgccgaactcgcaggcaatcataaccaggagcttaccccctgcagacgtaccctgagtgtgaatcatctaacaagcgagagagacgttctgccaccactcttgaagaccgaaagcatctacttgaacggactgactcctcattgtgcaggcgaggaaatagccgtaatcgaaaatatcaagtag

SEQ ID NO: 178409 - DNA, 1236 bp, Artificial Sequence
  derived and/or modified sequence
atggccgcccccgacctgctggaccccaagagcgccgcccagaacagcaagcccagactgagcttcagcaccaagcccaccgtgctggccagcagagtggagagcgacaccaccatcaacgtgatgaagtggaagaccgtgagcaccatcttcctggtggtggtgctgtacctgatcatcggcgccaccgtgttcaaggccctggagcagccccacgagatcagccagagaaccaccatcgtgatccagaagcagaccttcatcagccagcacagctgcgtgaacagcaccgagctggacgagctgatccagcagatcgtggccgccatcaacgccggcatcatccccctgggcaacaccagcaaccagatcagccactgggacctgggcagcagcttcttcttcgccggcaccgtgatcaccaccatcggcttcggcaacatcagccccagaaccgagggcggcaagatcttctgcatcatctacgccctgctgggcatccccctgttcggcttcctgctggccggcgtgggcgaccagctgggcaccatcttcggcaagggcatcgccaaggtggaggacaccttcatcaagtggaacgtgagccagaccaagatcagaatcatcagcaccatcatcttcatcctgttcggctgcgtgctgttcgtggccctgcccgccatcatcttcaagcacatcgagggctggagcgccctggacgccatctacttcgtggtgatcaccctgaccaccatcggcttcggcgactacgtggccggcggcagcgacatcgagtacctggacttctacaagcccgtggtgtggttctggatcctggtgggcctggcctacttcgccgccgtgctgagcatgatcggcgactggctgagagtgatcagcaagaagaccaaggaggaggtgggcgagttcagagcccacgccgccgagtggaccgccaacgtgaccgccgagttcaaggagaccagaagaagactgagcgtggagatctacgacaagttccagagagccaccagcatcaagagaaagctgagcgccgagctggccggcaaccacaaccaggagctgaccccctgcagaagaaccctgagcgtgaaccacctgaccagcgagagagacgtgctgccccccctgctgaagaccgagagcatctacctgaacggcctgaccccccactgcgccggcgaggagatcgccgtgatcgagaacatcaagtag

SEQ ID NO: 178410 - protein, 348 aa, Artificial Sequence
  derived and/or modified sequence
MSLLVVSMACVGFFLLQGAWPHEGVHRKPSLLAHPGRLVKSEETVILQCWSDVMFEHFLLHREGMFNDTLRLIGEHHDGVSKANFSISRMTQDLAGTYRCYGSVTHSPYQVSAPSDPLDIVIIGLYEKPSLSAQLGPTVLAGENVTLSCSSRSSYDMYHLSREGEAHERRLPAGPKVNGTFQADFPLGPATHGGTYRCFGSFHDSPYEWSKSSDPLLVSVTGNPSNSWPSPTEPSSKTGNPRHLHILIGTSVVIILFILLFFLLHRWCSNKKNAAVMDQESAGNRTANSEDSDEQDPQEVTYTQLNHCVFTQRKITRPSQRPKTPPTDIIVYTELPNAESRSKVVSCP

SEQ ID NO: 178411 - DNA, 1047 bp, Artificial Sequence
  derived and/or modified sequence
atgagtctactggtagtgtcaatggcatgcgtcgggttttttctcctccagggagcttggccacatgagggggtgcatcggaaacccagcttactggcacacccaggcagacttgtcaaatctgaagagacagttattctgcagtgctggtccgatgtgatgtttgagcacttcttgttgcacagagagggaatgtttaacgatacactccggctgatcggagagcaccacgatggagtctctaaggctaattttagtattagcagaatgactcaggatctcgcgggtacatacagatgttacggcagcgtcacccacagcccttatcaggtgagtgctccatctgaccccctcgatattgtcattattggactgtatgagaagccatcccttagcgcacagctcggtcccactgtgctcgctggggaaaatgtcaccttatcctgtagctcccggagtagctacgatatgtaccatttaagccgggagggggaggcacacgaacgtagactgccagctggtcctaaagttaatggtacttttcaggccgacttccctctcggtccagccacccacggaggcacatacagatgcttcggcagttttcacgacagcccctacgaatggagcaagtcaagcgacccactcttggtgtctgtaaccggcaatcccagtaatagctggccttcaccaaccgagccctcctctaaaaccggcaatccccgccatctacatatcctgattggcacatcagtggtgataatactgttcatactgttgttctttctcctgcatcggtggtgtagcaacaaaaaaaatgccgcggtgatggaccaggagtccgctgggaatagaactgcgaactccgaagatagtgacgaacaggatccgcaggaagtgacgtatacccaactgaaccattgcgtgtttacacagcgtaagattacccgcccttcccagagaccaaagacaccccccaccgacatcattgtctacactgagctcccaaatgccgagtccaggagtaaggtggtgtcatgcccctag

SEQ ID NO: 178412 - DNA, 1320 bp, Artificial Sequence
  derived and/or modified sequence
ctgagctcggtcgcggctgcctgtctgctccggcagcaccatgtcgctcttggtcgtcagcatggcgtgtgttgggttcttcttgctgcagggggcctggccacatgagggagtccacagaaaaccttccctcctggcccacccaggtcgcctggtgaaatcagaagagacagtcatcctgcagtgttggtcagatgtcatgtttgaacacttccttctgcacagagaggggatgtttaacgacactttgcgcctcattggagaacaccatgatggggtctccaaggccaacttctccatcagtcgcatgacgcaagacctggcagggacctacagatgctacggttctgttactcactccccctatcaggtgtcagctcccagtgaccctctggacatcgtgatcataggtctatatgagaaaccttctctctcagcccagctgggccccacggttctggcaggagagaatgtgaccttgtcctgcagctcccggagctcctatgacatgtaccatctatccagggaaggggaggcccatgaacgtaggctccctgcagggcccaaggtcaacggaacattccaggctgactttcctctgggccctgccacccacggagggacctacagatgcttcggctctttccatgactctccatacgagtggtcaaagtcaagtgacccactgcttgtttctgtcacaggaaacccttcaaatagttggccttcacccactgaaccaagctccaaaaccggtaacccccgacacctgcacattctgattgggacctcagtggtcatcatcctcttcatcctcctcttctttctccttcatcgctggtgctccaacaaaaaaaatgctgcggtaatggaccaagagtctgcaggaaacagaacagcgaatagcgaggactctgatgaacaagaccctcaggaggtgacatacacacagttgaatcactgcgttttcacacagagaaaaatcactcgcccttctcagaggcccaagacacccccaacagatatcatcgtgtacacggaacttccaaatgctgagtccagatccaaagttgtctcctgcccatgagcaccacagtcaggccttgagggcgtcttctagggagacaacagccctgtctcaaaaccgggttgccagctcccatgtaccagcagctggaatctgaaggcgtgagtctgcatcttagggcatcgatcttcctcacaccacaaatctgaatgtgcctctctcttgcttacaaatgtctaaggtccccactgcctgctggagaaaaaacacactcctttgcttaacccacagtt

SEQ ID NO: 178413 - DNA, 1047 bp, Artificial Sequence
  derived and/or modified sequence
atgagcctgctggtggtgtccatggcctgtgtgggcttcttcctgctgcagggcgcctggccccatgagggcgtgcacaggaagcccagcctgctggcccaccctggccgcctggtgaagtctgaggagaccgtcatcctgcagtgctggagcgatgtgatgtttgagcacttcctgctgcaccgggagggcatgtttaatgacaccctgcggctgattggagagcaccatgatggagtgtccaaggccaacttcagcatcagcaggatgacccaggacctggccggcacctaccgctgctacggctctgtgacccacagcccctaccaggtgtctgcccccagcgaccccctggacatcgtcatcatcggcctgtatgagaagcccagcctgagcgcccagctgggccccaccgtgctggccggagaaaatgtgaccctgagctgcagcagccgcagcagctatgacatgtaccacctgagccgggagggggaggcccatgaaagaaggctgcctgctggccccaaggtgaatggcaccttccaggccgacttccccctgggccctgccacccacggcggcacctaccgctgcttcggcagcttccatgacagcccctatgagtggagcaagagcagtgaccccctgctggtgtctgtgactggaaaccccagcaacagctggcccagccccacagagcccagcagcaagacaggcaaccccaggcacctgcacatcctgattggcacctctgtggtgatcatcctcttcatcctgctcttcttcctgctgcaccgctggtgcagcaacaagaagaatgctgctgtgatggaccaggagagcgctggcaacagaacagccaacagcgaggacagtgatgagcaggacccccaggaggtgacctacacccagctgaaccactgtgtgttcacccagaggaagatcacccggcccagccagaggcccaagaccccacccacagacatcatcgtgtacacagagctgcccaatgctgagagccgcagcaaggtggtgtcctgcccctag

SEQ ID NO: 178414 - DNA, 1047 bp, Artificial Sequence
  derived and/or modified sequence
atgagcctgctggtggtgagcatggcctgcgtgggcttcttcctgcttcagggagcctggcctcacgaaggggtgcaccgtaagccaagccttctagcacatccaggcaggctggtgaagtctgaggaaaccgtcattcttcagtgttggagcgatgtgatgtttgagcattttctgctgcaccgcgagggtatgtttaatgacaccctgaggctcattggggagcaccacgatggtgtttctaaagcaaactttagcatctccagaatgacacaggatctggccggcacctaccggtgctatggttcggtgactcactccccttatcaagtgagtgctcccagcgatcccctggacatcgttattataggtttatacgaaaaaccctctctctcagctcagcttgggcccaccgtactggccggcgaaaacgttactctgtcgtgttctagtcgctcttcctatgatatgtatcacctaagtagagagggcgaagcacatgagcgtcgcctgccagcaggcccaaaggtcaacgggacctttcaggccgactttccacttggcccggccacccatgggggtacttatcgctgtttcggcagctttcacgattcaccctacgagtggagcaaaagctccgatcccctcctcgtttctgtgactgggaatcctagtaattcctggccgtccccaactgaaccttccagtaagaccggcaacccacggcacctgcatatcctgattggtacaagcgtagtgatcatcttattcattcttctgttttttctgctgcaccggtggtgttccaataagaagaacgccgctgtgatggatcaggagtcagccgggaatcgaacagctaattctgaggattctgatgaacaggatccgcaggaagtgacatacactcagctgaaccactgcgtattcacacaaaggaagatcacaaggcccagccaaaggccgaagacaccgcccacagacataatagtatatacagaactacctaacgcggagagcagatctaaagtagtctcttgtccatag

SEQ ID NO: 178415 - DNA, 1047 bp, Artificial Sequence
  derived and/or modified sequence
atgagcctgctcgtcgttagcatggcctgtgttgggttttttctgctccagggagcatggcctcacgagggcgtccacagaaagccttcactgcttgcacacccagggaggctggtgaaaagtgaagagacagtgatcctgcagtgttggtcagatgtcatgttcgagcactttcttctgcatcgtgaaggcatgtttaacgatactttaagactgataggtgagcaccacgatggcgtgagcaaggccaacttctcaatctccaggatgacgcaggacctggccggaacgtatcgctgttatgggtcggtaacgcatagcccttaccaggtcagtgccccatcagaccccctggatattgtgattatcggattatacgaaaagccatccttgtctgctcaactaggcccaaccgtcttggctggagagaatgtgacactgagctgttcaagccgctcgagctatgatatgtatcacctgagccgagagggggaagcacatgagcggaggcttcccgctgggcctaaagtgaacggcacctttcaggctgactttccacttgggcctgccacccatggcggaacgtaccgatgctttggaagcttccatgactccccttacgaatggtctaagtcttcagatccacttctggtgagtgttaccgggaacccctcaaattcttggccctctcccaccgagcccagtagtaagactggtaacccccgtcatctgcacatcttgattggcactagcgtagttataatactgttcattctcctcttcttccttcttcacagatggtgttctaacaagaagaatgccgctgtgatggatcaagagagtgcgggtaacagaaccgccaatagcgaggattctgatgagcaagacccccaagaggtaacttacacacagctcaaccattgtgtgttcactcagagaaagatcactaggccgagtcagcgacccaagaccccacccacagacatcatagtttacacagaactccccaacgcagaatctagaagtaaggtggtttcatgtccgtag

SEQ ID NO: 178416 - DNA, 1047 bp, Artificial Sequence
  derived and/or modified sequence
atgagcctgctggtggtgagcatggcctgcgtgggcttcttcctgctgcagggcgcctggccccacgagggcgtgcacagaaagcccagcctgctggcccaccccggcagactggtgaagagcgaggagaccgtgatcctgcagtgctggagcgacgtgatgttcgagcacttcctgctgcacagagagggcatgttcaacgacaccctgagactgatcggcgagcaccacgacggcgtgagcaaggccaacttcagcatcagcagaatgacccaggacctggccggcacctacagatgctacggcagcgtgacccacagcccctaccaggtgagcgcccccagcgaccccctggacatcgtgatcatcggcctgtacgagaagcccagcctgagcgcccagctgggccccaccgtgctggccggcgagaacgtgaccctgagctgcagcagcagaagcagctacgacatgtaccacctgagcagagagggcgaggcccacgagagaagactgcccgccggccccaaggtgaacggcaccttccaggccgacttccccctgggccccgccacccacggcggcacctacagatgcttcggcagcttccacgacagcccctacgagtggagcaagagcagcgaccccctgctggtgagcgtgaccggcaaccccagcaacagctggcccagccccaccgagcccagcagcaagaccggcaaccccagacacctgcacatcctgatcggcaccagcgtggtgatcatcctgttcatcctgctgttcttcctgctgcacagatggtgcagcaacaagaagaacgccgccgtgatggaccaggagagcgccggcaacagaaccgccaacagcgaggacagcgacgagcaggacccccaggaggtgacctacacccagctgaaccactgcgtgttcacccagagaaagatcaccagacccagccagagacccaagaccccccccaccgacatcatcgtgtacaccgagctgcccaacgccgagagcagaagcaaggtggtgagctgcccctag

SEQ ID NO: 178417 - DNA, 1598 bp, Artificial Sequence
  derived and/or modified sequence
gagctcggtcgcggctgcctgtctgctccggcagcaccatgtcgctcttggtcgtcagcatggcgtgtgttgggttcttcttgctgcagggggcctggccacatgagggagtccacagaaaaccttccctcctggcccacccaggtcgcctggtgaaatcagaagagacagtcatcctgcagtgttggtcagatgtcatgtttgaacacttccttctgcacagagaggggatgtttaacgacactttgcgcctcattggagaacaccatgatggggtctccaaggccaacttctccatcagtcgcatgacgcaagacctggcagggacctacagatgctacggttctgttactcactccccctatcaggtgtcagctcccagtgaccctctggacatcgtgatcataggtctatatgagaaaccttctctctcagcccagctgggccccacggttctggcaggagagaatgtgaccttgtcctgcagctcccggagctcctatgacatgtaccatctatccagggaaggggaggcccatgaacgtaggctccctgcagggcccaaggtcaacggaacattccaggctgactttcctctgggccctgccacccacggagggacctacagatgcttcggctctttccatgactctccatacgagtggtcaaagtcaagtgacccactgcttgtttctgtcacaggaaacccttcaaatagttggccttcacccactgaaccaagctccaaaaccggtaacccccgacacctgcacattctgattgggacctcagtggtcatcatcctcttcatcctcctcttctttctccttcatcgctggtgctccaacaaaaaaaatgctgcggtaatggaccaagagtctgcaggaaacagaacagcgaatagcgaggactctgatgaacaagaccctcaggaggtgacatacacacagttgaatcactgcgttttcacacagagaaaaatcactcgcccttctcagaggcccaagacacccccaacagatatcatcgtgtacacggaacttccaaatgctgagtccagatccaaagttgtctcctgcccatgagcaccacagtcaggccttgagggcgtcttctagggagacaacagccctgtctcaaaaccgggttgccagctcccatgtaccagcagctggaatctgaaggcgtgagtctgcatcttagggcatcgatcttcctcacaccacaaatctgaatgtgcctctctcttgcttacaaatgtctaaggtccccactgcctgctggagaaaaaacacactcctttgcttaacccacagttctccatttcacttgacccctgcccacctctccaacctaactggcttacttcctagtctacttgaggctgcaatcacactgaggaactcacaattccaaacatacaagaggctccctcttaacgcagcacttagacacgtgttgttccaccttccctcatgctgttccacctcccctcagactagctttcagtcttctgtcagcagtaaaacttatatattttttaaaataacttcaatgtagttttccatccttcaaataaacatgtctgcccccatggt

SEQ ID NO: 178418 - DNA, 1101 bp, Artificial Sequence
  derived and/or modified sequence
caccggcagcaccatgtcgctcacggtcgtcagcatggcgtgtgttgggttcttcttgctgcagggggcctggccacatgagggagtccacagaaaaccttccctcctggcccacccaggtcgcctggtgaaatcagaagagacagtcatcctgcaatgttggtcagatgtcatgtttgaacacttccttctgcacagagaggggatgtttaacgacactttgcgcctcattggagaacaccatgatggggtctccaaggccaacttctccatcagtcgcatgaagcaagacctggcagggacctacagatgctacggttctgttactcactccccctatcagttgtcagctcccagtgaccctctggacatcgtgatcataggtctatatgagaaaccttctctctcagcccagccgggccccacggttctggcaggagagaatgtgaccttgtcctgcagctcccggagctcctatgacatgtaccatctatccagggaaggggaggcccatgaacgtaggctccctgcagggaccaaggtcaacggaacattccaggccaactttcctctgggccctgccacccatggagggacctacagatgcttcggctctttccgtgactctccatacgagtggtcaaagtcaagtgacccactgcttgtttctgtcacaggaaacccttcaaatagttggccttcacccactgaaccaagctccgaaaccggtaaccccagacacctacatgttctgattgggacctcagtggtcaaaatccctttcaccatcctcctcttctttctccttcatcgctggtgctccgacaaaaaaaatgctgctgtaatggaccaagagcctgcagggaacagaacagtgaacagcgaggattctgatgaacaagaccatcaggaggtgtcatacgcataattggatcactgtgttttcacacagagaaaaatcactcgcccttctgagaggcccaagacacccccaacagataccagcatgtacatagaacttccaaatgctgagcccagatccaaagttgtcttctgtccacgagcaccacagtcaggccttgaggggatcttctagggaga

SEQ ID NO: 178419 - protein, 348 aa, Artificial Sequence
  derived and/or modified sequence
MSLMVVSMACVGFFLLQGAWPHEGVHRKPSLLAHPGRLVKSEETVILQCWSDVRFEHFLLHREGKFKDTLHLIGEHHDGVSKANFSIGPMMQDLAGTYRCYGSVTHSPYQLSAPSDPLDIVITGLYEKPSLSAQPGPTVLAGESVTLSCSSRSSYDMYHLSREGEAHECRFSAGPKVNGTFQADFPLGPATHGGTYRCFGSFRDSPYEWSNSSDPLLVSVTGNPSNSWPSPTEPSSKTGNPRHLHILIGTSVVIILFILLFFLLHRWCSNKKNAAVMDQESAGNRTANSEDSDEQDPQEVTYTQLNHCVFTQRKITRPSQRPKTPPTDIIVYTELPNAESRSKVVSCP

SEQ ID NO: 178420 - protein, 348 aa, Artificial Sequence
  derived and/or modified sequence
MSLMVVSMVCVGFFLLQGAWPHEGVHRKPSLLAHPGPLVKSEETVILQCWSDVRFQHFLLHREGKFKDTLHLIGEHHDGVSKANFSIGPMMQDLAGTYRCYGSVTHSPYQLSAPSDPLDIVITGLYEKPSLSAQPGPTVLAGESVTLSCSSRSSYDMYHLSREGEAHERRFSAGPKVNGTFQADFPLGPATHGGTYRCFGSFRDSPYEWSNSSDPLLVSVTGNPSNSWPSPTEPSSKTGNPRHLHILIGTSVVIILFILLFFLLHRWCSNKKNAAVMDQESAGNRTANSEDSDEQDPQEVTYTQLNHCVFTQRKITRPSQRPKTPPTDIIVYTELPNAESRSKVVSCP

SEQ ID NO: 178421 - DNA, 1047 bp, Artificial Sequence
  derived and/or modified sequence
atgagcctgatggtagtgtccatggcctgcgtggggttttttcttctgcagggggcgtggcctcacgagggagtacataggaagccttcactcctcgcccaccccggccgcttggtaaagtcagaagagactgtgatattacagtgttggtcggacgtccggttcgagcacttcctgttacacagggaagggaagtttaaggatactctgcacctgattggtgagcaccatgatggggtgtcaaaagccaatttctctattggccccatgatgcaggatttggccggtacatatcgctgctatggcagtgtgacccacagcccataccagctatctgcgcccagtgatcccctggatattgtaatcactggcttgtatgagaagcctagtctttccgcacagccaggcccgaccgtgcttgctggggaaagcgttaccctgtcctgttcgtctcgcagcagctatgatatgtatcatttgagtcgcgaaggtgaggcccatgaatgtcggttctcggccggcccaaaagtgaatggtacattccaggcggatttccctttggggcctgccactcatggtggaacctatagatgcttcgggtcttttagggatagcccctatgaatggagcaactctagcgatccactgcttgtgtccgtgacaggaaacccatccaacagttggccatctccaacagaacccagctctaaaactggcaaccctcggcatctccatatactcattggcacttccgtggtcataatcttgttcatcttgctgttcttcctattgcaccgatggtgttcgaacaaaaagaacgcagctgtgatggaccaggaaagtgccggcaatcgtaccgctaattcagaggactcagacgagcaggatccacaggaagtaacatacacccagcttaaccactgtgtgttcacacagaggaaaatcacccgccctagtcagcggccaaagactccccccacagatattatagtgtatacagaattgcccaacgccgagtccagatccaaagtggtctcatgcccatag

SEQ ID NO: 178422 - DNA, 1047 bp, Artificial Sequence
  derived and/or modified sequence
atgtctttgatggtggtatcaatggtgtgtgtgggattttttctgcttcagggggcttggccccacgagggggtacaccggaaaccaagcctcctcgcacacccaggccctctggtaaaatcagaggagactgtgattctgcagtgttggtcagacgtacgattccaacacttcctactacacagggaggggaaatttaaggatactttgcatctaattggggaacatcatgacggtgtcagcaaggcaaatttttcgatcggcccaatgatgcaagacctggccggtacgtacagatgttacgggagcgtgacacactccccttaccagctctcagccccctctgatcccctagacattgtaattacaggcttgtatgagaagcccagtttgagtgcccagccgggacctaccgtactggccggcgaatctgttacgctgtcttgcagcagcagatcaagctacgatatgtatcatctgagtcgggagggcgaggcgcacgagcgcaggtttagtgcaggaccgaaagttaacggaacattccaggcagacttcccattggggcccgcaactcacggaggaacgtaccgctgtttcggcagtttccgggattccccgtatgaatggagtaactcatcagacccactgctcgtgtcggttaccgggaacccttccaacagctggccttcaccaaccgaaccctcatccaagaccggaaacccaagacatctgcacattttaattggcacaagtgtcgtaatcatcctgtttatcctgttgtttttccttttacaccgttggtgctcaaataaaaagaacgctgccgtgatggatcaggagagcgccggaaataggactgcgaactcagaggatagtgatgagcaggacccacaggaagtaacatatacccagctgaaccactgtgtgttcacacagcgcaaaatcactaggccttcacaaagaccaaagactccacccactgacattattgtttataccgaactgcccaacgctgagagcaggtccaaggtggttagttgtccatag

SEQ ID NO: 178423 - DNA, 1587 bp, Artificial Sequence
  derived and/or modified sequence
cgcggccgcctgtctgcacagacagcaccatgtcgctcatggtcgtcagcatggcgtgtgttgggttcttcttgctgcagggggcctggccacatgagggagtccacagaaaaccttccctcctggcccacccaggtcgcctggtgaaatcagaagagacagtcatcctgcaatgttggtcagatgtcaggtttgagcacttccttctgcacagagaagggaagtttaaggacactttgcacctcattggagagcaccatgatggggtctccaaagccaacttctccatcggtcccatgatgcaagaccttgcagggacctacagatgctacggttctgttactcactccccctatcagttgtcagctcccagtgaccctctggacatcgtcatcacaggtctatatgagaaaccttctctctcagcccagccgggccccacggttctggcaggagagagcgtgaccttgtcctgcagctcccggagctcctatgacatgtaccatctatccagggagggggaggcccatgaatgtaggttctctgcagggcccaaggtcaacggaacattccaggccgactttcctctgggccctgccacccacggaggaacctacagatgcttcggctctttccgtgactctccatacgagtggtcaaactcgagtgacccactgcttgtttctgtcacaggaaacccttcaaatagttggccttcacccactgaaccaagctctaaaaccggtaacccccgacacctgcacattctgattgggacctcagtggtcatcatcctcttcatcctcctcttctttctccttcatcgctggtgctccaacaaaaaaaatgctgcggtaatggaccaagagtctgcagggaacagaacagcgaatagcgaggactctgatgaacaagaccctcaggaggtgacatacacacagttgaatcactgcgttttcacacagagaaaaatcactcgcccttctcagaggcccaagacacccccaacagatatcatcgtgtacacggaacttccaaatgctgagtccagatccaaagttgtctcctgcccatgagcaccacagtcaggccttgagggcgtcttctagggagacaacagccctgtctcaaaaccgggttgccagctcccatgtaccagcagctggaatctgaaggcatgagtctgcatcttagggcatcgctcttcctcacaccacaaatctgaatgtgcctctcacttgcttacaaatgtctaaggtccccactgcctgctggagaaaaaacacactcctttgcttagcccacagttctccatttcacttgacccctgcccacctctccaacctaactggcttacttcctagtctacttgaggctgcaatcacactgaggaactcacaattccaaacatacaagaggctccctcttaacgcagcacttagacacgtgttgttccaccttccctcatgctgttccacctcccctcagactagctttcagtcttctgtcagcagtaaaacttatatattttttaaaataacttcaatgtagttttccatccttcaaataaacatgtctgcccccatg

SEQ ID NO: 178424 - DNA, 1587 bp, Artificial Sequence
  derived and/or modified sequence
cgcggccgcctgtctgcacagacagcaccatgtcgctcatggtcgtcagcatggtgtgtgttgggttcttcttgctgcagggggcctggccacatgagggagtccacagaaaaccttccctcctggcccacccaggtcccctggtgaaatcagaagagacagtcatcctgcaatgttggtcagatgtcaggtttcagcacttccttctgcacagagaagggaagtttaaggacactttgcacctcattggagagcaccatgatggggtctccaaggccaacttctccatcggtcccatgatgcaagaccttgcagggacctacagatgctacggttctgttactcactccccctatcagttgtcagctcccagtgaccctctggacatcgtcatcacaggtctatatgagaaaccttctctctcagcccagccgggccccacggttctggcaggagagagcgtgaccttgtcctgcagctcccggagctcctatgacatgtaccatctatccagggagggggaggcccatgaacgtaggttctctgcagggcccaaggtcaacggaacattccaggccgactttcctctgggccctgccacccacggaggaacctacagatgcttcggctctttccgtgactctccatacgagtggtcaaactcgagtgacccactgcttgtttctgtcacaggaaacccttcaaatagttggccttcacccactgaaccaagctccaaaaccggtaacccccgacacctgcacattctgattgggacctcagtggtcatcatcctcttcatcctcctcttctttctccttcatcgctggtgctccaacaaaaaaaatgctgcggtaatggaccaagagtctgcaggaaacagaacagcgaatagcgaggactctgatgaacaagaccctcaggaggtgacatacacacagttgaatcactgcgttttcacacagagaaaaatcactcgcccttctcagaggcccaagacacccccaacagatatcatcgtgtacacggaacttccaaatgctgagtccagatccaaagttgtctcctgcccatgagcaccacagtcaggccttgagggcgtcttctagggagacaacagccctgtctcaaaaccgggttgccagctcccatgtaccagcagctggaatctgaaggcgtgagtctgcatcttagggcatcgatcttcctcacaccacaaatctgaatgtgcctctctcttgcttacaaatgtctaaggtccccactgcctgctggagaaaaaacacactcctttgcttaacccacagttctccatttcacttgacccctgcccacctctccaacctaactggcttacttcctagtctacttgaggctgcaatcacactgaggaactcacaattccaaacatacaagaggctccctcttaacgcagcacttagacacgtgttgttccaccttccctcatgctgttccacctcccctcagactagctttcagtcttctgtcagcagtaaaacttatatattttttaaaataacttcaatgtagttttccatccttcaaataaacatgtctgcccccatg

SEQ ID NO: 178425 - DNA, 1047 bp, Artificial Sequence
  derived and/or modified sequence
atgagcctgatggtggtgtccatggcctgtgtgggcttcttcctgctgcagggcgcctggccccatgagggcgtgcacaggaagcccagcctgctggcccaccctggccgcctggtgaagtctgaggagaccgtcatcctgcagtgctggagcgatgtgcgctttgagcacttcctgctgcaccgggagggcaagttcaaggacaccctgcacctgattggagagcaccatgatggagtgtccaaggccaacttcagcatcggccccatgatgcaggacctggccggcacctaccgctgctacggctctgtgacccacagcccctaccagctgagcgcccccagcgaccccctggacatcgtcatcaccggcctgtatgagaagcccagcctgagcgcccagcccggccccaccgtgctggccggggagagcgtgaccctgagctgcagcagccgcagcagctatgacatgtaccacctgagccgggagggggaggcccacgagtgccgcttctctgctggccccaaggtgaatggcaccttccaggccgacttccccctgggccctgccacccacggcggcacctaccgctgcttcggcagcttccgggacagcccctatgagtggagcaacagcagtgaccccctgctggtgtctgtgactggaaaccccagcaacagctggcccagccccacagagcccagcagcaagacaggcaaccccaggcacctgcacatcctgattggcacctctgtggtgatcatcctcttcatcctgctcttcttcctgctgcaccgctggtgcagcaacaagaagaatgctgctgtgatggaccaggagagcgctggcaacagaacagccaacagcgaggacagtgatgagcaggacccccaggaggtgacctacacccagctgaaccactgtgtgttcacccagaggaagatcacccggcccagccagaggcccaagaccccacccacagacatcatcgtgtacacagagctgcccaatgctgagagccgcagcaaggtggtgtcctgcccctag

SEQ ID NO: 178426 - DNA, 1047 bp, Artificial Sequence
  derived and/or modified sequence
atgagcctgatggtggtgtccatggtgtgtgtgggcttcttcctgctgcagggcgcctggccccatgagggcgtgcacaggaagcccagcctgctggcccaccctggccccctggtgaagtctgaggagaccgtcatcctgcagtgctggagcgatgtgcgcttccagcacttcctgctgcaccgggagggcaagttcaaggacaccctgcacctgattggagagcaccatgatggagtgtccaaggccaacttcagcatcggccccatgatgcaggacctggccggcacctaccgctgctacggctctgtgacccacagcccctaccagctgagcgcccccagcgaccccctggacatcgtcatcaccggcctgtatgagaagcccagcctgagcgcccagcccggccccaccgtgctggccggggagagcgtgaccctgagctgcagcagccgcagcagctatgacatgtaccacctgagccgggagggggaggcccatgaaagacgcttctctgctggccccaaggtgaatggcaccttccaggccgacttccccctgggccctgccacccacggcggcacctaccgctgcttcggcagcttccgggacagcccctatgagtggagcaacagcagtgaccccctgctggtgtctgtgactggaaaccccagcaacagctggcccagccccacagagcccagcagcaagacaggcaaccccaggcacctgcacatcctgattggcacctctgtggtgatcatcctcttcatcctgctcttcttcctgctgcaccgctggtgcagcaacaagaagaatgctgctgtgatggaccaggagagcgctggcaacagaacagccaacagcgaggacagtgatgagcaggacccccaggaggtgacctacacccagctgaaccactgtgtgttcacccagaggaagatcacccggcccagccagaggcccaagaccccacccacagacatcatcgtgtacacagagctgcccaatgctgagagccgcagcaaggtggtgtcctgcccctag

SEQ ID NO: 178427 - DNA, 1047 bp, Artificial Sequence
  derived and/or modified sequence
atgagcctgatggtggtgagcatggcctgcgtgggcttcttcctgctccagggcgcatggccccacgagggcgtccaccggaaaccctctctgctggcccatcccggccgtctggtaaaaagcgaggagacagttatactgcagtgctggtcagatgttcgttttgaacattttttgctccaccgtgagggcaaatttaaagataccttacacttaattggggagcaccatgacggagtgtctaaagccaatttctctattggaccaatgatgcaggacctggctgggacttatagatgttacggcagtgtgacccacagtccataccagttatccgccccaagcgatccgctcgatatcgtaatcaccggcctgtacgagaagccgtctctgtctgctcagcccgggccaaccgtgctggcaggggagtctgtcaccctgagctgctcctccaggtcatcttacgacatgtatcacctgtcacgcgagggcgaagctcacgaatgtcgcttttctgctggccccaaagtgaacggcacttttcaagcagattttcccctggggccagccacccatggcggcacctacaggtgtttcggatcttttcgcgatagtccatatgagtggtccaacagttccgatccattactcgtatctgtgactgggaaccccagcaactcatggcctagcccaaccgaacctagtagtaagacaggtaatcctaggcacctccatattctgataggaacaagcgtggtcatcatcttgttcatcttgcttttttttctgctccatcgctggtgttctaacaagaagaatgcagccgtcatggatcaggaatcagctggcaatagaacagctaactcagaagacagcgatgaacaggaccctcaagaggtgacctacactcaactgaatcattgtgtctttacacagcgcaaaatcactaggcccagtcaacggcccaagaccccacccactgatattattgtctacaccgagctgccgaatgccgaaagtaggagcaaggtggtctcctgcccttag

SEQ ID NO: 178428 - DNA, 1047 bp, Artificial Sequence
  derived and/or modified sequence
atgagcctgatggtggtgagcatggtgtgcgtgggcttcttcctgttgcagggcgcctggccacacgagggagtgcacaggaagccttcactgttagcacaccccggcccccttgttaagagtgaagagaccgtcattctccagtgttggagcgatgtccgcttccagcacttcttgctacatcgggaagggaagtttaaggacacactccatctaattggagagcaccacgacggggttagcaaagccaatttcagcatagggccaatgatgcaagatttagctggcacttatcggtgttatggctcagtgacacattccccgtatcaactctcagctccaagtgatcccctcgacatcgtgattaccggactgtacgaaaagccatcgcttagcgcccagcctggcccaactgtcttagccggggaatccgtgactcttagttgcagtagcaggtcctcgtacgacatgtaccatctgtcccgcgagggggaagcacacgaacggagattcagcgcgggacccaaagtaaacggtacctttcaggcagacttcccactcggaccagccactcatggcggcacatatcggtgtttcggttcttttcgggactcaccttatgagtggtccaattcttccgatcccctgctggtttcggtcacgggaaatccatccaattcatggccttcccccaccgagccctcctcaaagactggaaatccacgtcatttgcacatcctgatcggcacgtcagtagtcatcatcctcttcattctcttattttttcttttgcaccgatggtgctctaataaaaaaaatgctgccgtcatggatcaggaatctgccggaaataggaccgccaattcagaagatagtgatgagcaggacccgcaggaagttacatacacgcagttgaatcactgtgtctttacgcagcgcaagatcactcgtccatcccagcgacccaagactccacccaccgatatcattgtgtataccgagttgcctaacgctgaaagccgctcaaaggtcgtgtcctgtccttag

SEQ ID NO: 178429 - DNA, 1047 bp, Artificial Sequence
  derived and/or modified sequence
atgagtctgatggtggtgtccatggcatgtgttgggttcttcctcctgcagggggcttggcctcatgagggcgtgcaccggaaaccctcactgctggcgcaccccggaaggctggtgaagtccgaggaaactgtgatccttcaatgttggtcagatgtgcgattcgaacatttcctgctccaccgcgagggcaaatttaaggataccctccacctaatcggcgagcatcacgatggtgtctctaaggccaacttcagtattggcccaatgatgcaggacctggctggcacttatcgctgttatgggtccgttacacatagcccgtaccagttatccgccccaagcgaccccttagacattgtcattaccggcctgtatgagaagccctcactgagcgcccagcccggtcctaccgtgctggcaggagagtctgtgaccctgagctgttcatcaaggagtagttacgatatgtatcacctatcccgggagggcgaagcgcacgaatgtcgcttctccgcgggacccaaggtgaacggcacatttcaggctgacttccccttaggacccgcaacacatggcggaacctataggtgcttcggctcctttcgcgacagcccctacgagtggtcgaattctagcgatccccttttggtcagtgtcaccggcaatccgtctaacagctggccatcccccacagaacctagcagcaagacggggaatccaagacacctccatatcttgatcggcacatccgtggtgattatcctgttcatccttctcttcttcctgctgcaccggtggtgtagcaacaagaagaatgcggcagtaatggatcaggaatctgctgggaaccgtaccgccaatagcgaagatagcgacgaacaggaccctcaggaagtgacatacacacagttaaaccattgtgtttttacacagaggaaaataacccgtccctctcaacgccctaaaacccccccaacagatatcattgtgtacacagagctgcccaacgctgagagtcgctccaaagtagtctcctgcccgtag

SEQ ID NO: 178430 - DNA, 1047 bp, Artificial Sequence
  derived and/or modified sequence
atgtccctcatggtggtgagcatggtatgcgtcggcttctttttactgcagggggcatggccccacgagggcgtccacagaaaaccaagcctgttggcccaccccggacctttggttaagtcagaggaaactgtaatattacagtgctggagcgacgtccgctttcagcactttctcctccatcgggaaggtaaatttaaagacacactacacctgatcggggagcaccatgacggggtatctaaagccaatttctccatcggacctatgatgcaagacttggcaggtacttaccgctgttatggaagtgttactcattcaccataccagttaagcgcaccatccgacccgctggacatcgttatcactggcctatacgaaaagccctctttatccgcccagccaggcccaacagtcctggccggagaatccgttacgttatcatgttcctcccggtcatcctacgatatgtatcacctgtcacgagagggagaagcccatgagcggaggtttagtgccggtccgaaagtcaacggtacatttcaggccgacttcccgctgggccctgccactcacggcggtacctacagatgttttggctccttccgggactccccatatgaatggagcaattctagcgatccattgcttgtgtcagtaacaggcaacccctcaaattcctggcccagtccaactgaaccaagctccaagacaggcaatccccgacatctgcatatcctgatcggcacgagcgtggtaattatactatttatcctgctttttttcttacttcatagatggtgctcaaacaaaaaaaatgccgcagtgatggaccaggagtccgccggaaaccggacagcgaattccgaagattccgatgagcaggacccacaggaagtcacgtatacccaactcaatcattgtgtttttacccagaggaagattacaaggccatcccagaggcctaagacccccccaacggatattattgtatacaccgagctgccgaatgctgagtccaggtctaaagtcgtgtcgtgtccatag

SEQ ID NO: 178431 - DNA, 1047 bp, Artificial Sequence
  derived and/or modified sequence
atgagcctgatggtggtgagcatggcctgcgtgggcttcttcctgctgcagggcgcctggccccacgagggcgtgcacagaaagcccagcctgctggcccaccccggcagactggtgaagagcgaggagaccgtgatcctgcagtgctggagcgacgtgagattcgagcacttcctgctgcacagagagggcaagttcaaggacaccctgcacctgatcggcgagcaccacgacggcgtgagcaaggccaacttcagcatcggccccatgatgcaggacctggccggcacctacagatgctacggcagcgtgacccacagcccctaccagctgagcgcccccagcgaccccctggacatcgtgatcaccggcctgtacgagaagcccagcctgagcgcccagcccggccccaccgtgctggccggcgagagcgtgaccctgagctgcagcagcagaagcagctacgacatgtaccacctgagcagagagggcgaggcccacgagtgcagattcagcgccggccccaaggtgaacggcaccttccaggccgacttccccctgggccccgccacccacggcggcacctacagatgcttcggcagcttcagagacagcccctacgagtggagcaacagcagcgaccccctgctggtgagcgtgaccggcaaccccagcaacagctggcccagccccaccgagcccagcagcaagaccggcaaccccagacacctgcacatcctgatcggcaccagcgtggtgatcatcctgttcatcctgctgttcttcctgctgcacagatggtgcagcaacaagaagaacgccgccgtgatggaccaggagagcgccggcaacagaaccgccaacagcgaggacagcgacgagcaggacccccaggaggtgacctacacccagctgaaccactgcgtgttcacccagagaaagatcaccagacccagccagagacccaagaccccccccaccgacatcatcgtgtacaccgagctgcccaacgccgagagcagaagcaaggtggtgagctgcccctag

SEQ ID NO: 178432 - DNA, 1047 bp, Artificial Sequence
  derived and/or modified sequence
atgagcctgatggtggtgagcatggtgtgcgtgggcttcttcctgctgcagggcgcctggccccacgagggcgtgcacagaaagcccagcctgctggcccaccccggccccctggtgaagagcgaggagaccgtgatcctgcagtgctggagcgacgtgagattccagcacttcctgctgcacagagagggcaagttcaaggacaccctgcacctgatcggcgagcaccacgacggcgtgagcaaggccaacttcagcatcggccccatgatgcaggacctggccggcacctacagatgctacggcagcgtgacccacagcccctaccagctgagcgcccccagcgaccccctggacatcgtgatcaccggcctgtacgagaagcccagcctgagcgcccagcccggccccaccgtgctggccggcgagagcgtgaccctgagctgcagcagcagaagcagctacgacatgtaccacctgagcagagagggcgaggcccacgagagaagattcagcgccggccccaaggtgaacggcaccttccaggccgacttccccctgggccccgccacccacggcggcacctacagatgcttcggcagcttcagagacagcccctacgagtggagcaacagcagcgaccccctgctggtgagcgtgaccggcaaccccagcaacagctggcccagccccaccgagcccagcagcaagaccggcaaccccagacacctgcacatcctgatcggcaccagcgtggtgatcatcctgttcatcctgctgttcttcctgctgcacagatggtgcagcaacaagaagaacgccgccgtgatggaccaggagagcgccggcaacagaaccgccaacagcgaggacagcgacgagcaggacccccaggaggtgacctacacccagctgaaccactgcgtgttcacccagagaaagatcaccagacccagccagagacccaagaccccccccaccgacatcatcgtgtacaccgagctgcccaacgccgagagcagaagcaaggtggtgagctgcccctag

SEQ ID NO: 178433 - protein, 202 aa, Artificial Sequence
  derived and/or modified sequence
MCYGKCARCIGHSLVGLALLCIAANILLYFPNGETKYASENHLSRFVWFFSGIVGGGLLMLLPAFVFIGLEQDDCCGCCGHENCGKRCAMLSSVLAALIGIAGSGYCVIVAALGLAEGPLCLDSLGQWNYTFASTEGQYLLDTSTWSECTEPKHIVEWNVSLFSILLALGGIEFILCLIQVINGVLGGICGFCCSHQQQYDC

SEQ ID NO: 178434 - protein, 232 aa, Artificial Sequence
  derived and/or modified sequence
MCYGKCARCIGHSLVGLALLCIAANILLYFPNGETKYASENHLSRFVWFFSGIVGGGLLMLLPAFVFIGLEQDDCCGCCGHENCGKRCAMLSSVLAALIGIAGSGYCVIVAALGLAEGPLCLDSLGQWNYTFASTEGQYLLDTSTWSECTEPKHIVEWNVSLFSILLALGGIEFILCLIQVINGVLGGICGFCCSHQQQMTAKRTNPGQSHNLPLFHCNLYISLVFICKTLY

SEQ ID NO: 178435 - DNA, 609 bp, Artificial Sequence
  derived and/or modified sequence
atgtgctacggcaagtgcgccagatgcatcggccacagcctggtgggcctggccctgctgtgcatcgccgccaacatcctgctgtacttccccaacggcgagaccaagtacgccagcgagaaccacctgagcagattcgtgtggttcttcagcggcatcgtgggcggcggcctgctgatgctgctgcccgccttcgtgttcatcggcctggagcaggacgactgctgcggctgctgcggccacgagaactgcggcaagagatgcgccatgctgagcagcgtgctggccgccctgatcggcatcgccggcagcggctactgcgtgatcgtggccgccctgggcctggccgagggccccctgtgcctggacagcctgggccagtggaactacaccttcgccagcaccgagggccagtacctgctggacaccagcacctggagcgagtgcaccgagcccaagcacatcgtggagtggaacgtgagcctgttcagcatcctgctggccctgggcggcatcgagttcatcctgtgcctgatccaggtgatcaacggcgtgctgggcggcatctgcggcttctgctgcagccaccagcagcagtacgactgctag

SEQ ID NO: 178436 - DNA, 699 bp, Artificial Sequence
  derived and/or modified sequence
atgtgctacggcaagtgcgccagatgcatcggccacagcctggtgggcctggccctgctgtgcatcgccgccaacatcctgctgtacttccccaacggcgagaccaagtacgccagcgagaaccacctgagcagattcgtgtggttcttcagcggcatcgtgggcggcggcctgctgatgctgctgcccgccttcgtgttcatcggcctggagcaggacgactgctgcggctgctgcggccacgagaactgcggcaagagatgcgccatgctgagcagcgtgctggccgccctgatcggcatcgccggcagcggctactgcgtgatcgtggccgccctgggcctggccgagggccccctgtgcctggacagcctgggccagtggaactacaccttcgccagcaccgagggccagtacctgctggacaccagcacctggagcgagtgcaccgagcccaagcacatcgtggagtggaacgtgagcctgttcagcatcctgctggccctgggcggcatcgagttcatcctgtgcctgatccaggtgatcaacggcgtgctgggcggcatctgcggcttctgctgcagccaccagcagcagatgaccgccaagagaaccaaccccggccagagccacaacctgcccctgttccactgcaacctgtacatcagcctggtgttcatctgcaagaccctgtactag

SEQ ID NO: 178437 - DNA, 609 bp, Artificial Sequence
  derived and/or modified sequence
atgtgctatggaaagtgcgcacggtgcattggacactcgctagttggcctggccctgctgtgcattgcagcaaacatcctgttgtatttcccaaatggggaaactaagtatgcatcggaaaaccatctgtctcgttttgtgtggttttttagtggaatcgtcggtggaggtctcctgatgttgctgcctgcattcgtcttcattgggctcgagcaggatgactgttgtgggtgctgtggacacgagaattgcgggaaaaggtgcgccatgctctcgagcgtcttggccgcccttattgggatcgcgggctccggctattgcgtcattgtggccgccctcggtctggctgagggtcccttatgtttggactctctcggacagtggaattacacctttgccagtacagaagggcaataccttctggacacttctacctggtccgagtgcactgagcctaagcacatcgtagagtggaacgtgtctctgttcagcatactactggccctcgggggcatcgagtttatcctctgccttatacaggtgatcaatggagtgttaggcgggatatgcggtttttgttgctctcatcagcaacagtatgactgctag

SEQ ID NO: 178438 - DNA, 699 bp, Artificial Sequence
  derived and/or modified sequence
atgtgttatgggaaatgtgccaggtgcataggacattcactggtaggcctggcactgctctgtatcgccgccaacattcttctttatttccccaatggagagaccaagtatgcctccgaaaatcatctctccaggttcgtctggttctttagtggcatcgtgggcggcggattgctgatgctgctaccagcatttgtcttcattggactcgagcaggacgattgctgcggctgttgcggccatgaaaactgcggcaagagatgcgctatgctgtccagcgttctggctgcattaattgggatcgcggggtcgggatattgtgtgattgtcgcagcccttggtctcgccgaagggcccctgtgcctcgactcattaggccagtggaactacacctttgccagtacagaaggtcagtacctcctcgatacgtcaacttggagcgagtgtacggagcccaaacacatcgtcgaatggaatgtgtcgttatttagcattctgttagctctgggcggtatagagttcattctgtgtctcatccaggttattaatggtgtactgggcggaatttgcgggttctgttgctcgcaccagcagcaaatgacagcaaagcggaccaacccaggacaatcccacaacctgcccctatttcattgcaatctgtatataagtctcgtgttcatttgtaagacattgtattag

SEQ ID NO: 178439 - DNA, 609 bp, Artificial Sequence
  derived and/or modified sequence
atgtgctatggaaaatgtgcccgctgcatcggccacagcctggtgggcctggccctgctgtgcatcgccgccaacatcctgctgtacttccccaacggggagaccaagtatgccagcgagaaccacctgagcagatttgtgtggttcttctctggaattgtgggcggcggcctgctgatgctgctgcctgcctttgtgttcatcggcctggagcaggatgactgctgcggctgctgcggccacgagaactgtgggaagagatgtgccatgctgagctctgtgctggccgccctgattggaattgctggcagcggctactgtgtgattgtggccgccctgggcctggccgagggccccctgtgcctggacagcctgggccagtggaactacacctttgccagcacagagggccagtacctgctggacaccagcacctggagcgagtgcacagagcccaagcacatcgtggagtggaatgtgtccctcttcagcatcctgctggccctgggcggcatcgagttcatcctgtgcctgatccaggtgatcaatggagtgctgggcggcatctgtggcttctgctgcagccaccagcagcagtatgactgctag

SEQ ID NO: 178440 - DNA, 699 bp, Artificial Sequence
  derived and/or modified sequence
atgtgctatggaaaatgtgcccgctgcatcggccacagcctggtgggcctggccctgctgtgcatcgccgccaacatcctgctgtacttccccaacggggagaccaagtatgccagcgagaaccacctgagcagatttgtgtggttcttctctggaattgtgggcggcggcctgctgatgctgctgcctgcctttgtgttcatcggcctggagcaggatgactgctgcggctgctgcggccacgagaactgtgggaagagatgtgccatgctgagctctgtgctggccgccctgattggaattgctggcagcggctactgtgtgattgtggccgccctgggcctggccgagggccccctgtgcctggacagcctgggccagtggaactacacctttgccagcacagagggccagtacctgctggacaccagcacctggagcgagtgcacagagcccaagcacatcgtggagtggaatgtgtccctcttcagcatcctgctggccctgggcggcatcgagttcatcctgtgcctgatccaggtgatcaatggagtgctgggcggcatctgtggcttctgctgcagccaccagcagcagatgacagccaagaggaccaaccctggccagagccacaacctgcccctcttccactgcaacctgtacatcagcctggtgttcatctgcaagaccctgtactag

SEQ ID NO: 178441 - DNA, 609 bp, Artificial Sequence
  derived and/or modified sequence
atgtgctacggcaagtgcgcccggtgcatcggccacagcctggtgggtctcgccctcctgtgtattgcggcaaatatcctgttgtattttcccaacggcgaaactaagtatgcctccgaaaatcatctgagtaggtttgtgtggttctttagcgggattgttgggggagggcttttgatgttattacccgcattcgtgttcatcggcttggaacaggacgactgttgcgggtgttgtgggcatgagaattgcgggaagcggtgtgcaatgctttcatcagtgctggctgcactgataggcatcgcaggatcagggtattgtgtgatcgtcgccgcactcggactcgctgaagggcccctgtgcttggactccctggggcagtggaactacacatttgcttcaacggagggacagtaccttctcgatacctccacatggtctgaatgtactgagccaaaacacattgtcgaatggaatgtcagtctctttagcatcctcctggcactgggtggcattgaatttattctttgtttgatacaggtgattaatggagtgctggggggcatttgtgggttctgctgctcacatcagcaacagtatgactgttag

SEQ ID NO: 178442 - DNA, 699 bp, Artificial Sequence
  derived and/or modified sequence
atgtgctacggcaagtgcgcccggtgcatcggccacagcctggtgggtctcgcactgctgtgcattgccgccaacatactactatacttcccaaacggagagacaaagtacgcgagcgagaaccacttgtcccgattcgtgtggtttttctctggcatagttggaggggggctcctcatgctgctgccagccttcgtttttatcgggctggagcaggatgattgttgtgggtgttgtggtcacgagaactgcggtaagagatgtgcaatgcttagcagcgtattggcagccctcatcggtatcgctggatccgggtactgcgtgattgtggccgcgctgggactcgcggaaggccctctgtgcctggactctttagggcagtggaactatacttttgcaagcaccgagggccaatatctgctggacacaagcacctggtctgagtgtactgagcccaagcacattgtggaatggaatgtgtccctttttagtatcttgctcgcactgggcggaattgaattcattttgtgcctgatccaggtcatcaacggtgtgctgggaggcatatgcggattttgctgcagccaccagcagcagatgactgccaagaggacaaacccgggacaatcccacaatctgcctctcttccactgcaatttgtatatcagcctggtgttcatctgcaaaaccttgtattag

SEQ ID NO: 178443 - DNA, 609 bp, Artificial Sequence
  derived and/or modified sequence
atgtgttatggtaagtgcgcccgatgcatcggccattcactggttggactcgctcttttatgcatcgccgctaatatacttctttattttcctaacggtgagacgaaatatgctagcgaaaatcacctgagcagattcgtgtggttcttttctggaatcgttggtgggggtttacttatgctgctgccggcatttgtgtttattggattggagcaggacgattgttgtggctgctgtggccatgaaaactgcggcaagcgctgcgctatgctgagttctgtactcgctgctctgatcgggatcgcgggtagcggctattgtgtgatagtcgcggcattgggccttgctgaaggccctctttgcctcgattcgttggggcagtggaattatacatttgcctctacggagggacagtacctgctagacactagtacttggagtgagtgtacagaacccaaacacatcgttgagtggaatgtttcgctcttttccattttgctcgctttaggagggatcgagttcatcctctgcctgatacaggtcattaatggggtgctgggtggaatttgcggcttctgctgctctcatcagcagcagtacgattgttag

SEQ ID NO: 178444 - DNA, 699 bp, Artificial Sequence
  derived and/or modified sequence
atgtgttatggaaaatgtgcacggtgcataggacacagcctggtcggactggctctcctctgcatagccgctaatatcttactatactttcccaatggggaaactaagtatgcttctgagaaccacctttccagatttgtgtggttcttctctggcatcgtgggtgggggactccttatgctattacctgcttttgtgtttatcggattggagcaggacgattgttgcggatgctgtgggcacgaaaattgcggtaagcgatgtgctatgctgtctagtgttctggccgctttgatcgggatcgccggtagcgggtattgcgttatcgtcgccgctctgggactggcggagggcccactttgcctggattctctcggacaatggaactacacattcgccagtactgaaggtcaatacctgctggacacatctacttggtccgagtgtacggagcccaagcacatagtagagtggaacgtgtccctgttttctatcctccttgcgttaggaggaatagaattcatcctgtgcctgatccaggtcataaatggtgtgctagggggaatatgcggattctgctgcagccaccagcagcagatgactgctaaacgcacaaaccccggacagtcccacaacctccccttgttccattgcaacctctacatctcattggttttcatttgtaaaaccctgtattag

SEQ ID NO: 178445 - DNA, 1771 bp, Artificial Sequence
  derived and/or modified sequence
attaatcattttccctgttgcctatgactgaggctgtttctcacatcctgcccctggttttgcctgtcccaaggatttcgtctgaagggcgggacattccccctgcctcttcgcaccacagccagagcctgccattaggaccaatgaaagcaaagtacctcatcccctcagtgactaagaatcgcagtatttaagaggtagcaggaatgggctgagagtggtgtttgctttctccaccagaagggcacactttcatctaatttggggtatcactgagctgaagacaaagagaagggggagaaaacctagcagaccaccatgtgctatgggaagtgtgcacgatgcatcggacattctctggtggggctcgccctcctgtgcatcgcggctaatattttgctttactttcccaatggggaaacaaagtatgcctccgaaaaccacctcagccgcttcgtgtggttcttttctggcatcgtaggaggtggcctgctgatgctcctgccagcatttgtcttcattgggctggaacaggatgactgctgtggctgctgtggccatgaaaactgtggcaaacgatgtgcgatgctttcttctgtattggctgctctcattggaattgcaggatctggctactgtgtcattgtggcagcccttggcttagcagaaggaccactatgtcttgattccctcggccagtggaactacacctttgccagcactgagggccagtaccttctggatacctccacatggtccgagtgcactgaacccaagcacattgtggaatggaatgtatctctgttttctatcctcttggctcttggtggaattgaattcatcttgtgtcttattcaagtaataaatggagtgcttggaggcatatgtggcttttgctgctctcaccaacagcaatatgactgctaaaagaaccaacccaggacagagccacaatcttcctctatttcattgtaatttatatatttcacttgtattcatttgtaaaactttgtattagtgtaacatactccccacagtctacttttacaaacgcctgtaaagactggcatcttcacaggatgtcagtgtttaaatttagtaaacttcttttttgtttgtttatttgtttttgtttttttttaaggaatgaggaaacaaaccaccctctgggggtaatttacagactgagtgacagtactcagtatatctgagataaactctataatgttttggataaaaataacattccaatcactattgtatatatgtgcatgtattttttaaattaaagatgtctagttgctttttataagaccaagaaggagaaaatccgacaacctggaaagatttttgttttcactgcttgtatgatgtttcccattcatacacctataaatctctaacaagaggccctttgaactgccttgtgttctgtgagaaacaaatatttacttagagtggaaggactgattgagaatgttccaatccaaatgaatgcatcacaacttacaatgctgctcattgttgtgagtactatgagattcaaatttttctaacatatggaaagccttttgtcctccaaagatgagtactagggatcatgtgtttaaaaaaagaaaggctacgatgactgggcaagaagaaagatgggaaactgaataaagcagttgatcagcatcattggaacatggggacgagtgacggcaggaggaccacgaggaaataccctcaaaactaacttgtttacaacaaaataaagtattcactacca

SEQ ID NO: 178446 - DNA, 1646 bp, Artificial Sequence
  derived and/or modified sequence
agagcctgccattaggaccaatgaaagcaaagtacctcatcccctcagtgactaagaatcgcagtatttaagaggtagcaggaatgggctgagagtggtgtttgctttctccaccagaagggcacactttcatctaatttggggtatcactgagctgaagacaaagagaagggggagaaaacctagcagaccaccatgtgctatgggaagtgtgcacgatgcatcggacattctctggtggggctcgccctcctgtgcatcgcggctaatattttgctttactttcccaatggggaaacaaagtatgcctccgaaaaccacctcagccgcttcgtgtggttcttttctggcatcgtaggaggtggcctgctgatgctcctgccagcatttgtcttcattgggctggaacaggatgactgctgtggctgctgtggccatgaaaactgtggcaaacgatgtgcgatgctttcttctgtattggctgctctcattggaattgcaggatctggctactgtgtcattgtggcagcccttggcttagcagaaggaccactatgtcttgattccctcggccagtggaactacacctttgccagcactgagggccagtaccttctggatacctccacatggtccgagtgcactgaacccaagcacattgtggaatggaatgtatctctgttttctatcctcttggctcttggtggaattgaattcatcttgtgtcttattcaagtaataaatggagtgcttggaggcatatgtggcttttgctgctctcaccaacagcaaatgactgctaaaagaaccaacccaggacagagccacaatcttcctctatttcattgtaatttatatatttcacttgtattcatttgtaaaactttgtattagtgtaacatactccccacagtctacttttacaaacgcctgtaaagactggcatcttcacaggatgtcagtgtttaaatttagtaaacttcttttttgtttgtttatttgtttttgtttttttttaaggaatgaggaaacaaaccaccctctgggggtaatttacagactgagtgacagtactcagtatatctgagataaactctataatgttttggataaaaataacattccaatcactattgtatatatgtgcatgtattttttaaattaaagatgtctagttgctttttataagaccaagaaggagaaaatccgacaacctggaaagatttttgttttcactgcttgtatgatgtttcccattcatacacctataaatctctaacaagaggccctttgaactgccttgtgttctgtgagaaacaaatatttacttagagtggaaggactgattgagaatgttccaatccaaatgaatgcatcacaacttacaatgctgctcattgttgtgagtactatgagattcaaatttttctaacatatggaaagccttttgtcctccaaagatgagtactagggatcatgtgtttaaaaaaagaaaggctacgatgactgggcaagaagaaagatgggaaactgaataaagcagttgatcagcatcattggaacatggggacgagtgacggcaggaggaccacgaggaaataccctcaaaactaacttgtttacaacaaaataaagtattcactacc

SEQ ID NO: 178447 - protein, 388 aa, Artificial Sequence
  derived and/or modified sequence
MKWLLLLGLVALSECIMYKVPLIRKKSLRRTLSERGLLKDFLKKHNLNPARKYFPQWEAPTLVDEQPLENYLDMEYFGTIGIGTPAQDFTVVFDTGSSNLWVPSVYCSSLACTNHNRFNPEDSSTYQSTSETVSITYGTGSMTGILGYDTVQVGGISDTNQIFGLSETEPGSFLYYAPFDGILGLAYPSISSSGATPVFDNIWNQGLVSQDLFSVYLSADDKSGSVVIFGGIDSSYYTGSLNWVPVTVEGYWQITVDSITMNGETIACAEGCQAIVDTGTSLLTGPTSPIANIQSDIGASENSDGDMVVSCSAISSLPDIVFTINGVQYPVPPSAYILQSEGSCISGFQGMNVPTESGELWILGDVFIRQYFTVFDRANNQVGLAPVA

SEQ ID NO: 178448 - protein, 282 aa, Artificial Sequence
  derived and/or modified sequence
MKWLLLLGLVALSECIMYKVPLIRKKSLRRTLSERGLLKDFLKKHNLNPARKYFPQWEAPTLVDEQPLENYLDMEYFGTIGIGTPAQDFTVVFDTGSSNLWVPSVYCSSLACTNHNRFNPEDSSTYQSTSETVSITYGTGSMTGILGYDTVQTVAIWRSAAMGLVSQDLFSVYLSADDKSGSVVIFGGIDSSYYTGSLNWVPVTVEGYWQITVDSITMNGETIACAEGCQAIVDTGTSLLTGPTSPIANIQSDIGASENSDGDMVVSCSAISSLPDIVFTIN

SEQ ID NO: 178449 - protein, 249 aa, Artificial Sequence
  derived and/or modified sequence
MTGILGYDTVQVGGISDTNQIFGLSETEPGSFLYYAPFDGILGLAYPSISSSGATPVFDNIWNQGLVSQDLFSVYLSADDKSGSVVIFGGIDSSYYTGSLNWVPVTVEGYWQITVDSITMNGETIACAEGCQAIVDTGTSLLTGPTSPIANIQSDIGASENSDGDMVVSCSAISSLPDIVFTINGVQYPVPPSAYILQLPSEGSCISGFQGMNVPTESGELWILGDVFIRQYFTVFDRANNQVGLAPVA

SEQ ID NO: 178450 - DNA, 1167 bp, Artificial Sequence
  derived and/or modified sequence
atgaagtggcttctgctgcttggccttgttgctctttctgagtgtattatgtataaggttcctctgatccggaagaagtcgctgcggcggactctgtccgaaagaggcctactgaaagattttctgaagaaacacaacttaaacccagctagaaagtacttccctcagtgggaagctcccacactcgtggatgaacagccactcgagaattacctggacatggaatatttcggcaccattggcattggaacccctgcccaagattttacggtggtatttgatacaggcagttcgaacctttgggtgcctagcgtgtactgctcatcccttgcgtgtactaaccataataggttcaaccctgaggattctagtacttaccagtcaacatctgaaaccgtctccataacttatggaaccggatcgatgacaggaatccttggttacgacacagtgcaggtgggaggaatcagcgatactaatcagatcttcggcctgtctgagaccgaacctggctccttcctgtattacgcaccctttgatggtatactggggttagcctaccctagcatctcaagctcaggagctaccccagtcttcgacaatatctggaaccagggtttggtcagtcaggatctttttagtgtctatttaagcgctgatgacaagagcggatccgtggtgatttttggcggaattgattcttcctactatacaggatccttaaattgggtgcccgttaccgtggaagggtactggcagatcacagttgattctatcactatgaacggcgagaccattgcctgtgcagagggttgtcaggctattgtagacacgggaacttcattattgacaggacctacaagtcctattgcaaacatccagagtgacatcggagcatcagagaacagtgatggagatatggtcgtctcctgctctgccatttcatcattgcccgatattgtgttcactattaacggggtacagtacccggtcccaccctcagcatatattctacagagtgagggctcgtgtatcagtggcttccagggcatgaatgtacccactgaatcaggcgagttatggatactaggggacgtgtttattcgacagtatttcacagtttttgatcgtgctaacaaccaggtggggctcgcacctgtggcttag

SEQ ID NO: 178451 - DNA, 1167 bp, Artificial Sequence
  derived and/or modified sequence
atgaagtggctgctgctgctgggcctggtcgctctaagcgaatgcatcatgtacaaggtacccttaattcggaaaaaaagcctccgaaggacgctgtctgaacgtggtctgctgaaggacttcctgaaaaagcataacctcaatccagccaggaagtattttccgcaatgggaggcaccgacgctcgtggacgagcagcctcttgaaaactatctcgatatggaatactttggcacaataggtatcgggacacctgcgcaggactttacggtcgtgtttgacactggttcgtctaacttgtgggtcccatctgtctactgtagttccctggcatgcacgaaccataaccgcttcaacccagaagactcatcaacatatcagtcgacctccgaaaccgtcagtatcacttatgggacgggtagcatgactggaatactggggtatgacacggtccaagtaggcggaatctctgatacaaaccagattttcggtctgtccgaaacagaaccggggagctttctgtactatgcaccttttgacggcattttaggcctcgcttacccctcaatcagttcttcaggcgctacgccggtgttcgacaatatctggaaccaggggctagtctctcaggatctctttagcgtgtatctgtcagccgacgacaagtccggctcagtagtgatcttcggggggattgattctagctactacacaggatcgctaaactgggtgcctgtgacagtggagggctactggcaaattaccgtggattccattacaatgaacggcgagaccatcgcttgtgcggaaggctgccaggcgatcgtggacacgggcacaagtctactcacaggccctacatcgcctattgccaatattcagagcgacatcggggctagcgagaactcagatggggatatggtggtatcctgttcggccatcagctcactgccagatatcgtgtttacaatcaacggagtgcagtaccctgtcccgccgtccgcctacattctccaatcagaggggagctgcatctccggcttccagggaatgaacgtgcccaccgaatccggggaactatggatactgggggatgtgttcattcgccagtactttacggtgttcgaccgagccaataaccaggtggggctggctcccgtcgcatag

SEQ ID NO: 178452 - DNA, 849 bp, Artificial Sequence
  derived and/or modified sequence
atgaaatggttactgctgctcgggctggttgcactctcagaatgtattatgtacaaagttcccctgatccgtaaaaaaagcctccggaggacattgagcgaacgaggtctgctcaaagatttcctcaaaaaacataacttgaacccagctaggaaatacttcccacagtgggaggctccaaccctggtggatgagcagccgctggagaactacctggatatggaatacttcggaaccatcggcatcgggacaccggcacaggattttactgtggtctttgatacaggcagctccaacctctgggtgcccagcgtttattgtagctcccttgcgtgtacaaaccataaccggttcaatccagaagactcctccacttaccagtctacctcagaaacggtgagcatcacttatggaactggcagcatgacagggatcttagggtatgacaccgtgcaaacagtcgctatatggcggtctgcagcaatgggtctcgtctcccaagaccttttcagcgtgtacctgtccgccgatgacaaatcaggctctgtggtaattttcggaggtatcgactcatcctactacacagggagtttgaattgggtaccagtgaccgttgagggatactggcagatcacagtggattccatcacaatgaacggtgagactattgcctgtgcagagggatgtcaagcaatcgttgacaccgggacctccctgctgaccgggcctacaagccccattgccaacatccagtcagatataggagctagcgagaacagcgacggggacatggtggttagttgttctgctataagctccctgcctgacatcgtgttcacaattaactag

SEQ ID NO: 178453 - DNA, 750 bp, Artificial Sequence
  derived and/or modified sequence
atgactggtatcctcgggtacgacacagttcaggtgggaggaatctccgatacaaaccagattttcgggctcagcgagaccgagcccgggagtttcctgtactatgctccatttgatggtatcttgggactcgcctacccaagcataagttctagcggtgcaacacccgtgttcgataatatatggaaccagggcttggtgagtcaggacttgttcagcgtgtatttgagtgccgatgataaatctggatcggttgtgatctttgggggcattgactcaagctactataccggatccttgaactgggtgcccgtgacagtagaggggtattggcagatcaccgttgatagtatcaccatgaatggagagaccatcgcctgcgccgaaggctgtcaagcaatcgtcgacacaggcacatctttactgactggccctacgagccccatagctaacatccagtctgatattggtgcttcagagaatagcgacggcgacatggttgtctcttgctcggccatcagctcacttccagatattgtgtttactatcaatggggtgcagtatcccgttcctccaagcgcgtacatccttcaactgcctagcgagggcagctgcatttctggttttcagggcatgaacgtgccgactgagtctggcgagctatggattctgggagatgtattcatccgccagtacttcaccgtgtttgacagggcaaacaatcaagtgggtctagcgcccgtagcatag

SEQ ID NO: 178454 - DNA, 1167 bp, Artificial Sequence
  derived and/or modified sequence
atgaagtggctgctgctgctgggcctggtggccctgtctgagtgcatcatgtacaaggtgcccctcatcaggaagaagagcctgcggaggaccctgtctgagcggggcctgctgaaggacttcctgaagaagcacaacctgaacccagccaggaagtacttcccccagtgggaggcccccaccctggtggatgagcagcccctggagaactacctggacatggagtacttcggcaccatcggcatcggcaccccagcccaggacttcaccgtggtgtttgacaccggcagcagcaacctgtgggtgcccagcgtgtactgcagcagcctggcctgcaccaaccacaaccgcttcaaccctgaggacagcagcacctaccagagcaccagcgagaccgtgtccatcacctatggaacaggctccatgacaggcatcctgggctatgacacagtgcaggtgggcggcatcagtgacaccaaccagatcttcggcctgtctgaaacagagcccggcagcttcctgtactatgccccctttgatggcatcctgggcctggcctaccccagcatcagcagcagcggggccacccctgtgtttgacaacatctggaaccagggcctggtgtcccaggacctcttctctgtgtacctgtctgcagatgacaagagcggctctgtggtgatctttggaggcatcgacagcagctactacacaggcagcctgaactgggtgcctgtgacagtggagggctactggcagatcaccgtggacagcatcaccatgaatggagagaccatcgcctgtgccgagggctgccaggccatcgtggacaccggcaccagcctgctgaccggccccaccagccccatcgccaacatccagagcgacattggagcctctgaaaattctgatggagacatggtggtgtcctgcagcgccatcagcagcctgcctgacatcgtgttcaccatcaatggagtgcagtaccctgtgccccccagcgcctacatcctgcagagcgagggcagctgcatcagcggcttccagggcatgaatgtgcccacagaaagtggagagctgtggatcctgggagatgtgttcatccggcagtacttcaccgtgtttgaccgggccaacaaccaggtgggcctggcccctgtggcctag

SEQ ID NO: 178455 - DNA, 849 bp, Artificial Sequence
  derived and/or modified sequence
atgaagtggctgctgctgctgggcctggtggccctgtctgagtgcatcatgtacaaggtgcccctcatcaggaagaagagcctgcggaggaccctgtctgagcggggcctgctgaaggacttcctgaagaagcacaacctgaacccagccaggaagtacttcccccagtgggaggcccccaccctggtggatgagcagcccctggagaactacctggacatggagtacttcggcaccatcggcatcggcaccccagcccaggacttcaccgtggtgtttgacaccggcagcagcaacctgtgggtgcccagcgtgtactgcagcagcctggcctgcaccaaccacaaccgcttcaaccctgaggacagcagcacctaccagagcaccagcgagaccgtgtccatcacctatggaacaggctccatgacaggcatcctgggctatgacacagtgcagacagtggccatctggaggtctgctgccatgggcctggtgtcccaggacctcttctctgtgtacctgtctgcagatgacaagagcggctctgtggtgatctttggaggcatcgacagcagctactacacaggcagcctgaactgggtgcctgtgacagtggagggctactggcagatcaccgtggacagcatcaccatgaatggagagaccatcgcctgtgccgagggctgccaggccatcgtggacaccggcaccagcctgctgaccggccccaccagccccatcgccaacatccagagcgacatcggggccagcgagaacagtgatggagacatggtggtgtcctgcagcgccatcagcagcctgcctgacatcgtgttcaccatcaactag

SEQ ID NO: 178456 - DNA, 750 bp, Artificial Sequence
  derived and/or modified sequence
atgacaggcatcctgggctatgacacagtgcaggtgggcggcatcagtgacaccaaccagatcttcggcctgtctgaaacagagcccggcagcttcctgtactatgccccctttgatggcatcctgggcctggcctaccccagcatcagcagcagcggggccacccctgtgtttgacaacatctggaaccagggcctggtgtcccaggacctcttctctgtgtacctgtctgcagatgacaagagcggctctgtggtgatctttggaggcatcgacagcagctactacacaggcagcctgaactgggtgcctgtgacagtggagggctactggcagatcaccgtggacagcatcaccatgaatggagagaccatcgcctgtgccgagggctgccaggccatcgtggacaccggcaccagcctgctgaccggccccaccagccccatcgccaacatccagagcgacatcggggccagcgagaacagtgatggagacatggtggtgtcctgcagcgccatcagcagcctgcctgacatcgtgttcaccatcaacggggtgcagtaccctgtgcccccatctgcctacatcctgcagctgcccagcgagggcagctgcatcagcggcttccagggcatgaatgtgcccacagagagcggggagctgtggatcctgggagatgtgttcatccggcagtacttcaccgtgtttgaccgggccaacaaccaggtgggcctggcccctgtggcctag

SEQ ID NO: 178457 - DNA, 1167 bp, Artificial Sequence
  derived and/or modified sequence
atgaagtggctgctgctgctgggcctggtggccctgagcgagtgcattatgtataaagtgcctctcatacggaaaaagtccctccggcggactctgagtgagaggggactgctgaaggatttcttgaaaaagcacaatctgaaccccgctcggaagtattttccacaatgggaagcgccaacgctggtagacgaacagcccctggaaaattacctcgatatggagtacttcggaactatcggaatcggaactcccgcccaggacttcacagtggtgtttgacactgggagttccaacctgtgggtcccatctgtgtactgtagttcccttgcgtgcaccaatcacaaccgatttaatcctgaggatagttctacgtatcagagtacctctgagacggttagcattacgtatgggaccggttctatgaccgggatacttggatacgatacagtgcaggtcggggggatttctgatacaaaccaaattttcgggctcagcgagaccgagcctggttcctttctgtattacgctccatttgacggaatcctaggccttgcgtatccaagtatcagctcctctggggccactccagtgtttgataatatctggaaccaggggctggtcagtcaggacctgttcagcgtgtatctgtcagctgacgacaagtctggatctgtggtgatttttggaggcattgattcaagctactacaccggatcactgaactgggtcccagtgaccgtagagggttactggcagatcacagttgattcaattaccatgaacggtgaaacaatcgcttgtgccgaaggttgtcaagcgattgtggacacagggacttcactgctcaccggtcccacttctcccattgccaacattcagagtgacatcggagcttccgagaattccgacggcgatatggtcgtttcatgcagtgcgatctcatcgcttccagacatagtctttactattaacggagtgcagtatccggtcccaccctccgcctacatactccagagcgaaggtagctgtattagcggtttccagggtatgaacgtgccgacagagtccggagagttatggatattgggagatgtatttatccgacaatacttcactgtattcgatcgtgccaacaaccaggtggggctagccccagtggcctag

SEQ ID NO: 178458 - DNA, 1167 bp, Artificial Sequence
  derived and/or modified sequence
atgaagtggctgctgctgctgggcctggtggccctgagcgagtgcataatgtataaggttcccttgattcgtaaaaaatctctgaggcgaacgttatccgaacgtggactactcaaggattttctgaaaaagcataatctcaatccagcaagaaagtatttcccacagtgggaggcgcctaccctcgtggacgagcaacccctcgagaactatctggatatggagtactttggaaccatcggaatcggaactccagctcaggacttcaccgtcgtgtttgataccgggtccagtaacctgtgggtgccatccgtctactgctctagcttggcatgcaccaaccataaccggttcaaccctgaggactcctctacctaccagtctacatctgaaactgtgtccataacatatgggacagggagtatgactggaatcttggggtatgataccgtgcaggtcgggggtatcagtgatactaaccagatttttggcctctcagaaactgagcccggcagcttcctttactacgccccatttgatggcatcttaggcctggcctatccgtctataagtagcagcggggcaacaccagtttttgacaacatttggaatcagggtttagtttctcaagacctgttctctgtctatctctccgcagacgacaagagtggctccgtcgtgattttcggcggtattgactcatcgtactatactggtagtcttaattgggtgcctgtaactgtagaggggtattggcagatcacggtggacagcataaccatgaacggcgagaccatcgcctgcgctgaaggctgccaggccatcgtggacacgggcacaagccttctcaccggcccaacatccccaatagctaacatacagagcgacattggcgcatctgagaattcagacggcgatatggtagtctcatgcagtgctatcagttccctgcccgatattgttttcactataaatggggtgcagtatcccgtcccaccatcagcctatatccttcagtcagaaggctcctgcattagcggattccagggcatgaacgttccaacggaatccggggagctgtggattctcggggacgtgtttattcggcaatacttcaccgtatttgaccgagctaataatcaggtaggactggccccagttgcctag

SEQ ID NO: 178459 - DNA, 849 bp, Artificial Sequence
  derived and/or modified sequence
atgaagtggctgctgctgctgggcctggtggccctgagcgagtgcatcatgtacaaggtccccctgatcaggaagaagagtttacgcagaacactatctgagcggggcctgctgaaagatttcctcaaaaagcataacctaaacccagcccgcaagtatttcccccagtgggaggcccccaccctagttgacgagcagccattagaaaactacctggatatggaatatttcggaacaatcggcattggtactcccgcccaggattttactgtcgtattcgataccggcagttcaaatttgtgggttccaagcgtgtattgctcaagcctggcctgcactaaccataatcggtttaatccagaggacagctctacctatcaaagtacatcagaaacagtcagtattacgtatgggaccgggtccatgacaggcattctcggctatgatacagtccagaccgtagctatctggcgctctgctgcaatgggcttggtcagccaggacctgttttcagtgtacctttctgctgatgataagtcggggtccgtggttatttttggcgggatcgactcctcatactatacagggtccctgaactgggtgcctgttaccgtggaggggtactggcagataactgtggattcgatcacaatgaacggtgagactattgcatgcgctgagggttgccaggccatcgttgacactgggaccagcctcctaacaggaccaacatcccccatcgccaacatccagagtgacattggcgccagtgagaattctgacggcgatatggtcgtgtcatgcagtgcaattagttccctgccagatatcgtctttacaattaactag

SEQ ID NO: 178460 - DNA, 750 bp, Artificial Sequence
  derived and/or modified sequence
atgaccggcatcctgggctacgacaccgtgcaggtgggcggcatcagtgatactaatcaaattttcggactcagcgagacggagccaggaagctttctctactacgcaccgtttgatggcattctgggcttggcctacccctcaatatcaagctctggggcgacacccgtttttgacaacatctggaatcagggccttgtgagccaggacttgttctcagtgtacttgtctgccgacgataagtccgggtctgtggtgattttcggcgggatagactccagttattatacaggtagcctgaattgggtccctgtgacagttgaaggctattggcaaatcacagtggattctataaccatgaacggcgaaacaattgcctgtgcagaaggttgccaggctatcgtcgatacaggtacctccctgttaaccgggcccacgtccccaatagctaatatccaatcagacatcggagcctctgagaattccgatggggacatggtcgtgagctgctcagccatctcaagcctcccagacatagtgtttactattaacggagtacagtatcccgtccctccatctgcatacatactgcagctgccttccgaggggtcttgtatcagcgggttccagggtatgaacgtacctaccgagtccggggaactatggattttgggcgacgttttcatcagacagtactttaccgtgttcgatcgcgcgaacaatcaggttgggctggctcctgttgcttag

SEQ ID NO: 178461 - DNA, 1398 bp, Artificial Sequence
  derived and/or modified sequence
tctgcaccttcctcccatcttgccttctccctcgagttgggacccgggaagaaccatgaagtggctgctgctgctgggtctggtggcgctctctgagtgcatcatgtacaaggtccccctcatcagaaagaagtccttgaggcgcaccctgtccgagcgtggcctgctgaaggacttcctgaagaagcacaacctcaacccagccagaaagtacttcccccagtgggaggctcccaccctggtagatgaacagcccctggagaactacctggatatggagtacttcggcactatcggcatcggaactcctgcccaggatttcaccgtcgtctttgacaccggctcctccaacctgtgggtgccctcagtctactgctccagtcttgcctgcaccaaccacaaccgcttcaaccctgaggattcttccacctaccagtccaccagcgagacagtctccatcacctacggcaccggcagcatgacaggcatcctcggatacgacactgtccaggttggaggcatctctgacaccaatcagatcttcggcctgagcgagacggaacctggctccttcctgtattatgctcccttcgatggcatcctggggctggcctaccccagcatttcctcctccggggccacacccgtctttgacaacatctggaaccagggcctggtttctcaggacctcttctctgtctacctcagcgccgatgacaagagtggcagcgtggtgatctttggtggcattgactcttcttactacactggaagtctgaactgggtgcctgttaccgtcgagggttactggcagatcaccgtggacagcatcaccatgaacggagagaccatcgcctgtgctgagggctgccaggccattgttgacaccggcacctctctgctgaccggcccaaccagccccattgccaacatccagagcgacatcggagccagcgagaactcagatggcgacatggtggtcagctgctcagccatcagcagcctgcccgacatcgtcttcaccatcaatggagtccagtaccccgtgccacccagtgcctacatcctgcagagcgaggggagctgcatcagtggcttccagggcatgaacgtccccaccgaatctggagagctttggatcctgggtgatgtcttcatccgccagtactttaccgtcttcgacagggcaaacaaccaggtcggcctggcccctgtggcttaagcctaagtctcttcagccacctcccaggaagatctggcctccgtcctatgcccactttagatgtatctaattctcctgactgttcttcccaggggagtgtgaaggtcttggccctgttccctgtcctaccaataacgtagaataaaaacataacccactgaaacaggttttgtgga

SEQ ID NO: 178462 - DNA, 1519 bp, Artificial Sequence
  derived and/or modified sequence
tcagaatgtggctcagggcagccacaatcttatcaggagcttctctgtttgggatcaggggaaccggtgactttcagaggccgataaggcgggacccaacttgtatataaggggcagctcatgctgctgctctgcaccttcctcccatcttgccttctccctcgagttgggacccgggaagaaccatgaagtggctgctgctgctgggtctggtggcgctctctgagtgcatcatgtacaaggtccccctcatcagaaagaagtccttgaggcgcaccctgtccgagcgtggcctgctgaaggacttcctgaagaagcacaacctcaacccagccagaaagtacttcccccagtgggaggctcccaccctggtagatgaacagcccctggagaactacctggatatggagtacttcggcactatcggcatcggaactcctgcccaggatttcaccgtcgtctttgacaccggctcctccaacctgtgggtgccctcagtctactgctccagtcttgcctgcaccaaccacaaccgcttcaaccctgaggattcttccacctaccagtccaccagcgagacagtctccatcacctacggcaccggcagcatgacaggcatcctcggatacgacactgtccaggttggaggcatctctgacaccaatcagatcttcggcctgagcgagacggaacctggctccttcctgtattatgctcccttcgatggcatcctggggctggcctaccccagcatttcctcctccggggccacacccgtctttgacaacatctggaaccagggcctggtttctcaggacctcttctctgtctacctcagcgccgatgacaagagtggcagcgtggtgatctttggtggcattgactcttcttactacactggaagtctgaactgggtgcctgttaccgtcgagggttactggcagatcaccgtggacagcatcaccatgaacggagagaccatcgcctgtgctgagggctgccaggccattgttgacaccggcacctctctgctgaccggcccaaccagccccattgccaacatccagagcgacatcggagccagcgagaactcagatggcgacatggtggtcagctgctcagccatcagcagcctgcccgacatcgtcttcaccatcaatggagtccagtaccccgtgccacccagtgcctacatcctgcagagcgaggggagctgcatcagtggcttccagggcatgaacgtccccaccgaatctggagagctttggatcctgggtgatgtcttcatccgccagtactttaccgtcttcgacagggcaaacaaccaggtcggcctggcccctgtggcttaagcctaagtctcttcagccacctcccaggaagatctggcctccgtcctatgcccactttagatgtatctaattctcctgactgttcttcccaggggagtgtgaaggtcttggccctgttccctgtcctaccaataacgtagaataaaaacataacccactgaaacagg

SEQ ID NO: 178463 - DNA, 1269 bp, Artificial Sequence
  derived and/or modified sequence
tctgcaccttcctcccatcttgccttctccctcgagttgggacccgggaagaaccatgaagtggctgctgctgctgggtctggtggcgctctctgagtgcatcatgtacaaggtccccctcatcagaaagaagtccttgaggcgcaccctgtccgagcgtggcctgctgaaggacttcctgaagaagcacaacctcaacccagccagaaagtacttcccccagtgggaggctcccaccctggtagatgaacagcccctggagaactacctggatatggagtacttcggcactatcggcatcggaactcctgcccaggatttcaccgtcgtctttgacaccggctcctccaacctgtgggtgccctcagtctactgctccagtcttgcctgcaccaaccacaaccgcttcaaccctgaggattcttccacctaccagtccaccagcgagacagtctccatcacctacggcaccggcagcatgacaggcatcctcggatacgacactgtccagactgtagccatctggagatcagctgccatgggcctggtttctcaggacctcttctctgtctacctcagcgccgatgacaagagtggcagcgtggtgatctttggtggcattgactcttcttactacactggaagtctgaactgggtgcctgttaccgtcgagggttactggcagatcaccgtggacagcatcaccatgaacggagagaccatcgcctgtgctgagggctgccaggccattgttgacaccggcacctctctgctgaccggcccaaccagccccattgccaacatccagagcgacatcggagccagcgagaactcagatggcgacatggtggtcagctgctcagccatcagcagcctgcccgacatcgtcttcaccatcaatggagtccagtaccccgtgccacccagtgcctacatcctgcagagcgaggggagctgcatcagtggcttccagggcatgaacgtccccaccgaatctggagagctttggatcctgggtgatgtcttcatccgccagtactttaccgtcttcgacagggcaaacaaccaggtcggcctggcccctgtggcttaagcctaagtctcttcagccacctcccaggaagatctggcctccgtcctatgcccactttagatgtatctaattctcctgactgttcttcccaggggagtgtgaaggtcttggccctgttccctgtcctaccaataacgtagaataaaaacataacccactgaaacaggttttgtgga

SEQ ID NO: 178464 - DNA, 1228 bp, Artificial Sequence
  derived and/or modified sequence
tctgcaccttcctcccatcttgccttctccctcgagttgggacccgggaagaaccatgaagtggctgctgctgctgggtctggtggcgctctctgagtgcatcatgtacaaggtccccctcatcagaaagaagtccttgaggcgcaccctgtccgagcgtggcctgctgaaggacttcctgaagaagcacaacctcaacccagccagaaagtacttcccccagtgggaggctcccaccctggtagatgaacagcccctggagaactacctggatatggagtacttcggcactatcggcatcggaactcctgcccaggatttcaccgtcgtctttgacaccggctcctccaacctgtgggtgccctcagtctactgctccagtcttgcctgcaccaaccacaaccgcttcaaccctgaggattcttccacctaccagtccaccagcgagacagtctccatcacctacggcaccggcagcatgacaggcatcctcggatacgacactgtccaggttggaggcatctctgacaccaatcagatcttcggcctgagcgagacggaacctggctccttcctgtattatgctcccttcgatggcatcctggggctggcctaccccagcatttcctcctccggggccacacccgtctttgacaacatctggaaccagggcctggtttctcaggacctcttctctgtctacctcagcgccgatgacaagagtggcagcgtggtgatctttggtggcattgactcttcttactacactggaagtctgaactgggtgcctgttaccgtcgagggttactggcagatcaccgtggacagcatcaccatgaacggagagaccatcgcctgtgctgagggctgccaggccattgttgacaccggcacctctctgctgaccggcccaaccagccccattgccaacatccagagcgacatcggagccagcgagaactcagatggcgacatggtggtcagctgctcagccatcagcagcctgcccgacatcgtcttcaccatcaatggagtccagtaccccgtgccacccagtgcctacatcctgcagctccccagcgaggggagctgcatcagtggcttccagggcatgaacgtccccaccgaatctggagagctttggatcctgggtgatgtcttcatccgccagtactttaccgtcttcgacagggcaaacaaccaggtcggcctggcccctgtggcttaa

SEQ ID NO: 178465 - DNA, 1167 bp, Artificial Sequence
  derived and/or modified sequence
atgaagtggctgctgctgcttggcttagtggctctcagcgagtgtattatgtacaaagttcccctgatacggaagaagtccctgaggcgaacactgagcgaacgcggtctattaaaagacttcctgaaaaagcacaacttgaatcccgcacgaaagtatttcccgcaatgggaggcaccaacactggtggatgagcagcccctagagaactatctggacatggagtactttggcacaatcggcatcggcacaccagcgcaagatttcaccgtggtgttcgataccggttcctcaaacctctgggttcccagtgtgtactgttcttccctggcctgtactaatcacaaccgcttcaaccccgaggacagttccacctatcagtccacctctgagaccgtttcaattacttacgggaccggatccatgaccggtatcctcggttacgatacggtgcaagtgggcggaatctctgatacaaaccagatctttggtttgagtgagacggagccagggagcttcctgtactacgcacccttcgacggaatcctaggtttagcctacccctcaattagctctagcggtgccactcctgtgttcgataatatctggaaccagggcctggtcagtcaggacctgttctctgtgtacctgagcgcggacgacaagagtgggtccgtggtcatttttgggggaatcgacagctcttattacactggcagtctaaattgggtgcccgtcaccgtcgagggctattggcaaatcaccgtagacagtattaccatgaatggggagaccattgcgtgtgctgaggggtgccaggcaatagtagatactgggaccagcctcttaactggcccaacgagccccattgctaacatccagagcgatattggtgcatctgagaacagcgacggcgatatggtggtgtcatgttccgctattagttccctacccgatattgtcttcacaattaacggggtgcagtacccggtgccaccctcggcttacatcctccagagcgagggcagttgtatctcaggctttcaaggtatgaatgttccaacagaaagtggggagctgtggatcctgggggatgtcttcattagacagtacttcactgtgttcgaccgggcaaacaaccaagtgggtctggctccggtcgcttag

SEQ ID NO: 178466 - DNA, 1167 bp, Artificial Sequence
  derived and/or modified sequence
atgaaatggctactactgcttgggctcgtggccctctccgagtgtatcatgtacaaggtccccctgatacgaaagaaatctcttagaagaactctttctgaaaggggcttgcttaaggatttcttaaaaaagcacaacctgaaccctgctcgcaaatatttcccccagtgggaggcacctactctggttgacgagcagccactggaaaactacctggacatggaatacttcgggacgattggcattggtactccggctcaagactttacagtggttttcgatacaggtagtagcaatctctgggtgccctccgtgtattgtagctctcttgcatgcaccaaccacaacaggtttaatcccgaagacagctccacctaccagtctacatcagaaacagtgtcaattacatatggcacaggatccatgacagggatactgggatacgacacagtccaggtaggcggtatatccgacaccaaccagatatttggactcagtgagaccgaaccaggtagcttcctttattatgcaccttttgatggcattctaggcctggcctacccatccattagttccagcggggcaacacctgtgttcgataatatttggaaccagggattggtctcacaggacctgttttccgtctacttgagcgccgacgacaaaagcggctcggtcgtgatctttggagggattgactcaagttattacaccggatctctgaactgggtgcctgtgacagtcgaaggatattggcagatcactgtggatagcattaccatgaacggcgaaacaattgcatgcgccgaaggctgccaggccatcgtagacacaggtacctcacttctgaccggccctacctcccctatagccaacatccaaagtgacataggagccagcgagaatagtgatggcgacatggtggtctcatgctctgcaatttctagtctacctgacattgtgttcacgatcaacggagttcagtatcccgtgccccctagcgcctacattctgcaatccgagggatcctgcatcagtggttttcaaggtatgaatgtccctaccgagtctggagagctgtggatactgggcgacgtctttattcggcagtacttcacagtgtttgacagggccaataatcaagtcggactcgctcctgtggcttag

SEQ ID NO: 178467 - DNA, 849 bp, Artificial Sequence
  derived and/or modified sequence
atgaaatggctactgctgctggggctggtggcattgagtgaatgtattatgtacaaagtacccttaatcaggaagaagagcctccgtagaacactatctgagcgcggactgttaaaggatttcctgaagaagcacaatctaaatcctgctcgcaagtattttccgcaatgggaggcacctactctagtcgatgaacagccactggagaactatctcgacatggagtactttgggaccataggcattggaacacccgctcaggatttcacagtagtgtttgataccggttccagcaatctgtgggttccatctgtttactgttccagtcttgcgtgtaccaatcacaaccgctttaacccagaggattcatcaacgtaccagtccacctcagaaactgtgtccatcacatacggcaccggatccatgactggtatactagggtacgacactgtgcagacggttgcaatatggcgttccgctgctatgggactagtcagccaggatttattcagcgtatacttgagcgccgacgataagagtgggagtgttgtcatcttcggaggtatcgactccagttattataccggctctcttaattgggtgcctgtaacggtggaagggtattggcagattactgtcgatagtatcacgatgaacggggagacaatcgcttgcgccgaagggtgccaagctatcgtggatactggaacttctctgctcactggccctacttctccaatagcaaacatccaatcagatatcggcgctagtgagaactcagacggagacatggtagtcagttgcagcgccatttcctctcttccagatatcgtgttcaccatcaattag

SEQ ID NO: 178468 - DNA, 750 bp, Artificial Sequence
  derived and/or modified sequence
atgacaggcattttaggctatgacactgtgcaggtgggagggatttccgatacgaatcaaatcttcggtctctcggaaacagagcctggcagcttcctgtattatgctcccttcgacggcatcctgggccttgcctacccgtcaatatcttccagcggcgctacccccgtgttcgataacatctggaaccagggtctcgtgtctcaggacctgttttctgtctacctgtcagctgatgacaaaagtggcagtgtggttattttcgggggaatagatagttcctattacaccggctctctgaattgggtgccggtcacagtggaggggtactggcagattactgtcgacagcatcactatgaacggagagactatcgcctgtgccgaggggtgtcaggccatcgttgataccggaacatctcttctgacgggacccacaagcccaatagcaaatattcagtcggatattggggcatcagagaatagcgacggcgatatggtggtaagctgttccgccatcagctctttaccggatattgtgtttacaattaacggggttcagtaccccgttcccccatcagcttatatcctgcaattaccaagtgagggcagttgcatcagtggcttccagggtatgaatgtccccacggaatccggcgaactttggatcctgggggacgtctttattcggcagtattttacagtcttcgatagagcaaataaccaagttggcttagctcccgtggcgtag

SEQ ID NO: 178469 - DNA, 1167 bp, Artificial Sequence
  derived and/or modified sequence
atgaagtggctgctgctgctgggcctggtggccctgagcgagtgcatcatgtacaaggtgcccctgatcagaaagaagagcctgagaagaaccctgagcgagagaggcctgctgaaggacttcctgaagaagcacaacctgaaccccgccagaaagtacttcccccagtgggaggcccccaccctggtggacgagcagcccctggagaactacctggacatggagtacttcggcaccatcggcatcggcacccccgcccaggacttcaccgtggtgttcgacaccggcagcagcaacctgtgggtgcccagcgtgtactgcagcagcctggcctgcaccaaccacaacagattcaaccccgaggacagcagcacctaccagagcaccagcgagaccgtgagcatcacctacggcaccggcagcatgaccggcatcctgggctacgacaccgtgcaggtgggcggcatcagcgacaccaaccagatcttcggcctgagcgagaccgagcccggcagcttcctgtactacgcccccttcgacggcatcctgggcctggcctaccccagcatcagcagcagcggcgccacccccgtgttcgacaacatctggaaccagggcctggtgagccaggacctgttcagcgtgtacctgagcgccgacgacaagagcggcagcgtggtgatcttcggcggcatcgacagcagctactacaccggcagcctgaactgggtgcccgtgaccgtggagggctactggcagatcaccgtggacagcatcaccatgaacggcgagaccatcgcctgcgccgagggctgccaggccatcgtggacaccggcaccagcctgctgaccggccccaccagccccatcgccaacatccagagcgacatcggcgccagcgagaacagcgacggcgacatggtggtgagctgcagcgccatcagcagcctgcccgacatcgtgttcaccatcaacggcgtgcagtaccccgtgccccccagcgcctacatcctgcagagcgagggcagctgcatcagcggcttccagggcatgaacgtgcccaccgagagcggcgagctgtggatcctgggcgacgtgttcatcagacagtacttcaccgtgttcgacagagccaacaaccaggtgggcctggcccccgtggcctag

SEQ ID NO: 178470 - DNA, 849 bp, Artificial Sequence
  derived and/or modified sequence
atgaagtggctgctgctgctgggcctggtggccctgagcgagtgcatcatgtacaaggtgcccctgatcagaaagaagagcctgagaagaaccctgagcgagagaggcctgctgaaggacttcctgaagaagcacaacctgaaccccgccagaaagtacttcccccagtgggaggcccccaccctggtggacgagcagcccctggagaactacctggacatggagtacttcggcaccatcggcatcggcacccccgcccaggacttcaccgtggtgttcgacaccggcagcagcaacctgtgggtgcccagcgtgtactgcagcagcctggcctgcaccaaccacaacagattcaaccccgaggacagcagcacctaccagagcaccagcgagaccgtgagcatcacctacggcaccggcagcatgaccggcatcctgggctacgacaccgtgcagaccgtggccatctggagaagcgccgccatgggcctggtgagccaggacctgttcagcgtgtacctgagcgccgacgacaagagcggcagcgtggtgatcttcggcggcatcgacagcagctactacaccggcagcctgaactgggtgcccgtgaccgtggagggctactggcagatcaccgtggacagcatcaccatgaacggcgagaccatcgcctgcgccgagggctgccaggccatcgtggacaccggcaccagcctgctgaccggccccaccagccccatcgccaacatccagagcgacatcggcgccagcgagaacagcgacggcgacatggtggtgagctgcagcgccatcagcagcctgcccgacatcgtgttcaccatcaactag

SEQ ID NO: 178471 - DNA, 750 bp, Artificial Sequence
  derived and/or modified sequence
atgaccggcatcctgggctacgacaccgtgcaggtgggcggcatcagcgacaccaaccagatcttcggcctgagcgagaccgagcccggcagcttcctgtactacgcccccttcgacggcatcctgggcctggcctaccccagcatcagcagcagcggcgccacccccgtgttcgacaacatctggaaccagggcctggtgagccaggacctgttcagcgtgtacctgagcgccgacgacaagagcggcagcgtggtgatcttcggcggcatcgacagcagctactacaccggcagcctgaactgggtgcccgtgaccgtggagggctactggcagatcaccgtggacagcatcaccatgaacggcgagaccatcgcctgcgccgagggctgccaggccatcgtggacaccggcaccagcctgctgaccggccccaccagccccatcgccaacatccagagcgacatcggcgccagcgagaacagcgacggcgacatggtggtgagctgcagcgccatcagcagcctgcccgacatcgtgttcaccatcaacggcgtgcagtaccccgtgccccccagcgcctacatcctgcagctgcccagcgagggcagctgcatcagcggcttccagggcatgaacgtgcccaccgagagcggcgagctgtggatcctgggcgacgtgttcatcagacagtacttcaccgtgttcgacagagccaacaaccaggtgggcctggcccccgtggcctag

SEQ ID NO: 178472 - protein, 589 aa, Artificial Sequence
  derived and/or modified sequence
MAAADGDDSLYPIAVLIDELRNEDVQLRLNSIKKLSTIALALGVERTRSELLPFLTDTIYDEDEVLLALAEQLGTFTTLVGGPEYVHCLLPPLESLATVEETVVRDKAVESLRAISHEHSPSDLEAHFVPLVKRLAGGDWFTSRTSACGLFSVCYPRVSSAVKAELRQYFRNLCSDDTPMVRRAAASKLGEFAKVLELDNVKSEIIPMFSNLASDEQDSVRLLAVEACVNIAQLLPQEDLEALVMPTLRQAAEDKSWRVRYMVADKFTELQKAVGPEITKTDLVPAFQNLMKDCEAEVRAAASHKVKEFCENLSADCRENVIMSQILPCIKELVSDANQHVKSALASVIMGLSPILGKDNTIEHLLPLFLAQLKDECPEVRLNIISNLDCVNEVIGIRQLSQSLLPAIVELAEDAKWRVRLAIIEYMPLLAGQLGVEFFDEKLNSLCMAWLVDHVYAIREAATSNLKKLVEKFGKEWAHATIIPKVLAMSGDPNYLHRMTTLFCINVLSEVCGQDITTKHMLPTVLRMAGDPVANVRFNVAKSLQKIGPILDNSTLQSEVKPILEKLTQDQDVDVKYFAQEALTVLSLA

SEQ ID NO: 178473 - protein, 579 aa, Artificial Sequence
  derived and/or modified sequence
MAAADGDDSLYPIAVLIDELRNEDVQLRLNSIKKLSTIALALGVERTRSELLPFLTDTIYDEDEVLLALAEQLGTFTTLVGGPEYVHCLLPPLESLATVESLRAISHEHSPSDLEAHFVPLVKRLAGGDWFTSRTSACGLFSVCYPRVSSAVKAELRQYFRNLCSDDTPMVRRAAASKLGEFAKVLELDNVKSEIIPMFSNLASDEQDSVRLLAVEACVNIAQLLPQEDLEALVMPTLRQAAEDKSWRVRYMVADKFTELQKAVGPEITKTDLVPAFQNLMKDCEAEVRAAASHKVKEFCENLSADCRENVIMSQILPCIKELVSDANQHVKSALASVIMGLSPILGKDNTIEHLLPLFLAQLKDECPEVRLNIISNLDCVNEVIGIRQLSQSLLPAIVELAEDAKWRVRLAIIEYMPLLAGQLGVEFFDEKLNSLCMAWLVDHVYAIREAATSNLKKLVEKFGKEWAHATIIPKVLAMSGDPNYLHRMTTLFCINVLSEVCGQDITTKHMLPTVLRMAGDPVANVRFNVAKSLQKIGPILDNSTLQSEVKPILEKLTQDQDVDVKYFAQEALTVLSLA

SEQ ID NO: 178474 - protein, 156 aa, Artificial Sequence
  derived and/or modified sequence
MAAADGDDSLYPIAVLIDELRNEDVQLRLNSNLKKLVEKFGKEWAHATIIPKVLAMSGDPNYLHRMTTLFCINVLSEVCGQDITTKHMLPTVLRMAGDPVANVRFNVAKSLQKIGPILDNSTLQSEVKPILEKLTQDQDVDVKYFAQEALTVLSLA

SEQ ID NO: 178475 - protein, 534 aa, Artificial Sequence
  derived and/or modified sequence
MRTFSFASTASRSCPPSPWPLGLKGPEVSFCLSLQPPLESLATVEETVVRDKAVESLRAISHEHSPSDLEAHFVPLVKRLAGGDWFTSRTSACGLFSVCYPRVSSAVKAELRQYFRNLCSDDTPMVRRAAASKLGEFAKVLELDNVKSEIIPMFSNLASDEQDSVRLLAVEACVNIAQLLPQEDLEALVMPTLRQAAEDKSWRVRYMVADKFTELQKAVGPEITKTDLVPAFQNLMKDCEAEVRAAASHKVKEFCENLSADCRENVIMSQILPCIKELVSDANQHVKSALASVIMGLSPILGKDNTIEHLLPLFLAQLKDECPEVRLNIISNLDCVNEVIGIRQLSQSLLPAIVELAEDAKWRVRLAIIEYMPLLAGQLGVEFFDEKLNSLCMAWLVDHVYAIREAATSNLKKLVEKFGKEWAHATIIPKVLAMSGDPNYLHRMTTLFCINVLSEVCGQDITTKHMLPTVLRMAGDPVANVRFNVAKSLQKIGPILDNSTLQSEVKPILEKLTQDQDVDVKYFAQEALTVLSLA

SEQ ID NO: 178476 - DNA, 1770 bp, Artificial Sequence
  derived and/or modified sequence
atggccgccgccgacggcgacgacagcctgtaccccatcgccgtgctgatcgacgagctgagaaacgaggacgtgcagctgagactgaacagcatcaagaagctgagcaccatcgccctggccctgggcgtggagagaaccagaagcgagctgctgcccttcctgaccgacaccatctacgacgaggacgaggtgctgctggccctggccgagcagctgggcaccttcaccaccctggtgggcggccccgagtacgtgcactgcctgctgccccccctggagagcctggccaccgtggaggagaccgtggtgagagacaaggccgtggagagcctgagagccatcagccacgagcacagccccagcgacctggaggcccacttcgtgcccctggtgaagagactggccggcggcgactggttcaccagcagaaccagcgcctgcggcctgttcagcgtgtgctaccccagagtgagcagcgccgtgaaggccgagctgagacagtacttcagaaacctgtgcagcgacgacacccccatggtgagaagagccgccgccagcaagctgggcgagttcgccaaggtgctggagctggacaacgtgaagagcgagatcatccccatgttcagcaacctggccagcgacgagcaggacagcgtgagactgctggccgtggaggcctgcgtgaacatcgcccagctgctgccccaggaggacctggaggccctggtgatgcccaccctgagacaggccgccgaggacaagagctggagagtgagatacatggtggccgacaagttcaccgagctgcagaaggccgtgggccccgagatcaccaagaccgacctggtgcccgccttccagaacctgatgaaggactgcgaggccgaggtgagagccgccgccagccacaaggtgaaggagttctgcgagaacctgagcgccgactgcagagagaacgtgatcatgagccagatcctgccctgcatcaaggagctggtgagcgacgccaaccagcacgtgaagagcgccctggccagcgtgatcatgggcctgagccccatcctgggcaaggacaacaccatcgagcacctgctgcccctgttcctggcccagctgaaggacgagtgccccgaggtgagactgaacatcatcagcaacctggactgcgtgaacgaggtgatcggcatcagacagctgagccagagcctgctgcccgccatcgtggagctggccgaggacgccaagtggagagtgagactggccatcatcgagtacatgcccctgctggccggccagctgggcgtggagttcttcgacgagaagctgaacagcctgtgcatggcctggctggtggaccacgtgtacgccatcagagaggccgccaccagcaacctgaagaagctggtggagaagttcggcaaggagtgggcccacgccaccatcatccccaaggtgctggccatgagcggcgaccccaactacctgcacagaatgaccaccctgttctgcatcaacgtgctgagcgaggtgtgcggccaggacatcaccaccaagcacatgctgcccaccgtgctgagaatggccggcgaccccgtggccaacgtgagattcaacgtggccaagagcctgcagaagatcggccccatcctggacaacagcaccctgcagagcgaggtgaagcccatcctggagaagctgacccaggaccaggacgtggacgtgaagtacttcgcccaggaggccctgaccgtgctgagcctggcctag

SEQ ID NO: 178477 - DNA, 1740 bp, Artificial Sequence
  derived and/or modified sequence
atggccgccgccgacggcgacgacagcctgtaccccatcgccgtgctgatcgacgagctgagaaacgaggacgtgcagctgagactgaacagcatcaagaagctgagcaccatcgccctggccctgggcgtggagagaaccagaagcgagctgctgcccttcctgaccgacaccatctacgacgaggacgaggtgctgctggccctggccgagcagctgggcaccttcaccaccctggtgggcggccccgagtacgtgcactgcctgctgccccccctggagagcctggccaccgtggagagcctgagagccatcagccacgagcacagccccagcgacctggaggcccacttcgtgcccctggtgaagagactggccggcggcgactggttcaccagcagaaccagcgcctgcggcctgttcagcgtgtgctaccccagagtgagcagcgccgtgaaggccgagctgagacagtacttcagaaacctgtgcagcgacgacacccccatggtgagaagagccgccgccagcaagctgggcgagttcgccaaggtgctggagctggacaacgtgaagagcgagatcatccccatgttcagcaacctggccagcgacgagcaggacagcgtgagactgctggccgtggaggcctgcgtgaacatcgcccagctgctgccccaggaggacctggaggccctggtgatgcccaccctgagacaggccgccgaggacaagagctggagagtgagatacatggtggccgacaagttcaccgagctgcagaaggccgtgggccccgagatcaccaagaccgacctggtgcccgccttccagaacctgatgaaggactgcgaggccgaggtgagagccgccgccagccacaaggtgaaggagttctgcgagaacctgagcgccgactgcagagagaacgtgatcatgagccagatcctgccctgcatcaaggagctggtgagcgacgccaaccagcacgtgaagagcgccctggccagcgtgatcatgggcctgagccccatcctgggcaaggacaacaccatcgagcacctgctgcccctgttcctggcccagctgaaggacgagtgccccgaggtgagactgaacatcatcagcaacctggactgcgtgaacgaggtgatcggcatcagacagctgagccagagcctgctgcccgccatcgtggagctggccgaggacgccaagtggagagtgagactggccatcatcgagtacatgcccctgctggccggccagctgggcgtggagttcttcgacgagaagctgaacagcctgtgcatggcctggctggtggaccacgtgtacgccatcagagaggccgccaccagcaacctgaagaagctggtggagaagttcggcaaggagtgggcccacgccaccatcatccccaaggtgctggccatgagcggcgaccccaactacctgcacagaatgaccaccctgttctgcatcaacgtgctgagcgaggtgtgcggccaggacatcaccaccaagcacatgctgcccaccgtgctgagaatggccggcgaccccgtggccaacgtgagattcaacgtggccaagagcctgcagaagatcggccccatcctggacaacagcaccctgcagagcgaggtgaagcccatcctggagaagctgacccaggaccaggacgtggacgtgaagtacttcgcccaggaggccctgaccgtgctgagcctggcctag

SEQ ID NO: 178478 - DNA, 471 bp, Artificial Sequence
  derived and/or modified sequence
atggccgccgccgacggcgacgacagcctgtaccccatcgccgtgctgatcgacgagctgagaaacgaggacgtgcagctgagactgaacagcaacctgaagaagctggtggagaagttcggcaaggagtgggcccacgccaccatcatccccaaggtgctggccatgagcggcgaccccaactacctgcacagaatgaccaccctgttctgcatcaacgtgctgagcgaggtgtgcggccaggacatcaccaccaagcacatgctgcccaccgtgctgagaatggccggcgaccccgtggccaacgtgagattcaacgtggccaagagcctgcagaagatcggccccatcctggacaacagcaccctgcagagcgaggtgaagcccatcctggagaagctgacccaggaccaggacgtggacgtgaagtacttcgcccaggaggccctgaccgtgctgagcctggcctag

SEQ ID NO: 178479 - DNA, 1605 bp, Artificial Sequence
  derived and/or modified sequence
atgagaaccttcagcttcgccagcaccgccagcagaagctgcccccccagcccctggcccctgggcctgaagggccccgaggtgagcttctgcctgagcctgcagccccccctggagagcctggccaccgtggaggagaccgtggtgagagacaaggccgtggagagcctgagagccatcagccacgagcacagccccagcgacctggaggcccacttcgtgcccctggtgaagagactggccggcggcgactggttcaccagcagaaccagcgcctgcggcctgttcagcgtgtgctaccccagagtgagcagcgccgtgaaggccgagctgagacagtacttcagaaacctgtgcagcgacgacacccccatggtgagaagagccgccgccagcaagctgggcgagttcgccaaggtgctggagctggacaacgtgaagagcgagatcatccccatgttcagcaacctggccagcgacgagcaggacagcgtgagactgctggccgtggaggcctgcgtgaacatcgcccagctgctgccccaggaggacctggaggccctggtgatgcccaccctgagacaggccgccgaggacaagagctggagagtgagatacatggtggccgacaagttcaccgagctgcagaaggccgtgggccccgagatcaccaagaccgacctggtgcccgccttccagaacctgatgaaggactgcgaggccgaggtgagagccgccgccagccacaaggtgaaggagttctgcgagaacctgagcgccgactgcagagagaacgtgatcatgagccagatcctgccctgcatcaaggagctggtgagcgacgccaaccagcacgtgaagagcgccctggccagcgtgatcatgggcctgagccccatcctgggcaaggacaacaccatcgagcacctgctgcccctgttcctggcccagctgaaggacgagtgccccgaggtgagactgaacatcatcagcaacctggactgcgtgaacgaggtgatcggcatcagacagctgagccagagcctgctgcccgccatcgtggagctggccgaggacgccaagtggagagtgagactggccatcatcgagtacatgcccctgctggccggccagctgggcgtggagttcttcgacgagaagctgaacagcctgtgcatggcctggctggtggaccacgtgtacgccatcagagaggccgccaccagcaacctgaagaagctggtggagaagttcggcaaggagtgggcccacgccaccatcatccccaaggtgctggccatgagcggcgaccccaactacctgcacagaatgaccaccctgttctgcatcaacgtgctgagcgaggtgtgcggccaggacatcaccaccaagcacatgctgcccaccgtgctgagaatggccggcgaccccgtggccaacgtgagattcaacgtggccaagagcctgcagaagatcggccccatcctggacaacagcaccctgcagagcgaggtgaagcccatcctggagaagctgacccaggaccaggacgtggacgtgaagtacttcgcccaggaggccctgaccgtgctgagcctggcctag

SEQ ID NO: 178480 - DNA, 1770 bp, Artificial Sequence
  derived and/or modified sequence
atggccgctgccgatggagatgactctctttacccaatagctgtgctgattgatgaattgagaaacgaggacgtccagcttcgcctgaattccatcaagaagttgagtactatcgccctggctttgggcgtggaaagaacccgatctgaactgttgccatttctgactgataccatttacgatgaagatgaggttttgctggcactcgccgaacagttaggcacctttactactctggtgggcgggcctgagtatgtgcattgtttattgcccccattggagagcctggcaacggtggaggagaccgttgtgcgcgacaaggcagtcgaatcattgagagcaattagccatgaacactccccaagcgacctcgaggcccacttcgtgccattggtgaagaggcttgcagggggagactggttcacctcaaggacgagcgcatgtggactgttcagtgtttgttacccccgagttagttctgctgtcaaggccgagctgagacagtattttcgtaatctctgctctgacgacacgcccatggtgcgacgggctgcagcaagtaagttgggagaatttgccaaagtgctggaactggacaacgttaaatctgagataatccccatgttcagtaatctcgccagcgacgaacaagattctgtcagattactggccgtcgaagcctgcgtgaacatcgcccaactgctaccgcaggaggatcttgaggccctggtgatgcccacgctccggcaggccgcagaggataaatcctggcgtgtgcgctacatggtggccgacaaatttacagagctacagaaggctgtcggaccagagattaccaagactgatctcgtaccggcatttcagaatttgatgaaggattgcgaggccgaagtgagagccgctgcctcccacaaagtgaaagagttctgtgaaaaccttagcgccgattgccgcgagaatgtaatcatgtcccaaatcttgccatgtatcaaggagctcgtgagtgatgcaaaccagcacgttaagagtgccctggcttccgtcataatgggcttaagtcctatcttaggtaaggacaacaccattgaacacctgctgcctttatttctggctcagttaaaagatgaatgtcccgaagtccgtctgaatattatctcaaacctagattgtgtgaatgaagttatcggcattcggcaactgtctcagtccctccttcctgccatcgttgagcttgccgaggacgcaaaatggcgcgtcaggttagctatcattgaatacatgcctctccttgcggggcagctgggcgtagagttttttgatgaaaagctgaactcgctgtgtatggcctggctggtggatcacgtctatgccatcagagaagctgctacctcaaatctcaagaagctggtcgagaaatttggcaaggaatgggcccacgctacaatcattccaaaggtgctggctatgagtggcgaccccaattacctccatcgcatgacgaccctgttttgtatcaatgtgttgagcgaggtgtgcggacaggatataacaacaaaacacatgctgccgaccgttctcagaatggccggtgatcctgtagctaatgtgagattcaacgtagccaagagtcttcagaagattggaccaatcctcgacaattccactcttcagagcgaagtgaagcctattctggagaaactcacacaggaccaggatgtggatgtcaaatatttcgcccaggaggctttgaccgttttgtcgctcgcctag

SEQ ID NO: 178481 - DNA, 1740 bp, Artificial Sequence
  derived and/or modified sequence
atggcggccgccgacggcgacgatagcctctatcctattgctgttctcatagacgaactgcgcaacgaggatgtgcagctgcgactcaactcaattaagaagttgtccactatagccttggccctcggagttgagagaacgcgctctgagctgctgccgtttctcacggacaccatctacgatgaagatgaggtgcttctggctctggccgaacaactgggcacttttaccactctcgtaggcgggccagaatacgtgcactgccttcttcctccgctcgagtctcttgcaacagtggagtcactgagggccatctcccatgaacacagcccatctgatcttgaggcccactttgtgccgttagtgaaaaggctagccggcggtgactggttcacctcacggacatccgcttgcgggttgttcagcgtgtgttatccgcgcgtatccagcgccgtgaaggccgagttgaggcagtactttagaaacctgtgtagtgatgatacccctatggtgcgtagggccgccgcttccaaactgggcgaattcgccaaagtgcttgagctggacaacgtgaaaagtgagatcattccaatgttttcaaatcttgccagcgacgagcaggacagtgtgcgcctcctggctgtagaggcgtgcgtgaacattgcacagctgctgccccaggaagatctggaagctctggtcatgccaactctgcggcaggcagcagaggataagagttggagagtccggtacatggtggccgataagtttacagaactgcagaaggcagtgggacctgaaattacaaagaccgacctcgttccagcgtttcaaaatcttatgaaggactgcgaggctgaagtacgtgccgcagcctctcataaagtcaaagaattctgcgagaatctcagtgctgactgtcgggaaaacgtgatcatgtctcagatcctcccctgcatcaaagagcttgtttccgatgccaatcagcacgttaagtccgctctggcgagcgtaattatgggcctatctcctattctcgggaaggataacaccattgagcacttacttcctctgttcttagcgcagcttaaagatgagtgtcccgaggtgcgccttaacataatctctaacctcgactgcgtgaacgaggtgatcgggatccgccagcttagccagagcttgctgcccgcaattgtggaactcgcagaagacgctaaatggagggtgcgcctggcaataatagagtacatgccactgctggctggacagttgggggtggagttttttgacgagaaattaaattctctttgtatggcctggctcgtggaccacgtgtacgcgatacgcgaggcggctacttccaacctcaaaaagcttgtggaaaagttcggcaaggagtgggcacacgccaccattatccctaaggttctggccatgtccggcgacccgaactacctgcacaggatgaccacgttgttctgtattaatgtactctccgaggtgtgcggccaggacattaccacgaagcatatgcttcctacagtgctcaggatggctggcgacccagtggcgaacgttcgtttcaacgttgccaaatcactgcagaagataggacctatcctcgacaactctacccttcagagcgaggtcaagccaatactcgagaaactaactcaggaccaggacgtagacgtgaaatactttgctcaggaggcgcttacggttctgagtctggcatag

SEQ ID NO: 178482 - DNA, 471 bp, Artificial Sequence
  derived and/or modified sequence
atggctgctgccgatggggatgatagtttgtaccccatcgcagtgcttattgacgagctaaggaacgaggacgtacagcttcgtttgaatagcaatcttaagaagctcgttgaaaagttcgggaaagagtgggctcatgctaccattataccgaaagttctggctatgagtggcgatcccaactacctccaccggatgacaacactgttctgcatcaatgtgctgagcgaggtgtgtgggcaagatatcaccaccaaacacatgctgccaactgtgctaaggatggctggcgaccctgtggccaacgtccggttcaacgtcgccaagagcttgcagaagatcggtccaattctcgacaactctacactccagagtgaggtgaaaccgatcctggaaaaacttacacaggatcaggacgttgacgtgaagtatttcgcccaagaggctctcacagtcctatctttagcatag

SEQ ID NO: 178483 - DNA, 1605 bp, Artificial Sequence
  derived and/or modified sequence
atgcggactttttcttttgcttcaaccgcttcacggtcttgtcctccttcaccatggccactgggcttgaaaggacctgaggtgtccttttgcctcagcctccagcctccactggagtcccttgccaccgtcgaagagactgttgtgagggataaggctgtggagagcctaagggccataagccacgaacacagtccatctgacctggaggcacacttcgttcctcttgttaagaggctcgcaggcggggattggtttacctcacgcaccagcgcatgtgggctgttcagtgtgtgctacccacgcgtgagctctgccgtcaaggcggagctcagacagtacttccggaacctctgttcagatgacacccctatggttaggcgggcagctgctagcaagcttggagagtttgccaaagtgctggagcttgacaacgtgaaatctgagattatccctatgttttccaacctcgctagcgatgaacaggacagcgtgcgtcttctcgcagtggaagcctgtgtgaatatagcccagttgctgccccaagaagatctagaagctctcgttatgcccactttgcgccaggcggcggaggacaaatcctggagagtgaggtatatggtggctgataagttcacagaactgcagaaggccgtgggcccagagataactaagacggatctggtccctgcatttcagaacctgatgaaagattgcgaggcggaggtgagagcggcagcctcccataaggtgaaggagttttgcgaaaacctttctgccgactgccgcgaaaacgtgatcatgtctcagatcctcccatgtatcaaggaactcgtgtcggatgctaaccagcacgttaagtccgcccttgctagcgtgatcatgggtctgagccccattctcggtaaagataataccatcgaacatttactgcccttatttcttgcccagctgaaggacgaatgtcccgaagtgagactgaatattatcagcaacctggactgcgttaatgaagtcattggtattaggcaactgagccagtcactcctgcctgcgatcgtggaactggcagaggacgcgaagtggcgggttagactggccattatcgaatacatgcctctactcgcaggccagttgggggtggagttcttcgatgagaagttaaattctctctgtatggcgtggctggtggatcatgtctatgctatacgggaagccgcaacctctaacctaaaaaaattggtggaaaaatttggaaaagagtgggcccacgcgaccatcatcccaaaggtgctggccatgtcaggggatcccaactacctacatcgtatgaccaccctgttctgcatcaatgttttgagcgaagtatgtgggcaggacattactacaaagcacatgttgcccacagtcctgcggatggctggagatccggtggccaacgtgcgctttaatgtcgccaagagtctgcagaagataggcccgatactcgataacagtacactgcagagcgaagttaaacccatcctggagaagctcacccaagatcaggacgtggacgtaaagtacttcgcccaggaggccttgactgtactatctctagcctag

SEQ ID NO: 178484 - DNA, 1770 bp, Artificial Sequence
  derived and/or modified sequence
atggctgctgctgatggagatgacagcctgtaccccatcgctgtgctgattgatgagctgagaaatgaagatgtgcagctgcggctgaacagcatcaagaagctgagcaccatcgccctggccctgggcgtggagaggaccaggtctgagctgctgcccttcctgacagacaccatctatgatgaagatgaggtgctgctggccctggccgagcagctgggcaccttcaccaccctggtgggcggcccagaatatgtgcactgcctgctgccccccctggagagcctggccaccgtggaggagaccgtggtgcgggacaaggctgtggagagcctgcgggccatcagccatgagcacagccccagcgacctggaggcccactttgtgcccctggtgaagaggctggccggcggggactggttcaccagcaggaccagcgcctgtggcctcttctctgtgtgctacccccgggtgagcagcgctgtgaaggccgagctgcggcagtacttcaggaacctgtgcagtgatgacacccccatggtgcggcgggctgctgccagcaagctgggggagtttgccaaggtgctggagctggacaacgtgaagtctgagatcatccccatgttcagcaacctggccagtgatgagcaggacagcgtgcggctgctggccgtggaggcctgtgtgaacatcgcccagctgctgccccaggaggacctggaggccctggtgatgcccaccctgcggcaggccgctgaggacaagtcctggagggtgcgctacatggtggccgacaagttcacagagctgcagaaggctgtgggccctgagatcaccaagacagacctggtgcctgccttccagaacctgatgaaggactgtgaggccgaggtgcgggctgctgccagccacaaggtgaaggagttctgtgagaacctgtctgctgactgcagagaaaatgtcatcatgagccagatcctgccctgcatcaaggagctggtgtctgatgccaaccagcacgtgaagagcgccctggccagcgtcatcatgggcctgagccccatcctgggcaaggacaacaccatcgagcacctgctgcccctcttcctggcccagctgaaggatgagtgcccagaggtgcggctgaacatcatcagcaacctggactgtgtgaatgaggtgattggcatccggcagctgagccagagcctgctgcctgccatcgtggagctggctgaagatgccaagtggagggtgcggctggccatcatcgagtacatgcccctgctggccggccagctgggcgtggagttctttgatgagaagctgaacagcctgtgcatggcctggctggtggaccacgtgtatgccatccgggaggccgccaccagcaacctgaagaagctggtggagaagtttgggaaggagtgggcccacgccaccatcatccccaaggtgctggccatgtctggggaccccaactacctgcacaggatgaccaccctcttctgcatcaacgtgctgtctgaggtgtgtggccaggacatcaccaccaagcacatgctgcccaccgtgctgaggatggccggggaccctgtggccaacgtgcgcttcaacgtggccaagagcctgcagaagattggccccatcctggacaacagcaccctgcagagcgaggtgaagcccatcctggagaagctgacccaggaccaggatgtggatgtgaagtactttgcccaggaggccctgactgtgctgagcctggcctag

SEQ ID NO: 178485 - DNA, 1740 bp, Artificial Sequence
  derived and/or modified sequence
atggctgctgctgatggagatgacagcctgtaccccatcgctgtgctgattgatgagctgagaaatgaagatgtgcagctgcggctgaacagcatcaagaagctgagcaccatcgccctggccctgggcgtggagaggaccaggtctgagctgctgcccttcctgacagacaccatctatgatgaagatgaggtgctgctggccctggccgagcagctgggcaccttcaccaccctggtgggcggcccagaatatgtgcactgcctgctgccccccctggagagcctggccaccgtggagagcctgcgggccatcagccatgagcacagccccagcgacctggaggcccactttgtgcccctggtgaagaggctggccggcggggactggttcaccagcaggaccagcgcctgtggcctcttctctgtgtgctacccccgggtgagcagcgctgtgaaggccgagctgcggcagtacttcaggaacctgtgcagtgatgacacccccatggtgcggcgggctgctgccagcaagctgggggagtttgccaaggtgctggagctggacaacgtgaagtctgagatcatccccatgttcagcaacctggccagtgatgagcaggacagcgtgcggctgctggccgtggaggcctgtgtgaacatcgcccagctgctgccccaggaggacctggaggccctggtgatgcccaccctgcggcaggccgctgaggacaagtcctggagggtgcgctacatggtggccgacaagttcacagagctgcagaaggctgtgggccctgagatcaccaagacagacctggtgcctgccttccagaacctgatgaaggactgtgaggccgaggtgcgggctgctgccagccacaaggtgaaggagttctgtgagaacctgtctgctgactgcagagaaaatgtcatcatgagccagatcctgccctgcatcaaggagctggtgtctgatgccaaccagcacgtgaagagcgccctggccagcgtcatcatgggcctgagccccatcctgggcaaggacaacaccatcgagcacctgctgcccctcttcctggcccagctgaaggatgagtgcccagaggtgcggctgaacatcatcagcaacctggactgtgtgaatgaggtgattggcatccggcagctgagccagagcctgctgcctgccatcgtggagctggctgaagatgccaagtggagggtgcggctggccatcatcgagtacatgcccctgctggccggccagctgggcgtggagttctttgatgagaagctgaacagcctgtgcatggcctggctggtggaccacgtgtatgccatccgggaggccgccaccagcaacctgaagaagctggtggagaagtttgggaaggagtgggcccacgccaccatcatccccaaggtgctggccatgtctggggaccccaactacctgcacaggatgaccaccctcttctgcatcaacgtgctgtctgaggtgtgtggccaggacatcaccaccaagcacatgctgcccaccgtgctgaggatggccggggaccctgtggccaacgtgcgcttcaacgtggccaagagcctgcagaagattggccccatcctggacaacagcaccctgcagagcgaggtgaagcccatcctggagaagctgacccaggaccaggatgtggatgtgaagtactttgcccaggaggccctgactgtgctgagcctggcctag

SEQ ID NO: 178486 - DNA, 471 bp, Artificial Sequence
  derived and/or modified sequence
atggctgctgctgatggagatgacagcctgtaccccatcgctgtgctgattgatgagctgagaaatgaagatgtgcagctgcggctgaacagcaacctgaagaagctggtggagaagtttgggaaggagtgggcccacgccaccatcatccccaaggtgctggccatgtctggggaccccaactacctgcacaggatgaccaccctcttctgcatcaacgtgctgtctgaggtgtgtggccaggacatcaccaccaagcacatgctgcccaccgtgctgaggatggccggggaccctgtggccaacgtgcgcttcaacgtggccaagagcctgcagaagattggccccatcctggacaacagcaccctgcagagcgaggtgaagcccatcctggagaagctgacccaggaccaggatgtggatgtgaagtactttgcccaggaggccctgactgtgctgagcctggcctag

SEQ ID NO: 178487 - DNA, 1605 bp, Artificial Sequence
  derived and/or modified sequence
atgaggaccttctcctttgccagcacagccagccgcagctgcccccccagcccctggcccctgggcctgaagggccctgaggtgtccttctgcctgagcctgcagccccccctggagagcctggccaccgtggaggagaccgtggtgcgggacaaggctgtggagagcctgcgggccatcagccatgagcacagccccagcgacctggaggcccactttgtgcccctggtgaagaggctggccggcggggactggttcaccagcaggaccagcgcctgtggcctcttctctgtgtgctacccccgggtgtcctctgctgtgaaggccgagctgcggcagtacttcaggaacctgtgcagtgatgacacccccatggtgagaagagctgctgccagcaagctgggggagtttgccaaggtgctggagctggacaacgtgaagtctgagatcatccccatgttcagcaacctggccagtgatgagcaggacagcgtgcggctgctggccgtggaggcctgtgtgaacatcgcccagctgctgccccaggaggacctggaggccctggtgatgcccaccctgcggcaggccgctgaggacaagtcctggagggtgcgctacatggtggccgacaagttcacagagctgcagaaggctgtgggccctgagatcaccaagacagacctggtgcctgccttccagaacctgatgaaggactgtgaggccgaggtgcgggccgccgccagccacaaggtgaaggagttctgtgagaacctgtctgctgactgccgggagaatgtcatcatgagccagatcctgccctgcatcaaggagctggtgtctgatgccaaccagcacgtgaagagcgccctggccagcgtcatcatgggcctgagccccatcctgggcaaggacaacaccatcgagcacctgctgcccctcttcctggcccagctgaaggatgaatgtcctgaggtgcggctgaacatcatcagcaacctggactgtgtgaatgaagtcatcggcatccggcagctgagccagagcctgctgcctgccatcgtggagctggccgaggatgccaagtggagggtgcggctggccatcatcgagtacatgcccctgctggccggccagctgggcgtggagttctttgatgagaagctgaacagcctgtgcatggcctggctggtggaccacgtgtatgccatccgggaggccgccaccagcaacctgaagaagctggtggagaagtttgggaaggagtgggcccacgccaccatcatccccaaggtgctggccatgtctggggaccccaactacctgcacaggatgaccaccctcttctgcatcaacgtgctgtctgaggtgtgtggccaggacatcaccaccaagcacatgctgcccaccgtgctgaggatggccggggaccctgtggccaacgtgcgcttcaacgtggccaagagcctgcagaagattggccccatcctggacaacagcaccctgcagagcgaggtgaagcccatcctggagaagctgacccaggaccaggatgtggatgtgaagtactttgcccaggaggccctgactgtgctgagcctggcctag

SEQ ID NO: 178488 - DNA, 1770 bp, Artificial Sequence
  derived and/or modified sequence
atggccgccgccgacggcgacgacagcctgtaccccatcgccgtgctgatcgacgaactccggaatgaggacgttcaactgagactgaattcgatcaaaaaattatccacgatcgctctggcgctcggggtggagcgcacccggtccgaacttctgccgtttttgacggacaccatttatgatgaggacgaggtgctcctagccctggccgaacagctcggtacattcactaccctcgtgggtgggccggaatatgtccactgtctgttgcctcctctggaaagcctcgccaccgtagaggagacagttgtgcgggataaggctgttgaatcgttaagggctattagtcacgagcacagtcccagtgatttagaggcccatttcgtcccactggtgaagcggctggccggcggagattggttcacgtccagaactagtgcgtgcggcctattttccgtatgctacccacgcgtctcttccgcggtaaaagcagagctgcgccaatatttcagaaacctgtgctccgacgatactcccatggtgagaagggccgccgcctccaagctgggagagttcgccaaagtgctggaactcgacaatgttaaaagcgaaattatccccatgttctcgaacctggccagcgatgagcaggactctgtgaggctgcttgctgtggaagcctgcgtgaatatcgctcagctactgccccaggaggatctggaggccttagtgatgcccactctacgacaggccgccgaagacaaatcctggcgcgtgcggtacatggtcgctgacaagtttaccgagctgcagaaggccgtcggacctgagatcactaaaacagacctcgtaccggctttccagaaccttatgaaggattgtgaggctgaagtgagggccgctgccagccacaaagtcaaagaattctgcgaaaatttatctgcggactgtagagagaacgttatcatgtcgcagatcctgccctgtatcaaagaattagttagcgatgccaaccagcatgtgaaaagtgctctcgctagtgtcattatgggacttagtccaattctcggtaaagacaacacaatcgagcacctgctgccactcttccttgcccaactgaaggatgaatgccccgaggttcgtctcaatattatctctaacctcgattgcgtaaatgaggttattgggataaggcagctatctcagagtctattaccagcgatcgtggagttggcggaggacgcaaagtggagagtccggttagccatcattgaatatatgcctctcttggctggccaactgggtgttgagtttttcgatgaaaagctgaattcgttgtgcatggcttggttggtagaccacgtttacgcaatcagagaggccgccacaagcaacctcaaaaagttggtagagaaattcggaaaggagtgggcccacgctacgatcataccaaaagtgttggccatgtccggcgacccaaactacctgcaccgaatgacgaccctcttctgtattaatgtactatccgaagtgtgtggacaggacatcacaactaagcatatgttgcccaccgtcctgagaatggcgggcgaccccgtagccaatgtgagattcaacgtcgccaagagtctgcagaaaatcggccccatcttggataattctactctccagtccgaggtgaagccgatactggagaagctgacgcaggatcaagacgtggacgtgaagtacttcgcgcaggaggccctgactgtgctgtcactcgcttag

SEQ ID NO: 178489 - DNA, 1740 bp, Artificial Sequence
  derived and/or modified sequence
atggccgccgccgacggcgacgacagcctgtaccccatcgccgtgctgattgatgagctgcgtaacgaggatgtgcagctgagactgaattcaattaaaaagctgtcaactatcgcactggcactgggagtcgagcggactcgttccgagctgctgccattcttaaccgataccatctatgacgaagacgaagttctgctggccttagctgaacaactgggcacctttacgaccttggtgggcggtcctgaatatgtccactgcctcctgccgcctctggagagcctagccaccgtggaatctctccgcgccataagccacgagcattctccaagcgacttggaagcacacttcgtgcccctcgtgaagcgactggctgggggcgactggttcacatctcggacatctgcttgtggcctcttctctgtgtgctacccacgcgtgagctcagcagtcaaagcagaattgcgccagtactttcggaatctgtgctccgatgacacgccaatggtaaggcgagccgccgcaagtaaactcggggaatttgcaaaagtgttggagctggataatgtgaaaagcgagattatccccatgtttagcaacttagcaagcgacgagcaagactccgttagactgctcgctgttgaggcatgcgtgaatatcgcccaactgctcccccaggaagacctcgaggctctggtgatgcccaccctgaggcaggctgcggaggataagagttggcgagtaagatacatggttgctgacaagttcaccgagttgcagaaagcagtcggacctgagattactaagactgatttagttccagccttccaaaacctgatgaaggactgtgaagccgaggtgcgggcagctgcgtctcataaggtgaaagagttctgcgaaaatctgtccgctgactgccgggagaatgtgataatgagtcaaatcttgccctgcataaaagagctagtctcagacgcgaaccagcatgttaagagcgctctcgctagcgtcattatgggcctgagccccatacttgggaaggataatactattgaacacttgctgccgctgtttctggcccagctgaaagacgaatgccctgaggttagactcaacattatcagcaatctggattgtgtgaatgaggtcattggtattaggcagttgagccagagtctgctgcctgcaattgtcgagctcgccgaggacgctaagtggagggtccgactggccattattgaatacatgcccctgttggctggccagctgggcgtggagtttttcgatgaaaaattaaacagcctgtgcatggcctggctggtggaccacgtttacgccatcagggaggcagctacttcgaacctgaagaaactcgttgagaaattcggaaaggaatgggcacacgcgactatcataccaaaagttctggccatgagcggcgacccgaattacctccacagaatgactaccctattttgtatcaacgtgttgagcgaagtgtgcggacaggatattaccaccaagcacatgctgcctactgtgctgagaatggccggcgatcctgtggccaacgtgcggttcaacgttgctaaatctttgcagaagatcggcccaattctggataacagcactctgcagagtgaggtgaagcccattctcgaaaagcttacccaggatcaagatgtggacgtgaaatattttgctcaggaagccttgacggtcctttccctggcctag

SEQ ID NO: 178490 - DNA, 471 bp, Artificial Sequence
  derived and/or modified sequence
atggccgccgccgacggcgacgacagcctgtaccccatcgccgtgcttatcgatgagctgcgaaatgaagacgtgcagcttagattaaatagcaatctcaagaagctcgttgaaaagtttggaaaggagtgggcccacgcgaccattattcctaaagtgcttgccatgagcggcgatcccaattacctgcaccggatgacgaccctgttttgtatcaacgtactgtcagaagtgtgcggacaagatattaccacgaagcacatgctgcctacagttcttcggatggccggggatccagtggcaaatgttcgattcaatgtggccaaaagcttgcagaagataggtcctatcctggataattccacactacaatcagaggtaaagccaattttggaaaaactcacacaggatcaagacgtggatgtgaagtatttcgcacaggaagcactaacagtgctgtctctggcttag

SEQ ID NO: 178491 - DNA, 1605 bp, Artificial Sequence
  derived and/or modified sequence
atgcggaccttcagcttcgccagcaccgccagccggagctgccccccaagtccctggccccttggcctcaagggaccggaggtttcgttctgtctctcgctccagccccctctggaatctttagctactgtggaagaaactgtggttcgggataaggccgtcgagtccctgcgagccatctcacatgagcatagccctagcgatctggaggcgcacttcgtgcccctggtcaagagattggccggcggagactggtttacctcaaggacaagcgcttgcggcctcttcagtgtctgttacccacgggtgtcatcagctgtgaaggcagaactgcgccagtattttcgaaacctgtgctctgacgatacgcctatggtcagacgcgcagcagcctctaaactcggcgagtttgcaaaggtgctcgagctcgacaatgtgaaatccgagataatacctatgttcagcaaccttgcaagtgatgaacaggacagtgtccgattattggcagtggaggcctgtgtgaatatcgcccagctgctcccacaggaagacctagaggctctggtgatgccaaccctgcggcaagcagcggaggacaagtcctggagggttcggtatatggtggccgacaagttcacagaactgcagaaagccgtcggaccggagatcactaagaccgatcttgtgccagcgttccagaacctcatgaaagattgcgaggctgaggtccgcgctgccgcctcccacaaggtgaaggagttctgcgaaaacctcagtgctgattgtcgggagaacgtgataatgtctcagattctgccttgtatcaaggaactggtgtcagacgccaaccagcatgtgaagagtgcattggcttctgtgatcatgggtctcagcccaatcttgggaaaggacaacactattgaacatttactgccgctgtttctcgcccaactgaaggacgaatgcccagaggtacgcctgaatataataagtaacctcgattgtgtcaatgaggtgatcgggatccggcagttgtcacaatctctgttgcctgctatcgttgagctagcggaagatgcaaaatggcgtgtcagattagccatcatcgaatacatgcctctgctcgccggacaactgggggtggagtttttcgacgaaaaattaaattccctctgtatggcgtggctagtagaccacgtatacgcaattagagaggccgctacatctaatctgaaaaagctggttgagaagtttggtaaggagtgggcccacgctactattatcccaaaagtgctggcaatgagcggcgacccaaactaccttcatcgcatgaccacattattctgtatcaacgtcctctccgaggtgtgtggtcaggacatcacaaccaagcacatgcttcctaccgtgctgagaatggcaggagatccagtcgccaacgtgagattcaatgtggcaaaatcactgcagaaaattggacccatattggataattcaacacttcagtcagaagttaaacctattttggaaaagctaactcaggaccaggatgtcgacgtgaagtattttgcacaggaggctttgacagtcttgtcgcttgcctag

SEQ ID NO: 178492 - DNA, 1770 bp, Artificial Sequence
  derived and/or modified sequence
atggcagcggctgatggtgatgactccctttatcctatagctgtgctaattgacgaattacgcaacgaggacgtgcagcttcgactaaattcaatcaaaaaactctccacgatcgccctggctctgggggtggagagaactcgctccgaactgttgccttttcttacagataccatatatgatgaagatgaagtcttactggctcttgccgagcagttaggcactttcacgacccttgtgggaggcccagaatacgtgcactgcctgcttccacccctggaaagcctcgccaccgttgaagagactgtggtacgcgataaggctgtggagtctctgagggccatcagccatgagcactctccttctgatctggaggcccacttcgtcccactcgtgaagagactggccggtggggactggtttacatcccgcacaagcgcttgcggcctctttagcgtgtgctatccaagagtttcttcagctgtaaaagcagaacttcgacagtactttcgaaatctctgctccgatgacacacccatggtgcgcagggctgccgcttcaaagctgggcgagtttgcaaaagtactcgagctcgataatgtgaagtctgagatcattccgatgttctcaaacctcgcctccgacgaacaggattccgtcagactgctggccgtcgaggcttgtgttaatattgcccagctactcccccaagaagacctggaggctttagttatgccaactctgagacaggccgctgaagataaaagctggcgcgttcggtacatggttgctgataaattcacagaactgcaaaaagctgttggtccagaaatcactaagactgacctagtacccgctttccagaatctgatgaaagattgcgaggccgaggtgagggccgcagcttcccataaggtgaaggagttttgtgaaaatttgagcgcagactgtagagaaaatgtgataatgagccagattctgccctgtattaaggagctggtttcggacgcaaatcagcatgtcaaaagcgcactggcatcggttatcatgggactctcacccattctcggcaaggataatactatcgagcatttgctaccattattcttggcccagctcaaagatgagtgccctgaggttcgcctgaacatcatatccaatctcgattgcgtgaacgaagtcataggaatacgccagctttcgcagtctcttctaccagctatcgtggagcttgcggaggacgccaaatggcgagttagactagctatcattgaatacatgcctctgctggctggacagttaggggtggaatttttcgatgagaagctgaacagtctgtgtatggcatggctggtggaccacgtctatgccataagggaggccgctaccagcaatttgaagaaacttgtggagaaatttgggaaagaatgggcacacgcaaccattattccgaaggtgttggctatgagcggcgatcccaactacctacaccgaatgacaacactattctgtataaacgtgttgtccgaagtgtgtggccaagacattaccaccaagcatatgctgcccactgtgctgagaatggccggtgaccccgtggcaaacgtgaggtttaacgtcgcgaaatcactgcagaagatcggaccgatcctagataatagtaccctccaaagtgaagtgaagcccattctggagaagctcacacaagatcaggatgttgatgtcaaatacttcgcgcaagaggctcttaccgtgctgtcgctggcttag

SEQ ID NO: 178493 - DNA, 1740 bp, Artificial Sequence
  derived and/or modified sequence
atggctgctgccgatggggacgactctctctacccgatcgcagtgctcattgacgagctgagaaatgaagatgtgcagctgagacttaattccatcaaaaaattgtccaccatagccctggctctgggtgtggagaggactagaagcgaactactgccctttctgactgacaccatctacgacgaggacgaagtcttactagctttggctgaacaattgggaacattcacaaccctggtggggggacccgagtatgtgcactgcctgcttccccctcttgaaagcctcgctaccgtggaaagcctgagagctatatcacacgaacacagcccttccgacttggaggcccactttgttccactcgtaaaacgccttgccggaggtgactggttcacctctagaacttctgcttgtggccttttttccgtgtgttacccacgggtgagttcggctgtgaaagccgagttgcgccagtacttccggaacctgtgcagcgacgacacccctatggtgcggagagccgctgcttcgaagctgggggaatttgcaaaagtacttgagctcgataatgtgaagagcgagataatccctatgttctcaaatctggcttccgacgagcaggattctgtccgcctgctcgcggtggaggcctgtgtgaatattgcccagctgctgccccaggaagacctggaagccctcgtgatgccgaccttgagacaggccgctgaagacaaatcttggcgagtgaggtacatggtagcggacaaattcacggaattacagaaagcagtaggcccagagataaccaaaacagatctcgtgccagcttttcaaaatctgatgaaagactgcgaggctgaagtgagggccgcagcaagccacaaggtgaaagagttttgcgagaacctgagcgcggactgtagagagaacgtgattatgtcccagatcttgccttgcatcaaagagctggtctccgacgcgaaccaacacgtgaaatccgccctcgcctctgtgattatggggctgagccctattcttggaaaagataacactatcgaacacctgcttcctctgtttttggcccagcttaaggatgaatgcccggaggtcaggcttaatatcattagtaatttggactgcgtgaacgaggtgatcgggatccgccagctgagccagtctttattacccgctatcgtagagttggctgaggatgctaaatggcgcgtacggctggccatcattgaatacatgccactcctcgcaggccagctgggagtggagttcttcgacgagaaactgaactccctctgcatggcctggcttgtcgaccacgtgtacgccattcgcgaggccgctactagtaatttgaagaaattagtggagaagttcggcaaggagtgggcccatgccactatcattccgaaagtcctggccatgagcggagatcctaactatttacacagaatgacgacgctcttttgtatcaacgtcctaagcgaggtgtgtggtcaagatatcaccactaagcatatgctgcctaccgttttaagaatggctggtgaccccgtcgccaatgtgagattcaacgtggcaaaaagcttgcagaaaatcggccctatcctggacaattccaccctgcaatccgaggttaagcctatactggagaaactcacgcaggaccaagacgtcgacgtaaagtatttcgcccaagaggccctgacagtgcttagtcttgcctag

SEQ ID NO: 178494 - DNA, 471 bp, Artificial Sequence
  derived and/or modified sequence
atggcagccgcagacggggacgatagtttatacccaatagcggttcttattgatgaattacgcaatgaggatgttcagctccgcctaaactctaacctgaagaaattagtggagaagttcgggaaggaatgggcccatgctactatcattcccaaggtcctggcaatgagtggggatccaaattatcttcacagaatgaccaccctattttgcattaatgtcttaagcgaggtttgcggccaggacatcaccacaaagcacatgctgccaaccgtgctgcgaatggcaggagatcccgttgccaatgtgaggttcaatgttgcaaaatcgttgcagaaaatcggacctattcttgataatagtaccctgcaatccgaggtgaagcctatcctcgaaaaacttactcaggaccaggatgtggatgttaaatattttgcgcaagaagcattaacagtcctctccctggcctag

SEQ ID NO: 178495 - DNA, 1605 bp, Artificial Sequence
  derived and/or modified sequence
atgcgaacgttctcatttgcaagtacagccagccgaagctgtccgccatctccttggcccttgggactgaagggccctgaagtctcgttctgtcttagccttcagccccctctggaaagtctggccacagttgaggaaaccgtggtgagagataaagccgttgagtctctgagagcaatatcacatgagcacagtccatctgatcttgaagctcatttcgtacccctcgttaagagactcgcgggaggagactggtttacctcacgtacgtcagcctgtgggctgttcagtgtttgttaccccagggtgagctctgccgtcaaggccgagctgcggcaatatttccgcaatctctgttcagatgacacacccatggtcaggagggccgctgcaagcaagctgggtgagttcgctaaagtgctcgaactggacaacgtgaaatctgaaattatcccaatgttcagtaacctggcaagcgatgaacaagactcagtgagactgcttgcggttgaggcctgtgttaatatcgcccagcttctgcctcaggaggatctggaggcattggtcatgcccactctgcgacaggcagcagaggataagagctggcgtgtgagatacatggtggcagacaagttcactgagttgcagaaggctgtgggccctgaaataactaaaactgatctggtccccgcttttcaaaacctcatgaaggattgcgaggcggaggtcagagcagctgcatcccacaaggtaaaagagttctgcgagaacttatctgcggattgtcgggaaaacgtcatcatgtcacagatcctcccttgcattaaagagctcgtgagtgatgcaaatcagcatgttaagtcagcactggcgtcagttattatggggctgtctcctatcctagggaaggacaacacaatcgaacatctgctgccattgtttcttgcccagcttaaagatgagtgcccagaagtgagactaaatatcatctcaaatttggactgtgtcaatgaggtgatcgggatccgacaactcagtcagtccctgctccccgctattgtggaactggcagaggatgccaaatggagggtgcgcctcgcgattattgagtacatgcccttgttagcaggtcaacttggggtcgaatttttcgacgagaaacttaattccctttgtatggcttggctggtggatcacgtttacgcaataagagaggccgcaacttccaacttgaaaaagctcgtagaaaaattcggaaaggagtgggcacacgctacaattattcccaaagtgctggccatgtcgggggacccaaattacctgcacaggatgactacgttattttgtataaatgtgcttagcgaagtatgcggtcaggacattacgaccaaacacatgctgccgacagttctgcgcatggcaggagaccctgttgctaatgtgcgcttcaacgtggctaaaagcttacagaaaattggaccaatcctggacaacagcaccctccagtctgaggtgaagcctatcctcgaaaagctcacacaggaccaggacgtggacgtgaagtacttcgcccaagaggccttgaccgtcctttccctcgcatag

SEQ ID NO: 178496 - DNA, 3281 bp, Artificial Sequence
  derived and/or modified sequence
ccccccacgtttcagcacagcgctggccgcagtctgacaggaaagggacggagccaagatggcggcggccgacggcgacgactcgctgtaccccatcgcggtgctcatagacgaactccgcaatgaggacgttcagcttcgcctcaacagcatcaagaagctgtccaccatcgccttggcccttggggttgaaaggacccgaagtgagcttctgcctttccttacagataccatctatgatgaagatgaggtcctcctggccctggcagaacagctgggaaccttcactaccctggtgggaggcccagagtacgtgcactgcctgctgccaccgctggagtcgctggccacagtggaggagacagtggtgcgggacaaggcagtggagtccttacgggccatctcacacgagcactcgccctctgacctggaggcgcactttgtgccgctagtgaagcggctggcgggcggcgactggttcacctcccgcacctcggcctgcggcctcttctccgtctgctacccccgagtgtccagtgctgtgaaggcggaacttcgacagtacttccggaacctgtgctcagatgacacccccatggtgcggcgggccgcagcctccaagctgggggagtttgccaaggtgctggagctggacaacgtcaagagtgagatcatccccatgttctccaacctggcctctgacgagcaggactcggtgcggctgctggcggtggaggcgtgcgtgaacatcgcccagcttctgccccaggaggatctggaggccctggtgatgcccactctgcgccaggccgctgaagacaagtcctggcgcgtccgctacatggtggctgacaagttcacagagctccagaaagcagtggggcctgagatcaccaagacagacctggtccctgccttccagaacctgatgaaagactgtgaggccgaggtgagggccgcagcctcccacaaggtcaaagagttctgtgaaaacctctcagctgactgtcgggagaatgtgatcatgtcccagatcttgccctgcatcaaggagctggtgtccgatgccaaccaacatgtcaagtctgccctggcctcagtcatcatgggtctctctcccatcttgggcaaagacaacaccatcgagcacctcttgcccctcttcctggctcagctgaaggatgagtgccctgaggtacggctgaacatcatctctaacctggactgtgtgaacgaggtgattggcatccggcagctgtcccagtccctgctccctgccattgtggagctggctgaggacgccaagtggcgggtgcggctggccatcattgagtacatgcccctcctggctggacagctgggagtggagttctttgatgagaaacttaactccttgtgcatggcctggcttgtggatcatgtatatgccatccgcgaggcagccaccagcaacctgaagaagctagtggaaaagtttgggaaggagtgggcccatgccacaatcatccccaaggtcttggccatgtccggagaccccaactacctgcaccgcatgactacgctcttctgcatcaatgtgctgtctgaggtctgtgggcaggacatcaccaccaagcacatgctacccacggttctgcgcatggctggggacccggttgccaatgtccgcttcaatgtggccaagtctctgcagaagatagggcccatcctggacaacagcaccttgcagagtgaagtcaagcccatcctagagaagctgacccaggaccaggatgtggacgtcaaatactttgcccaggaggctctgactgttctgtctctcgcctgatgctggaagaggagcaaacactggcctctggtgtccaccctccaacccccacaagtccctctttggggagacactggggggcctttggctgtcactccctgtgcatggtctgaccccaggccccttcccccagcacggttcctcctctccccagcctgggaagatgtctcactgtccacctcccaacgggctaggggagcacggggttggacaggacagtgaccttgggaggaaggggctactccgcccacgtcagggagagatgtgagcatcccgggtcactggatcctgctgctgtaatgggaacccctcccccatttacttctccacctcccgtcctccccatcattggtttttttttgtgtgtcaactgtgccgtttttattttattccttttattttcccccttttcacagagaaataaaggtctagaagtagttggtcctctggccttagtcatcagcttggaggagggggcaccaccccagagccacaacatctgcgcttttctctggagaagatcttgttacaggacccattatacccctatgtcccgaaagaatactctggggatccccccaggagtgctgctggcctttggggtagagggtccatgaggtgctctgggtggtgtcctgtagtgcagttcagattcatagatgtcggccgagtatttggggggttaagagcaggtgccttggaaccagactgcctgggtccaaattgtggctccttcagttaatagacgtgtgactaggagtagcttgttaagtctttatgagctcagttttgtattgtgtaaaatgagagttacagtaatacctagattgcagggtgggtggcgaggaccaagtgaattagtacctggaaagtgtgtaacagtttcaacatgagaagtacacaacatgagaagcagagttagctgtacattgccagagaaccccctgtgggccatttcctgtgttcttgaagaagacttgggcttggaccctgtccccaggaggtctcagagtaatcaggacggtactagggagagaactgtggcaagatagatcagttatctcggtatctattctccccttcctaatgtagaagctctgatttttaactgggcagatgactacatggattcaaggtattttcctagtgtctcttgaaattaggtgtggtattgtgaccaaattctagccaaaaagatgttgaacagaagtggtatatgcagcttctaggaagtgttcttaagggggaaggcgtcatcccccacctttcctccttcctgcactctggaatgtggaccagatggctggagtaggagctgccacctggggccagaaaatgatcttaggcgtgaaggtcaagtaaggcaggacaagagagaaggagcctgcctccccgaggctgtgaagagccatgccagtactgtcacctgggagaattaaactggtcaagtgcc

SEQ ID NO: 178497 - DNA, 1896 bp, Artificial Sequence
  derived and/or modified sequence
cttctcccagcattgccccccccacgtttcagcacagcgctggccgcagtctgacaggaaagggacggagccaagatggcggcggccgacggcgacgactcgctgtaccccatcgcggtgctcatagacgaactccgcaatgaggacgttcagcttcgcctcaacagcatcaagaagctgtccaccatcgccttggcccttggggttgaaaggacccgaagtgagcttctgcctttccttacagataccatctatgatgaagatgaggtcctcctggccctggcagaacagctgggaaccttcactaccctggtgggaggcccagagtacgtgcactgcctgctgccaccgctggagtcgctggccacagtggagtccttacgggccatctcacacgagcactcgccctctgacctggaggcgcactttgtgccgctagtgaagcggctggcgggcggcgactggttcacctcccgcacctcggcctgcggcctcttctccgtctgctacccccgagtgtccagtgctgtgaaggcggaacttcgacagtacttccggaacctgtgctcagatgacacccccatggtgcggcgggccgcagcctccaagctgggggagtttgccaaggtgctggagctggacaacgtcaagagtgagatcatccccatgttctccaacctggcctctgacgagcaggactcggtgcggctgctggcggtggaggcgtgcgtgaacatcgcccagcttctgccccaggaggatctggaggccctggtgatgcccactctgcgccaggccgctgaagacaagtcctggcgcgtccgctacatggtggctgacaagttcacagagctccagaaagcagtggggcctgagatcaccaagacagacctggtccctgccttccagaacctgatgaaagactgtgaggccgaggtgagggccgcagcctcccacaaggtcaaagagttctgtgaaaacctctcagctgactgtcgggagaatgtgatcatgtcccagatcttgccctgcatcaaggagctggtgtccgatgccaaccaacatgtcaagtctgccctggcctcagtcatcatgggtctctctcccatcttgggcaaagacaacaccatcgagcacctcttgcccctcttcctggctcagctgaaggatgagtgccctgaggtacggctgaacatcatctctaacctggactgtgtgaacgaggtgattggcatccggcagctgtcccagtccctgctccctgccattgtggagctggctgaggacgccaagtggcgggtgcggctggccatcattgagtacatgcccctcctggctggacagctgggagtggagttctttgatgagaaacttaactccttgtgcatggcctggcttgtggatcatgtatatgccatccgcgaggcagccaccagcaacctgaagaagctagtggaaaagtttgggaaggagtgggcccatgccacaatcatccccaaggtcttggccatgtccggagaccccaactacctgcaccgcatgactacgctcttctgcatcaatgtgctgtctgaggtctgtgggcaggacatcaccaccaagcacatgctacccacggttctgcgcatggctggggacccggttgccaatgtccgcttcaatgtggccaagtctctgcagaagatagggcccatcctggacaacagcaccttgcagagtgaagtcaagcccatcctagagaagctgacccaggaccaggatgtggacgtcaaatactttgcccaggaggctctgactgttctgtctctcgcctgatgctggaagaggagcaaacactggcctctggtgtccaccctccaacccccacaagtccctctttggggagacactgggggg

SEQ ID NO: 178498 - DNA, 948 bp, Artificial Sequence
  derived and/or modified sequence
cagcgctggccgcagtctgacaggaaagggacggagccaagatggcggcggccgacggcgacgactcgctgtaccccatcgcggtgctcatagacgaactccgcaatgaggacgttcagcttcgcctcaacagcaacctgaagaagctagtggaaaagtttgggaaggagtgggcccatgccacaatcatccccaaggtcttggccatgtccggagaccccaactacctgcaccgcatgactacgctcttctgcatcaatgtgctgtctgaggtctgtgggcaggacatcaccaccaagcacatgctacccacggttctgcgcatggctggggacccggttgccaatgtccgcttcaatgtggccaagtctctgcagaagatagggcccatcctggacaacagcaccttgcagagtgaagtcaagcccatcctagagaagctgacccaggaccaggatgtggacgtcaaatactttgcccaggaggctctgactgttctgtctctcgcctgatgctggaagaggagcaaacactggcctctggtgtccaccctccaacccccacaagtccctctttggggagacactggggggcctttggctgtcactccctgtgcatggtctgaccccaggccccttcccccagcacggttcctcctctccccagcctgggaagatgtctcactgtccacctcccaacgggctaggggagcacggggttggacaggacagtgaccttgggaggaaggggctactccgcccacgtcagggagagatgtgagcatcccgggtcactggatcctgctgctgtaatgggaacccctcccccatttacttctccacctcccgtcctccccatcattggtttttttttgtgtgtcaactgtgccgtttttattttattccttttattttcccccttttcacagagaaataaaggtctagaagt

SEQ ID NO: 178499 - DNA, 1944 bp, Artificial Sequence
  derived and/or modified sequence
aggaaagggacggagccaagatggcggcggccgacggcgacgactcgctgtaccccatcgcggtgctcatagacgaactccgcaatgaggacgttcagcttcgcctcaacagcatcaagaagctgtccaccatcgccttggcccttggggttgaaaggacccgaagtgagcttctgcctttccttacagccaccgctggagtcgctggccacagtggaggagacagtggtgcgggacaaggcagtggagtccttacgggccatctcacacgagcactcgccctctgacctggaggcgcactttgtgccgctagtgaagcggctggcgggcggcgactggttcacctcccgcacctcggcctgcggcctcttctccgtctgctacccccgagtgtccagtgctgtgaaggcggaacttcgacagtacttccggaacctgtgctcagatgacacccccatggtgcggcgggccgcagcctccaagctgggggagtttgccaaggtgctggagctggacaacgtcaagagtgagatcatccccatgttctccaacctggcctctgacgagcaggactcggtgcggctgctggcggtggaggcgtgcgtgaacatcgcccagcttctgccccaggaggatctggaggccctggtgatgcccactctgcgccaggccgctgaagacaagtcctggcgcgtccgctacatggtggctgacaagttcacagagctccagaaagcagtggggcctgagatcaccaagacagacctggtccctgccttccagaacctgatgaaagactgtgaggccgaggtgagggccgcagcctcccacaaggtcaaagagttctgtgaaaacctctcagctgactgtcgggagaatgtgatcatgtcccagatcttgccctgcatcaaggagctggtgtccgatgccaaccaacatgtcaagtctgccctggcctcagtcatcatgggtctctctcccatcttgggcaaagacaacaccatcgagcacctcttgcccctcttcctggctcagctgaaggatgagtgccctgaggtacggctgaacatcatctctaacctggactgtgtgaacgaggtgattggcatccggcagctgtcccagtccctgctccctgccattgtggagctggctgaggacgccaagtggcgggtgcggctggccatcattgagtacatgcccctcctggctggacagctgggagtggagttctttgatgagaaacttaactccttgtgcatggcctggcttgtggatcatgtatatgccatccgcgaggcagccaccagcaacctgaagaagctagtggaaaagtttgggaaggagtgggcccatgccacaatcatccccaaggtcttggccatgtccggagaccccaactacctgcaccgcatgactacgctcttctgcatcaatgtgctgtctgaggtctgtgggcaggacatcaccaccaagcacatgctacccacggttctgcgcatggctggggacccggttgccaatgtccgcttcaatgtggccaagtctctgcagaagatagggcccatcctggacaacagcaccttgcagagtgaagtcaagcccatcctagagaagctgacccaggaccaggatgtggacgtcaaatactttgcccaggaggctctgactgttctgtctctcgcctgatgctggaagaggagcaaacactggcctctggtgtccaccctccaacccccacaagtccctctttggggagacactggggggcctttggctgtcactccctgtgcatggtctgaccccaggccccttcccccagcacggttcctcctctccccagcctgggaagatgtctcactgtccacctcccaacgggctaggggagcacggggttggacaggacagtgaccttgggaggaaggggctactccgcccacgtca

SEQ ID NO: 178500 - protein, 419 aa, Artificial Sequence
  derived and/or modified sequence
MKNYKAIGKIGEGTFSEVMKMQSLRDGNYYACKQMKQRFESIEQVNNLREIQALRRLNPHPNILMLHEVVFDRKSGSLALICELMDMNIYELIRGRRYPLSEKKIMHYMYQLCKSLDHIHRNGIFHRDVKPENILIKQDVLKLGDFGSCRSVYSKQPYTEYISTRWYRAPECLLTDGFYTYKMDLWSAGCVFYEIASLQPLFPGVNELDQISKIHDVIGTPAQKILTKFKQSRAMNFDFPFKKGSGIPLLTTNLSPQCLSLLHAMVAYDPDERIAAHQALQHPYFQEQRKTEKRALGSHRKAGFPEHPVAPEPLSNSCQISKEGRKQKQSLKQEEDRPKRRGPAYVMELPKLKLSGVVRLSSYSSPTLQSVLGSGTNGRVPVLRPLKCIPASKKTDPQKDLKPAPQQCRLPTIVRKGGR

SEQ ID NO: 178501 - DNA, 1260 bp, Artificial Sequence
  derived and/or modified sequence
atgaagaattacaaagcaatcggtaaaattggagaaggcacgtttagcgaggtgatgaagatgcaaagcctcagagatggaaattactacgcatgcaagcagatgaagcagcgattcgagtctattgaacaagtcaataacctcagggagattcaggccttgaggagactaaatccacacccgaatatcctcatgctccatgaggttgtcttcgatagaaagtctggatccttggcactcatttgcgagcttatggatatgaatatatacgaactgattcggggacgcaggtatcccttgtcggaaaagaagataatgcattatatgtatcagctctgtaagagcctggatcatatccaccggaatggaatcttccatcgcgacgtcaaacccgagaacatcttgataaaacaggacgtcttgaaactaggtgatttcggatcttgcaggtctgtctactctaaacagccctacacagagtatatcagtaccagatggtaccgagcccccgagtgtttacttaccgacgggttctacacctacaagatggatttgtggtctgccggatgcgtgttttatgagattgccagcctccagcccctctttcctggggtcaacgagcttgatcagattagcaaaattcacgacgtgatcggaaccccagcacagaaaatcctgactaagtttaagcagtctcgggccatgaatttcgattttccttttaaaaagggctctggcattcctctccttaccacaaacctatccccccagtgtctctctcttctgcacgcaatggtcgcatacgatccagacgagcgcatagcagctcaccaagctctccaacacccctactttcaggagcagagaaagacagaaaagcgcgccttaggatcacatagaaaagccggcttccctgaacaccccgtggccccagaaccgctgagtaattcctgtcagatttcaaaggaggggagaaagcagaagcagagcctgaagcaggaggaggatagacctaaacggcgcggacccgcctacgtcatggaactgcccaagttgaaactgtctggcgtggtgagacttagctcctactcctccccaacgttgcagagtgtcttgggatctggcactaatggtcgagtgccggttctgagacctctgaagtgtatccctgcttcaaagaagactgacccgcaaaaagatctgaagcctgcgcctcagcagtgtaggctgcctaccatcgtaagaaaagggggccgctag

SEQ ID NO: 178502 - DNA, 1260 bp, Artificial Sequence
  derived and/or modified sequence
atgaagaactacaaggccatcggcaagatcggggagggcaccttcagcgaggtgatgaagatgcagagcctgagagatggcaactactatgcctgcaagcagatgaagcagagatttgagagcattgagcaggtgaacaacctgcgggagatccaggccctgcggcggctgaacccccaccccaacatcctgatgctgcacgaggtggtgtttgacaggaagagcggcagcctggccctgatctgtgagctgatggacatgaacatctatgagctgatccggggccgccgctaccccctgtctgagaagaagatcatgcactacatgtaccagctgtgcaagagcctggaccacatccacagaaatggcatcttccacagagatgtgaagccagagaacatcctgatcaagcaggatgtgctgaagctgggggactttggcagctgccgctctgtgtacagcaagcagccctacacagagtacatcagcacccgctggtaccgggccccagaatgtctgctgacagatggcttctacacctacaagatggacctgtggagcgctggctgtgtgttctatgaaattgccagcctgcagcccctcttccctggggtgaatgagctggaccagatcagcaagatccatgatgtgattggcaccccagcccagaagatcctgaccaagttcaagcagagccgggccatgaactttgacttccccttcaagaagggcagcggcatccccctgctgaccaccaacctgagcccccagtgcctgagcctgctgcacgccatggtggcctatgaccctgatgaaagaattgctgcccaccaggccctgcagcacccctacttccaggagcagaggaagacagagaagagggccctgggcagccacaggaaggccggcttccctgagcaccctgtggcccctgagcccctgagcaacagctgccagatcagcaaggagggcaggaagcagaagcagagcctgaagcaggaggaggaccggcccaagaggcggggccctgcctacgtgatggagctgcccaagctgaagctgtctggagtggtgcggctgagcagctacagcagccccaccctgcagagcgtgctgggcagcggcaccaacggccgggtgcctgtgctgcggcccctgaagtgcatcccagccagcaagaagacagacccccagaaggacctgaagccagccccccagcagtgccgcctgcccaccatcgtgaggaagggcggccgctag

SEQ ID NO: 178503 - DNA, 1940 bp, Artificial Sequence
  derived and/or modified sequence
atcttgcgcatgcgcaggcgacagctcatggcgttcagggcctgacggttgctagggtgacagggacacaacatggcggcgggatctctaacgctctccttcgagggaccaccacggagatcctagtgcgggaccccgcctcagggaagtggaaagcagggggacaaccttcctgcttctttcttttccgtccagtgtcggcaaggggttgtcaccggcttccgcatccaagatgaagaactataaagcaattggcaaaataggagagggaacgttttctgaagttatgaagatgcaaagcctgagagatggaaactactatgcatgtaaacaaatgaagcagcgctttgaaagtattgagcaagtcaacaacctacgagagatccaagcactgaggcgcctgaatccgcacccaaacattcttatgttgcatgaagtggtttttgacagaaaatctggttctcttgcactaatatgtgaacttatggacatgaatatttatgagctaatacgagggagaagatacccattatcagaaaaaaaaattatgcactatatgtaccagttatgtaagtccctggatcatattcacagaaatggaatatttcacagagatgtaaaaccagaaaatatactaataaagcaggatgtcctgaaattaggggactttggctcctgccggagtgtctattccaagcagccgtacacggaatacatctccacccgctggtaccgggccccggagtgtctcctcactgatgggttctacacgtacaagatggacctgtggagcgccggctgtgtgttctacgagatcgccagtctgcagcccctctttcctggagtaaatgaactggaccaaatctcaaaaatccacgatgtcatcggcacacccgctcagaagatcctcaccaagttcaaacagtcgagagctatgaattttgattttccttttaaaaagggatcaggaatacctctactaacaaccaatttgtccccacaatgcctctccctcctgcacgcaatggtggcctatgatcccgatgagagaatcgccgcccaccaggccctgcagcacccctacttccaagaacagaggaaaacagagaagcgggctctgggcagccacagaaaagctggctttccggagcaccctgtggcaccggaaccactcagtaacagctgccagatttccaaggagggcagaaagcagaaacagtccctaaagcaagaggaggaccgtcccaagagacgaggaccggcctatgtcatggaactgcccaaactaaagctttcgggagtggtcagactgtcgtcttactccagccccacgctgcagtccgtgcttggatctggaacaaatggaagagtgccggtgctgagacccttgaagtgcatccctgcgagcaagaagacagatccgcagaaggaccttaagcctgccccgcagcagtgtcgcctgcccaccatagtgcggaaaggcggaagataactgagcagcaccgtcgtctcgacttcggaggcaacaccaagcccgaccgggccaggcctgggtgatctgctgctgagacgccacggagggctggggatgcgcctgcgtccgtttcgcgctggccggggctctgggtgctgccctgcgccctgccgcacccgcggcccgcgcagctgcctaggatgttctgggctaatatacttgtaaaaccaccgcattctagggttttctttcattttcgttaagaatttggggcaggaaatactttgtaactttgtatatgaatcaaaacaaacgagcaggcatttctgtgatgtgttgggcgtggttggaaggtgggttctgcgtgtcccttcccagcgctgctggtcagtcgtggagcgccatcatgtcttaccagtgacgctgctgacacccctgacttttattaaagaataagctgtcgtta

SEQ ID NO: 178504 - DNA, 1260 bp, Artificial Sequence
  derived and/or modified sequence
atgaagaactacaaggccatcggcaagatcggcgagggcaccttctctgaggtgatgaaaatgcagagtctgagggacggaaattactacgcctgtaaacaaatgaaacaacggtttgagagcatcgaacaggtgaataatctgagagaaattcaagctctgaggaggctgaacccacatccaaatattctgatgttgcacgaggtggtgttcgaccgtaagtcaggttctctcgcattaatttgtgagctgatggacatgaacatttatgagcttatcaggggacggcgataccctctgtcggaaaaaaagatcatgcattatatgtaccagctatgcaagtccctcgatcatattcaccgcaacggaattttccaccgggatgtgaagccagaaaatattctgataaaacaggacgtactcaaactcggcgatttcggcagttgccgctcagtttattcaaagcagccatatacagaatacatctctacaagatggtaccgggcccctgagtgtctgcttacagacgggttttacacctataaaatggatctgtggtccgcagggtgcgtgttttacgagatcgccagtctacagcctctgttccctggagttaatgagctagatcaaatctccaagattcacgatgtgatcggtacgcctgcccagaagatccttacaaagtttaaacaaagtcgcgcaatgaactttgactttccatttaaaaagggcagcgggataccgttgctgactaccaacttgtctcctcagtgcctgtccctgttgcatgccatggtggcctatgatcctgacgagaggatcgctgcccaccaggccctgcaacacccctattttcaggagcagcgtaagacagagaagagagcgctcggtagtcatcggaaggcaggtttcccagagcaccctgtcgccccagaacccctgtccaacagctgccagatcagtaaggagggtcgcaagcaaaagcaaagtcttaagcaagaggaggacagaccaaaaagacggggacccgcttatgtaatggagcttccgaagttgaaacttagtggagtggtcagactgagcagctatagctcaccgaccttgcagtccgtactgggttcaggcactaacggtagggttcctgttctgagaccactcaaatgtatcccggcttctaagaagaccgatccacagaaggacctgaagccagccccgcagcagtgccgactgccaaccatagttagaaaaggtggtagatag

SEQ ID NO: 178505 - DNA, 1260 bp, Artificial Sequence
  derived and/or modified sequence
atgaaaaattacaaagctattggcaagatcggagagggcacttttagcgaagttatgaaaatgcagtcacttcgggacggtaactactacgcttgcaaacaaatgaagcagcgctttgagtccatagaacaggtgaacaacctgcgcgagatccaagccctccggcgtctcaaccctcaccccaacatcctgatgctgcatgaggtcgtgtttgatcggaaaagcgggtctcttgctttaatctgcgaactgatggatatgaatatctacgaactgatacggggtagaaggtatccactgtccgaaaaaaaaataatgcattacatgtatcagctgtgcaagagcctcgaccacattcataggaacgggatctttcacagggatgtcaagcctgaaaacattctgatcaaacaagacgtactgaagctgggcgatttcggcagctgccgctcagtgtattcaaaacagccttacactgaatacattagcactaggtggtatcgcgctcccgagtgcttactgaccgatggcttttatacgtataaaatggatttgtggtccgcaggatgtgtgttttatgagattgcatctctacagccactcttccctggcgttaatgagctcgatcagatctcaaagattcacgatgtcataggcacacccgctcagaaaatcctgacgaagttcaaacagtctagggccatgaacttcgattttcccttcaaaaaggggtctggcatcccactgctgacaacaaacctgagccctcagtgcctgagtcttttgcatgctatggttgcctatgatccggatgaaagaatcgctgcccaccaggccctgcagcatccgtatttccaggaacagcgaaaaaccgagaagagggcgttgggttcccaccgaaaggccggatttcccgaacacccggtagccccagagcccctttccaattcctgccagataagcaaagaagggaggaagcaaaaacagtccttgaaacaggaggaggaccggcctaagagacggggtcctgcatacgtgatggagcttcccaagctgaagctttcgggagtagtaagattgtcaagctattcttcccctaccctgcaatcagtgttaggctccggcacgaacggcagagtcccagtgttaagacctctgaagtgcatcccagctagcaagaagactgatccccagaaagacttgaagcctgcgccacaacagtgcagactaccaactatcgtgcgaaagggaggacgatag

SEQ ID NO: 178506 - DNA, 1260 bp, Artificial Sequence
  derived and/or modified sequence
atgaagaactacaaggccatcggcaagatcggcgagggcaccttcagcgaggtgatgaagatgcagagcctgagagacggcaactactacgcctgcaagcagatgaagcagagattcgagagcatcgagcaggtgaacaacctgagagagatccaggccctgagaagactgaacccccaccccaacatcctgatgctgcacgaggtggtgttcgacagaaagagcggcagcctggccctgatctgcgagctgatggacatgaacatctacgagctgatcagaggcagaagataccccctgagcgagaagaagatcatgcactacatgtaccagctgtgcaagagcctggaccacatccacagaaacggcatcttccacagagacgtgaagcccgagaacatcctgatcaagcaggacgtgctgaagctgggcgacttcggcagctgcagaagcgtgtacagcaagcagccctacaccgagtacatcagcaccagatggtacagagcccccgagtgcctgctgaccgacggcttctacacctacaagatggacctgtggagcgccggctgcgtgttctacgagatcgccagcctgcagcccctgttccccggcgtgaacgagctggaccagatcagcaagatccacgacgtgatcggcacccccgcccagaagatcctgaccaagttcaagcagagcagagccatgaacttcgacttccccttcaagaagggcagcggcatccccctgctgaccaccaacctgagcccccagtgcctgagcctgctgcacgccatggtggcctacgaccccgacgagagaatcgccgcccaccaggccctgcagcacccctacttccaggagcagagaaagaccgagaagagagccctgggcagccacagaaaggccggcttccccgagcaccccgtggcccccgagcccctgagcaacagctgccagatcagcaaggagggcagaaagcagaagcagagcctgaagcaggaggaggacagacccaagagaagaggccccgcctacgtgatggagctgcccaagctgaagctgagcggcgtggtgagactgagcagctacagcagccccaccctgcagagcgtgctgggcagcggcaccaacggcagagtgcccgtgctgagacccctgaagtgcatccccgccagcaagaagaccgacccccagaaggacctgaagcccgccccccagcagtgcagactgcccaccatcgtgagaaagggcggcagatag

SEQ ID NO: 178507 - protein, 659 aa, Artificial Sequence
  derived and/or modified sequence
MASTVSPSTIAETPEPPPLSDHIRNAADISVIVIYFLVVMAVGLWAMLKTNRGTIGGFFLAGRDMAWWPMGASLFASNIGSNHYVGLAGTGAASGVATVTFEWTSSVMLLILGWIFVPIYIKSGVMTMPEYLKKRFGGERLQVYLSILSLFICVVLLISADIFAGAIFIKLALGLDLYLAIFILLAMTAVYTTTGGLASVIYTDTLQTIIMLIGSFILMGFAFNEVGGYESFTEKYVNATPSVVEGDNLTISASCYTPRADSFHIFRDAVTGDIPWPGIIFGMPITALWYWCTNQVIVQRCLCGKDMSHVKAACIMCAYLKLLPMFLMVMPGMISRILYTDMVACVVPSECVKHCGVDVGCTNYAYPTMVLELMPQGLRGLMLSVMLASLMSSLTSIFNSASTLFTIDLYTKMRKQASEKELLIAGRIFVLLLTVVSIVWVPLVQVSQNGQLIHYTESISSYLGPPIAAVFVLAIFCKRVNEQGAFWGLMVGLAMGLIRMITEFAYGTGSCLAPSNCPKIICGVHYLYFSIVLFFGSMLVTLGISLLTKPIPDVHLYRLCWVLRNSTEERIDIDAEEKSQEETDDGVEEDYPEKSRGCLKKAYDLFCGLQKGPKLTKEEEEALSKKLTDTSERPSWRTIVNINAILLLAVVVFIHGYYA

SEQ ID NO: 178508 - DNA, 1980 bp, Artificial Sequence
  derived and/or modified sequence
atggccagcaccgtgagccccagcaccatcgccgagacccccgagcccccccccctgagcgaccacatcagaaacgccgccgacatcagcgtgatcgtgatctacttcctggtggtgatggccgtgggcctgtgggccatgctgaagaccaacagaggcaccatcggcggcttcttcctggccggcagagacatggcctggtggcccatgggcgccagcctgttcgccagcaacatcggcagcaaccactacgtgggcctggccggcaccggcgccgccagcggcgtggccaccgtgaccttcgagtggaccagcagcgtgatgctgctgatcctgggctggatcttcgtgcccatctacatcaagagcggcgtgatgaccatgcccgagtacctgaagaagagattcggcggcgagagactgcaggtgtacctgagcatcctgagcctgttcatctgcgtggtgctgctgatcagcgccgacatcttcgccggcgccatcttcatcaagctggccctgggcctggacctgtacctggccatcttcatcctgctggccatgaccgccgtgtacaccaccaccggcggcctggccagcgtgatctacaccgacaccctgcagaccatcatcatgctgatcggcagcttcatcctgatgggcttcgccttcaacgaggtgggcggctacgagagcttcaccgagaagtacgtgaacgccacccccagcgtggtggagggcgacaacctgaccatcagcgccagctgctacacccccagagccgacagcttccacatcttcagagacgccgtgaccggcgacatcccctggcccggcatcatcttcggcatgcccatcaccgccctgtggtactggtgcaccaaccaggtgatcgtgcagagatgcctgtgcggcaaggacatgagccacgtgaaggccgcctgcatcatgtgcgcctacctgaagctgctgcccatgttcctgatggtgatgcccggcatgatcagcagaatcctgtacaccgacatggtggcctgcgtggtgcccagcgagtgcgtgaagcactgcggcgtggacgtgggctgcaccaactacgcctaccccaccatggtgctggagctgatgccccagggcctgagaggcctgatgctgagcgtgatgctggccagcctgatgagcagcctgaccagcatcttcaacagcgccagcaccctgttcaccatcgacctgtacaccaagatgagaaagcaggccagcgagaaggagctgctgatcgccggcagaatcttcgtgctgctgctgaccgtggtgagcatcgtgtgggtgcccctggtgcaggtgagccagaacggccagctgatccactacaccgagagcatcagcagctacctgggcccccccatcgccgccgtgttcgtgctggccatcttctgcaagagagtgaacgagcagggcgccttctggggcctgatggtgggcctggccatgggcctgatcagaatgatcaccgagttcgcctacggcaccggcagctgcctggcccccagcaactgccccaagatcatctgcggcgtgcactacctgtacttcagcatcgtgctgttcttcggcagcatgctggtgaccctgggcatcagcctgctgaccaagcccatccccgacgtgcacctgtacagactgtgctgggtgctgagaaacagcaccgaggagagaatcgacatcgacgccgaggagaagagccaggaggagaccgacgacggcgtggaggaggactaccccgagaagagcagaggctgcctgaagaaggcctacgacctgttctgcggcctgcagaagggccccaagctgaccaaggaggaggaggaggccctgagcaagaagctgaccgacaccagcgagagacccagctggagaaccatcgtgaacatcaacgccatcctgctgctggccgtggtggtgttcatccacggctactacgcctag

SEQ ID NO: 178509 - DNA, 1980 bp, Artificial Sequence
  derived and/or modified sequence
atggcgtctaccgtgagtccaagcacaattgctgagactccagaaccaccccctcttagcgaccatatccgcaacgcggcggacatatccgtgatcgtcatctacttcctggtagtgatggctgtgggattgtgggcaatgctcaagaccaaccgggggactatcggtgggttcttcctcgcagggagagacatggcgtggtggccaatgggcgcctcattgttcgcaagtaatatcggatctaatcactatgtgggactcgccggtacaggagcggcctcaggagtagccactgtcacattcgaatggacaagttcggtcatgctcctgatcctcgggtggatttttgttcctatttatattaagtctggagtgatgaccatgccagagtacctgaagaaacgattcggtggagagagactccaagtatatctgtccattttaagtttattcatttgcgtcgtgctgctgatcagcgccgatatctttgccggagccatattcatcaaattagccctggggctggatctgtacctggccatctttatcctgctggcaatgaccgccgtgtacaccaccacgggaggactggcatccgtaatatacactgacacgctgcagacaataatcatgcttatcggctccttcatacttatgggatttgcctttaacgaggtaggcggttatgaatctttcacagagaagtacgttaacgctacccccagtgtggttgagggagataacctgaccatttccgcctcctgctacactcccagggccgattcttttcacatctttcgtgacgcagtgacgggcgatatcccctggccgggtatcattttcgggatgccaattaccgccctgtggtactggtgcacaaatcaagttatagtgcaaagatgcctgtgtggtaaggacatgtcccacgtaaaagccgcttgtatcatgtgcgcatatcttaaactgctgccaatgtttctaatggtgatgccggggatgatctcccggatcctctacacagacatggtcgcctgcgtcgtgccctctgaatgcgtgaagcactgtggtgtggatgttggatgcactaattacgcatatccaactatggtgctcgaattgatgccacagggcctccgcgggcttatgctgtcagtcatgcttgccagccttatgtcttcattgacctctatattcaactctgctagtacactatttacaattgatctttacaccaagatgcggaagcaggcttctgaaaaagaactgttgatcgcgggtagaatatttgttttgttgctgacagtcgtgtcgatcgtgtgggtgcctctggtgcaggtatcccagaacgggcagctgatacattacaccgagtctatcagtagctatctggggcctcctattgccgctgtttttgtgctggcaatattctgtaaacgagtgaacgagcagggggcgttctggggcctgatggtcgggctcgccatggggctcatacggatgattactgagttcgcatatgggactggatcctgcttagccccatctaactgtccaaagataatttgtggagtacactacctttactttagtatcgtcctcttctttgggagtatgttagtgactctcgggatttctcttcttaccaagccgattccggatgtgcatctatacaggctgtgctgggttctgaggaactccacggaggaacgcattgatatcgacgcggaagaaaagtcacaggaagaaacagacgacggggtggaagaggattacccggaaaagtcacgcggctgcctaaaaaaagcatacgatctgttttgcggcctccagaaggggcctaagctcactaaggaggaggaggaggctcttagcaagaagctgaccgatacctctgagagaccctcatggcggaccattgtaaacataaatgcgattctgttgttggccgttgtggtgtttatacatggatactatgcctag

SEQ ID NO: 178510 - DNA, 1980 bp, Artificial Sequence
  derived and/or modified sequence
atggccagcacagtgagccccagcaccatcgccgagaccccagagcccccacccctgagtgaccacatcagaaatgctgctgacatcagcgtcatcgtcatctacttcctggtggtgatggctgtgggcctgtgggccatgctgaagaccaacagaggcaccatcggcggcttcttcctggccggccgggacatggcctggtggcccatgggcgccagcctgtttgccagcaacatcggcagcaaccactacgtgggcctggccggcaccggggccgccagcggcgtggccaccgtgacctttgagtggaccagctctgtgatgctgctgatcctgggctggatctttgtgcccatctacatcaagtctggagtgatgaccatgcctgagtacctgaagaagagatttggaggagagcggctgcaggtgtacctgagcatcctgagcctcttcatctgtgtggtgctgctgatctctgctgacatctttgctggggccatcttcatcaagctggccctgggcctggacctgtacctggccatcttcatcctgctggccatgacagctgtgtacaccaccaccggcggcctggccagcgtcatctacacagacaccctgcagaccatcatcatgctgattggcagcttcatcctgatgggctttgccttcaatgaggtgggcggctatgagagcttcacagagaagtatgtgaatgccacccccagcgtggtggagggggacaacctgaccatcagcgccagctgctacacccccagggctgacagcttccacatcttcagagatgctgtgactggagacatcccctggccaggcatcatcttcggcatgcccatcacagccctgtggtactggtgcaccaaccaggtgattgtgcagcgctgcctgtgtgggaaggacatgagccacgtgaaggccgcctgcatcatgtgtgcctacctgaagctgctgcccatgttcctgatggtgatgcctggcatgatcagccgcatcctgtacacagacatggtggcctgtgtggtgcccagtgaatgtgtgaagcactgcggcgtggatgtgggctgcaccaactatgcctaccccaccatggtgctggagctgatgccccagggcctgcggggcctgatgctgtctgtgatgctggccagcctgatgagcagcctgaccagcatcttcaacagcgccagcaccctcttcaccatcgacctgtacaccaagatgaggaagcaggccagcgagaaggagctgctgattgctggccgcatctttgtgctgctgctgactgtggtgtccatcgtgtgggtgcccctggtgcaggtgtcccagaatggccagctgatccactacacagagagcatcagcagctacctgggcccccccatcgctgctgtgtttgtgctggccatcttctgcaagagggtgaatgagcagggcgccttctggggcctgatggtgggcctggccatgggcctcatccgcatgatcacagaatttgcctacggcaccggcagctgcctggcccccagcaactgccccaagatcatctgtggggtgcactacctgtacttcagcatcgtgctcttcttcggctccatgctggtgaccctgggcatcagcctgctgaccaagcccatcccagatgtgcacctgtaccgcctgtgctgggtgctgaggaacagcacagaggagagaattgatattgatgctgaggagaagagccaggaggagacagatgatggagtggaggaggactacccagagaagagccggggctgcctgaagaaggcctatgacctcttctgtggcctgcagaagggccccaagctgaccaaggaggaggaggaggccctgagcaagaagctgacagacaccagcgagcggcccagctggaggaccatcgtgaacatcaatgccatcctgctgctggccgtggtggtgttcatccacggctactatgcctag

SEQ ID NO: 178511 - DNA, 1980 bp, Artificial Sequence
  derived and/or modified sequence
atggccagcaccgtgagccccagcaccatcgccgagacccccgagcccccgccgttgagtgaccatataaggaatgctgcagacatctccgtcattgtaatctactttttggtcgtgatggctgtgggcctctgggctatgctgaaaacgaaccggggtactatcggcggattctttctggccggccgagacatggcctggtggcccatgggtgcttccctcttcgcatctaacattggctccaatcattatgttggactggctgggactggtgccgcaagtggcgtcgccaccgtgaccttcgagtggacatcatctgtgatgttgctgattctggggtggatatttgtccctatctatattaaaagcggcgtgatgacgatgccggagtacctgaaaaaaaggttcggaggcgaaaggctgcaggtttatctctctatcctgtccttgtttatctgtgttgtgcttttaatttctgccgatatcttcgctggcgcgattttcattaaacttgctctcggcttggacctttacctcgctatattcattcttctcgccatgacagccgtgtacactaccacagggggccttgcctcggtgatttataccgataccctgcagacaattataatgctcataggctcattcatcctgatgggctttgcatttaacgaggtagggggctacgaatcctttacagaaaagtatgttaatgcaacaccctctgtcgtcgagggggacaacctcacaataagcgcctcttgctacactccaagagccgactcttttcatatctttcgggacgccgtgaccggcgatattccttggcctggcataatcttcggaatgcctatcaccgcattgtggtactggtgcaccaaccaggttattgtccaaaggtgcctgtgcggaaaggatatgtcccacgttaaagcagcctgcattatgtgtgcatatttgaagctgctgccaatgttcctgatggttatgcctggcatgatctcaaggatcctgtatacggacatggtcgcctgtgtggtgcctagtgaatgtgttaaacactgtggagtggatgttggatgcactaattacgcgtacccaacaatggtgttggagcttatgccacagggcctgcgggggctgatgctgtccgtcatgctggccagcctgatgtcctccttgacgtccatcttcaactccgcttccactttgttcaccatagacttatatactaaaatgcgaaagcaggccagtgagaaagagctgcttatcgctggacgcatatttgtcctgctgctgacagtggtatctattgtttgggtccccctggtacaagtgagtcagaatggccaattaattcactacactgagtctatttctagctatctgggtcccccaattgcagctgtattcgttctagcaatattctgtaagagagtgaacgaacagggtgccttctgggggctgatggttggtctggcaatgggactcatccggatgatcactgaattcgcatacggaacggggtcttgtcttgctccatccaattgtcccaaaattatctgcggcgtccattacctgtacttctccattgtactgttttttggatccatgctggtgacgctgggcatttccttactgactaaaccaattcccgacgtgcacttataccgtctgtgttgggtgttacggaactcaacggaggaacgtatcgatattgacgctgaggaaaaatcccaggaggaaacagacgacggggtggaagaggactaccccgagaagtcccggggatgcctcaaaaaagcatatgatctgttctgcggtctgcagaaaggccctaagttgacaaaagaagaagaggaggcgctgtctaagaaactgacagatacttcagagagaccatcttggaggacgatcgtgaatattaatgcaattctgttgctggcagtagtagtgtttattcacgggtactatgcctag

SEQ ID NO: 178512 - DNA, 1980 bp, Artificial Sequence
  derived and/or modified sequence
atggcttcaacggtgtcgccatcgaccatcgctgagacaccagaaccaccaccactgtctgaccatattcggaatgcagctgacatctcagttatagtgatttacttcctggtggttatggcggtaggcctgtgggccatgctgaaaacaaatcggggtactatcggtggtttctttttagccggtcgggatatggcctggtggcctatgggagccagcttatttgcctcaaatatcgggtcgaatcactatgtagggctggctggcaccggagccgcatccggagtggccactgtcacattcgaatggacaagctccgtgatgctgctcatcctgggatggatcttcgtgccaatttacataaagagtggagttatgaccatgccagaatacttaaaaaagcgattcggcggtgaacggcttcaagtctacctgagcatcttatctctgtttatttgcgtggttctgctgatctctgccgacatctttgccggagcaatcttcattaagctcgctttgggcctggacctgtatcttgcaatatttatactgctggccatgacagctgtgtacactaccaccgggggtcttgcatcggtgatctacactgacacgctccagaccatcatcatgctgatcggatcattcattcttatgggatttgcattcaacgaggtggggggttacgaaagcttcaccgaaaagtatgtgaacgctactccatccgttgtggagggcgacaacctgaccatttcggcatcttgctacacgccccgagccgactcatttcacatctttcgggacgctgtgactggggatataccctggccaggaatcatctttggcatgcctattacggccctatggtactggtgcactaaccaggtgatcgtgcagagatgtctatgcggtaaggatatgtctcacgtgaaagcagcctgcattatgtgcgcctatcttaagctgctgcccatgtttttgatggttatgcccggaatgatctctaggatcctgtacactgacatggtggcatgtgtggtgccctcagagtgtgttaaacactgcggtgtggacgtgggatgcacgaactacgcctacccaaccatggtgctcgaactgatgccacagggcctccggggacttatgctttctgtcatgcttgcttccctgatgtcctcacttacctccatattcaactctgctagcacgctgtttacaattgacctctacaccaaaatgcgcaagcaagcctcagagaaggaactgctcatcgccggtcgcatcttcgtgctgctgcttacagtcgtgagcatagtttgggtgcccctcgttcaagtgtctcaaaacgggcagctgatccattacaccgagtctatttcaagctatcttggtcccccaattgctgcggttttcgtactcgccatattctgcaagcgcgtgaacgagcaaggtgctttttgggggcttatggtgggacttgccatggggctgattaggatgatcacagaatttgcctatggaacaggctcgtgtctggcgccatccaactgtcccaaaatcatatgtggtgtgcactatctctactttagtatcgtgctattcttcgggagtatgctggtgaccctaggaatatctttgttgactaaacctataccggacgtgcacttatacagactgtgctgggtgttgcggaattctacggaggaacgcattgacatcgatgcagaagaaaaaagtcaagaagagacagatgacggcgtggaggaggactacccggagaaaagccgtggatgcctgaagaaggcgtatgacctgttttgcggtctgcagaagggcccaaagctgaccaaggaggaagaagaagctctgtcgaaaaaactgaccgatacctcggagcggccaagctggaggacgattgtgaatatcaacgcaatcctcctattagccgtggtggttttcatccacggatattatgcgtag

SEQ ID NO: 178513 - DNA, 2028 bp, Artificial Sequence
  derived and/or modified sequence
ctgcctgcagccatggccagtacggttagccccagcaccatagctgagaccccagagccacctccattgtctgaccacatccgaaatgctgctgacatctcagtcattgtcatctattttctggtggtgatggctgttgggctgtgggcgatgctgaagaccaaccgaggtactataggaggcttcttcctcgctggtcgtgatatggcctggtggccgatgggcgcctctctctttgccagtaacatcggcagcaaccactatgtggggctggctgggacaggagcagcttcaggagtcgccaccgtaacatttgaatggacttcctcagtaatgttgctgattcttgggtggatctttgtccctatctacatcaagtcgggggtgatgaccatgccggaatatctcaagaagcggtttggtggggagcgactccaggtctacctctccatcctctccctcttcatctgtgtggttttgttaatttctgcagacatatttgctggagccatattcatcaagctggccttgggattggacctttacctggcaatcttcatcctcttggctatgactgctgtttacaccaccactgggggcttggcctcggtgatttacacagacaccctccagaccatcatcatgctgattggctcttttattctcatggggtttgcatttaacgaagttggaggttatgagagctttaccgagaagtacgtgaatgccaccccatccgtagtcgagggggacaacttgacaatcagtgccagttgctacacacctcgggcggactccttccacatcttccgagatgctgtgactggggacattccatggccaggaattatatttggaatgcccattacagctttgtggtactggtgcacaaatcaggtcattgtgcagcgctgcctgtgtggcaaggacatgtctcacgtgaaggccgcttgcattatgtgtgcttacctgaagctgctgcccatgttcctcatggtgatgccggggatgatcagccgcatcctgtacacagatatggtagcatgtgtggtaccttctgaatgcgtgaaacactgtggcgttgatgttggctgcaccaactacgcataccccacgatggtgctggaactgatgccccaaggactgcgaggcctgatgctttcggtcatgctggcctctctcatgagctccctgacctccatcttcaacagcgccagcaccctcttcaccattgacctctacaccaagatgcggaagcaagcgtcggagaaagagctcctgatagctggacggatatttgttcttctattaactgttgtgagcattgtgtgggtcccactggtacaagtttctcaaaatggacaactaatccattacacagaatcaatttctagctaccttgggcctccaattgcagctgtctttgtgcttgccatcttctgtaaaagagtcaatgaacagggagcattctggggtctaatggttggacttgcaatgggcctcattcgtatgataacagagtttgcttatggaacagggagttgcttggctcccagtaactgtcccaagattatctgtggagtgcactatctgtacttttccatcgttctcttttttgggtccatgctggtcaccctgggaatttccctcttaacaaaacccattcctgatgtacatctgtaccgcctgtgctgggttcttcggaacagtacagaggagcgaatcgatatagatgcagaagagaaaagtcaggaagaaacagatgatggtgttgaagaagattatcctgagaaatcacgtggatgcctcaagaaagcttatgacttgttctgcggtttgcagaagggacccaagctaaccaaggaggaggaggaagccttgagcaagaagctcacagacacgtctgagaggccctcgtggaggacaatagtgaacatcaacgccatcctcctcctggctgtggtggtctttattcacggctactatgcctgaactctatctgagccattagaataatgaataattctt

SEQ ID NO: 178514 - protein, 636 aa, Artificial Sequence
  derived and/or modified sequence
MKKLQGAHLRKPVTPDLLMTPSDQGDVDLDVDFAAHRGNWTGKLDFLLSCIGYCVGLGNVWRFPYRAYTNGGGAFLVPYFLMLAICGIPLFFLELSLGQFSSLGPLAVWKISPLFKGAGAAMLLIVGLVAIYYNMIIAYVLFYLFASLTSDLPWEHCGNWWNTELCLEHRVSKDGNGALPLNLTCTVSPSEEYWSRYVLHIQGSQGIGSPGEIRWNLCLCLLLAWVIVFLCILKGVKSSGKVVYFTATFPYLILLMLLVRGVTLPGAWKGIQFYLTPQFHHLLSSKVWIEAALQIFYSLGVGFGGLLTFASYNTFHQNIYRDTFIVTLGNAITSILAGFAIFSVLGYMSQELGVPVDQVAKAGPGLAFVVYPQAMTMLPLSPFWSFLFFFMLLTLGLDSQFAFLETIVTAVTDEFPYYLRPKKAVFSGLICVAMYLMGLILTTDGGMYWLVLLDDYSASFGLMVVVITTCLAVTRVYGIQRFCRDIHMMLGFKPGLYFRACWLFLSPATLLALMVYSIVKYQPSEYGSYRFPPWAELLGILMGLLSCLMIPAGMLVAVLREEGSLWERLQQASRPAMDWGPSLEENRTGMYVATLAGSQSPKPLMVHMRKYGGITSFENTAIEVDREIAEEEESMM

SEQ ID NO: 178515 - DNA, 1911 bp, Artificial Sequence
  derived and/or modified sequence
atgaaaaagctccagggagcgcacttgcggaagcccgtgacaccagacctgctaatgacaccatcagaccagggtgacgtagatctcgacgtggactttgccgcccataggggtaattggactggcaagcttgactttctcttaagctgtatcggatattgcgtagggttaggcaatgtttggcgtttcccctacagggcttataccaatgggggcggagccttcctggttccttacttcctcatgttggctatctgtggcattccactgttttttctggagctgagcctcggacagttcagcagcctgggccctctggccgtctggaaaatttcaccgttattcaagggcgctggcgccgcaatgctcctaatagtaggcttagtggccatctactataatatgattattgcatatgttttgttttacctgttcgctagcttgacttctgatctcccgtgggaacactgcgggaactggtggaatacagaactctgtctagagcacagggtgagcaaggacggcaatggtgctctgcctctcaatttgacatgtaccgtctctccttcagaggagtattggtctcgttatgttctgcacattcagggatcccagggtataggaagccccggggagatccggtggaatctctgcctgtgtctgctcctggcctgggtgattgttttcctgtgcattctgaaaggcgtgaagtctagtggtaaggttgtttactttacagcgaccttcccctatctgattcttcttatgctgctcgtgcgaggtgtcactttgcctggagcgtggaagggtatccagttttacttaactcctcagtttcatcacttgctctccagtaaggtgtggatcgaggcagccctgcagatattctactctttgggagtaggcttcgggggcctccttacattcgccagttacaacactttccaccagaacatataccgtgatactttcatcgtgacgctcggcaacgccatcacttctatccttgctggattcgccatattcagcgtcctaggatacatgtcccaagagctcggcgtgcccgtcgaccaggtggctaaagctggccccgggctcgcgttcgtggtctacccacaggcaatgactatgctgcccctcagccctttctggtcgttcctgttcttctttatgcttttgacattgggattagactcacagtttgccttcctggagacaatagtgactgcagtgacagatgaattcccatactacctcaggccaaaaaaagctgtgttctccggtcttatctgtgtggccatgtatctgatgggactgatcttgacaactgacggcggaatgtactggctggtactcctagacgactactctgcttcctttggacttatggtggttgttatcaccacctgcctcgcggttacaagagtttacggcatccagcggttttgtcgggacatccacatgatgttgggtttcaaacccggcctctatttcagggcatgttggttatttctctctcctgcaacccttttagctctgatggtgtatagcatcgtaaaataccagcctagcgaatatggcagctacaggttcccgccttgggccgagttgctgggaatcctgatgggactcctctcttgccttatgatcccagccggaatgctggtagccgtcctgcgcgaagagggtagtctctgggaacgtcttcaacaggcctccaggccggccatggattgggggccttccctggaggagaaccgaacaggaatgtacgtggctaccctcgcagggtcccaatcccctaagccccttatggtgcatatgaggaagtacggtggcattacttccttcgagaatactgctatcgaggttgatcgggaaatcgctgaagaagaggagagcatgatgtag

SEQ ID NO: 178516 - DNA, 1911 bp, Artificial Sequence
  derived and/or modified sequence
atgaagaagctgcagggcgcccacctgaggaagcctgtgaccccagacctgctgatgacccccagcgaccagggagatgtggacctggatgtggactttgctgcccaccggggcaactggacaggcaagctggacttcctgctgagctgcatcggctactgtgtgggcctgggcaatgtgtggaggttcccctaccgggcctacaccaacggcggcggggccttcctggtgccctacttcctgatgctggccatctgtggcatccccctcttcttcctggagctgagcctgggccagttcagcagcctgggccccctggccgtgtggaagatcagccccctcttcaagggggccggggccgccatgctgctgattgtgggcctggtggccatctactacaacatgatcatcgcctacgtgctcttctacctgtttgccagcctgaccagtgacctgccctgggagcactgcggcaactggtggaacacagagctgtgcctggagcaccgggtgtccaaggatggaaatggagccctgcccctgaacctgacctgcaccgtgagccccagcgaggagtactggagccgctacgtgctgcacatccagggcagccagggcatcggcagccctggagagatccgctggaacctgtgcctgtgcctgctgctggcctgggtgattgtgttcctgtgcatcctgaagggcgtgaagagcagcggcaaggtggtgtacttcaccgccaccttcccctacctgatcctgctgatgctgctggtgcggggcgtgaccctgcccggggcctggaagggcatccagttctacctgaccccccagttccaccacctgctgagcagcaaggtgtggattgaagctgccctgcagatcttctacagcctgggcgtgggctttggaggcctgctgacctttgccagctacaacaccttccaccagaacatctacagagacaccttcatcgtgaccctgggcaatgccatcaccagcatcctggccggctttgccatcttctctgtgctgggctacatgagccaggagctgggcgtgcctgtggaccaggtggccaaggccggccctggcctggcctttgtggtgtacccccaggccatgaccatgctgcccctgagccccttctggagcttcctgttcttcttcatgctgctgaccctgggcctggacagccagtttgccttcctggagaccatcgtgacagctgtgacagatgagttcccctactacctgcggcccaagaaggctgtgttttctggcctcatctgtgtggccatgtacctgatgggcctcatcctgaccacagatggcggcatgtactggctggtgctgctggatgactacagcgccagctttggcctgatggtggtggtgatcaccacctgcctggccgtgaccagggtgtatggcatccagcgcttctgccgggacatccacatgatgctgggcttcaagccaggcctgtacttccgggcctgctggctgttcctgagccctgccaccctgctggccctgatggtgtacagcatcgtgaagtaccagcccagtgaatatggcagctaccgcttccccccctgggccgagctgctgggcatcctgatgggcctgctgagctgcctgatgatcccagctggcatgctggtggccgtgctgcgggaggagggcagcctgtgggagcggctgcagcaggccagcaggcctgccatggactggggccccagcctggaggagaacagaacaggcatgtatgtggccaccctggccggcagccagagccccaagcccctgatggtgcacatgaggaaatatggaggcatcaccagctttgagaacacagccatcgaggtggaccgggagattgctgaggaggaggagagcatgatgtag

SEQ ID NO: 178517 - DNA, 1911 bp, Artificial Sequence
  derived and/or modified sequence
atgaagaagctgcagggcgcccacctgcggaagcccgtgacccccgatctgctgatgacacccagcgaccagggggacgtcgacctagacgtagactttgcggcccaccgtgggaattggacaggaaagttagacttcctcctgtcctgcattggctactgtgttggtctcggtaatgtctggcgcttcccataccgggcctacactaacggaggtggcgctttcttggtcccctatttccttatgctggctatatgcgggatccccctcttttttcttgaactcagcctgggacaattctcttcattaggtcccctagcggtgtggaaaatctccccactgtttaagggagcaggggctgcgatgcttcttatcgtcggactcgtggccatctactacaacatgattatagcttacgtgctcttctacttgttcgcctctctcaccagtgacctgccatgggagcattgtggaaactggtggaatacagaactttgcctagaacacagggtatctaaagacggaaacggcgcattgcctttaaatctcacttgcacagtatcacctagcgaggagtattggtcaaggtatgtgcttcacattcaaggatctcagggcattggctcaccgggtgagattagatggaatctgtgtctctgccttttgctggcgtgggtaattgtttttttgtgtatactgaagggagtgaaaagctccggcaaggtggtgtatttcactgctacattcccatatctaattctgctcatgctccttgtccgtggtgtgacactccccggtgcttggaaggggatccagttttacctgacacctcagttccaccacctgctcagctctaaggtgtggatagaggctgcgcttcagatattttattccctgggcgtgggatttggcggattgcttacgttcgccagttacaacactttccaccagaacatctatagagacacattcatagttacgctcggtaacgctattacctcaatccttgctgggttcgcgatcttcagtgtcctgggttatatgtctcaggagctcggagtccccgttgatcaagttgccaaagcagggcctggtttagcattcgtggtgtatccccaggccatgactatgctccccttaagcccgttctggtccttcctctttttcttcatgctgttgaccctgggtttggattctcagtttgccttccttgaaaccattgtcaccgccgtgacagacgaattcccgtactacctgcgcccgaaaaaagcagtattctcagggttgatctgcgtagctatgtatctgatgggtctgatcctcaccacagacggcgggatgtattggttagtgctcctggatgactactccgccagtttcgggcttatggtggtcgtcatcacgacatgtctggctgttacccgggtatatgggattcagaggttttgtagggatattcacatgatgctggggttcaagcccggactctacttcagagcatgctggctgtttcttagtccagcaactcttctggccctcatggtttattcaatagttaagtaccagcctagcgagtatgggtcctaccgctttcccccatgggcggagctactcgggattctgatgggcctgctctcctgcttgatgattccagccggcatgttagtggctgtgttgagagaggaagggagcctctgggagcggttgcagcaggcaagtcgcccagctatggattggggtcccagtctggaagaaaaccgaacaggaatgtatgtggccacactcgcaggcagccagtcacccaagccgctaatggtccacatgaggaagtacggaggtataacttcttttgagaatacagcgatcgaggtggatcgcgagatagctgaagaagaggagtccatgatgtag

SEQ ID NO: 178518 - DNA, 1911 bp, Artificial Sequence
  derived and/or modified sequence
atgaaaaaactgcagggagctcacctgcggaagcccgtgaccccagacctattgatgacgccctcagatcagggtgacgtggacctcgacgtagatttcgcagcgcacagaggcaattggaccggcaagctggacttcctattaagctgtattggatattgcgtcggcctgggaaacgtgtggcgctttccctacagggcctacactaatgggggaggcgctttcctcgtgccatatttcttaatgctcgctatttgcggtattccactgttcttccttgagttgagtttagggcagtttagcagcctcgggccattagcagtctggaagattagcccactgtttaagggagctggtgccgctatgctgctgatcgtgggcttggtggctatctactacaacatgatcatcgcttacgttctcttttatctgttcgcttcgcttaccagcgatctaccttgggaacactgcggcaattggtggaacactgagctgtgtctagagcatcgggtgtctaaggatggtaacggggctttacctctgaaccttacttgtacagtctcaccgtccgaggagtactggagccggtatgtactacacattcaggggagccagggtataggatctccaggcgagatcagatggaatctgtgcttgtgtctcttgctggcgtgggtcattgtcttcttatgtatcttaaagggggttaagtcttcaggaaaggtggtttacttcactgctacctttccctacctcatcctgctgatgttgttagtccggggtgtcacactgccaggagcgtggaagggaatccagttctatctcaccccccagttccatcaccttcttagttcaaaggtgtggatagaggccgcactccagatcttctatagtctcggtgtggggttcggaggacttttaacgtttgcctcatataacacttttcatcagaacatttaccgggacacattcatcgtcactctgggtaacgccattacgtcaattttagccggattcgcaattttttccgtgttggggtacatgtcccaggaattgggcgtcccagtggatcaggttgccaaagcaggcccaggcctcgctttcgttgtgtatcctcaggctatgactatgctgccactgtccccattctggtctttcctgtttttttttatgttattaactcttggactggattcacagttcgcattcctggagacgatagtgacagccgtgacggacgagttcccttattacttgcgaccaaaaaaagcggttttctccggtctgatttgtgtggctatgtaccttatgggtctcatcctgacaaccgatggcggaatgtattggctcgtccttctggacgattatagtgccagcttcggcctgatggtcgtggtcattacaacgtgtctggctgtgacaagagtgtacggaatccagcgcttttgtcgcgatatccacatgatgcttggttttaaaccaggcctgtatttcagagcctgctggctctttctcagccctgctaccttacttgctttgatggtgtactccatcgttaagtatcaaccctcagagtacgggagttaccgtttccctccttgggccgagttattgggcatccttatggggctgctgtcatgcctgatgatccccgctggaatgcttgtggccgtacttcgggaagagggctccctctgggagagactgcagcaggcatcccgcccagctatggactggggtccctccctcgaggaaaatcgtacagggatgtacgtcgcaactctcgccggaagccagagcccaaagccactgatggtgcacatgcgcaaatatggcggtatcacctctttcgagaacaccgccatcgaggtggaccgggaaatcgccgaagaggaggaatcaatgatgtag

SEQ ID NO: 178519 - DNA, 3739 bp, Artificial Sequence
  derived and/or modified sequence
agaaagccgagggtttccgtcgcgaacccccctccccactcgctcagggctctccaatccgcagctctgcgtgcgggggcgcgcgcatccccccgccgtccgtccgtcagctgtctgtctgggtgtctatgcgggcgcagcagtgcacccttccccagcctcgggcgctgcgcagggacagacaaggcattcgcagcgccctgcccgcgctccacgcccgcagccgccagacggcagcgcctgcgtccgtgcccgccccagccggtgcgcgggagccgcgggggcaaaggcgcagtggccagcggaccatctctcgtgccctcgctctctgcgctccggggcagctgagccccggccacccgctctccaagatgaagaagctccagggagctcacctccgcaagcctgtcaccccagacctgctgatgacccccagtgaccagggcgatgtcgacctggatgtggactttgctgcacaccgggggaactggacaggcaagctggacttcctgctgtcctgcattggctactgtgtaggcctggggaatgtctggcgcttcccctatcgagcgtacaccaatggaggaggcgccttcctcgtgccctacttcctcatgctggccatctgtggcatccccctcttcttcctggagctctccctgggccagttctccagcctagggcccctggctgtctggaaaatcagccctctcttcaaaggcgccggcgcagccatgctgctcatcgtgggcttggtggccatctactacaacatgatcatcgcctacgtgctcttctacctcttcgcctccctcaccagcgacctaccctgggagcactgtggcaactggtggaacacagaactctgcctggagcacagagtctccaaggacggcaacggggccctgcccctcaacctcacctgcaccgtcagccccagcgaggagtactggagccgctacgtcctccacatccaaggcagccagggcatcggcagccctggggagatccgctggaacctctgcctctgcctgctgctggcctgggtcatcgtgttcctctgtatcctcaagggtgtgaagtcttcgggcaaggtggtgtatttcacggccacgttcccctacctcatcctgctcatgctgctggtccgcggagtcaccctcccaggggcctggaagggcatccagttctatctcaccccccagttccaccacttgttgtcttccaaggtgtggattgaagctgctcttcagatcttctattccctgggtgtgggcttcggggggctcctcacctttgcctcctacaacacgtttcaccagaacatctatagagacactttcatcgtcactctgggcaacgccatcaccagcatcctggctggctttgccatcttctccgtgctgggctacatgtctcaggagctgggcgtgcctgtggaccaagtagccaaagcaggccctggcctggcctttgtcgtctacccacaggccatgaccatgctgcctctgtcacccttctggtcctttctcttcttcttcatgcttctgactctcggcctagatagccagtttgcttttctggagaccattgtgacagctgtgacagatgagttcccatactacctgcggcccaagaaggcggtgttctcagggctcatctgcgtggccatgtacctgatggggctgatcctcaccactgatgggggcatgtactggctggtccttctggatgactacagcgccagcttcgggctgatggtggtggttatcaccacgtgccttgccgtgacacgggtgtatggcattcagaggttctgccgagacatccacatgatgctgggcttcaagccgggcctctacttcagggcctgctggctgttcctgtccccagccacgctcttggccctcatggtgtatagcatcgtcaagtaccagccctcggagtatggcagttaccgcttcccgccctgggctgagctgctgggcatcctgatgggcctgctgtcctgcctcatgatcccagctggcatgctggtggctgtgcttcgagaagagggctcactctgggagcggctccaacaggccagccggccggccatggactggggaccatcgctggaggagaaccggacgggcatgtatgtggccacgctggctgggagccagtcaccaaagccactgatggtgcacatgcgcaagtacgggggcatcaccagcttcgagaacacggccatcgaggtggaccgtgagattgcagaggaggaggagtcgatgatgtgaggcaggaggcaggcgggcagaaggccctgcccgggacctcacagtcccttcttagaagcctgcaaaggtcagctgtgccctctgggattctgagaggctatgggggggcctgccatagggatgccagtcccccagtgggggtcccttctgcagcctctgcctctcctgaaacctctgacaaccccctacacacacacacaggcatactcagacccactcaaagctgagaatgatccaactcagccctactttgcggatggacatattaaggccaggaggggagggacttgccccaggtcgcatggcagaggggacttgaacccacgcctcctgaccagccagctccctttcccatggggcagccggcaccaccttctcatctctattcagggcctacacccctccctttttggggggagcctgtccccacacaccttagcacaaccagaatcttgagttgggcagggaaggtcagggctacagaggctcttgaggctccgaggccctggggatcaaaggtcaatgagttaggtggggagaaagatccctgggggctcctgtatgcaggactcctgaaggaggtgggagctgagggccctggaggatggggaaggtttgcagagagaggaagaagagggcagggtggggaggagctctgggccagaggatgctgagctgcctgggcagagaccaagagggttggagacactagttttaccaggttacaggagggttcaagacagaaggaaaactaacagagggggagccagggatgatggggtgggcaggggatttgcatgatgaggagtatcattccagatctgtgcagagcggatcggacgggacagggtggagcggggaggcctgtgcaaagtgggaaagagctgccggtggcctgagccagggtgctggggctgcgggtggggaaaggaggccccagcacttcagacaaagaccaccccttcacccactggaccccaagccgcaaaagctggggaggtaggaagggtcactgtgagggcccagggcccctctcttcccatctcccttgtcctggtggccttcagtgtctcttccagttccaggagctgctgggaagctggccttcattgttggtgacagggcaaccatgggactaggaggtggcccatacacatggctggctggtcctgaggccacccaccttgttccaggacatgggcccgggcccggtgtgggggtagacgcagagggcagagggtagcccttggtactgtgggtccctcaaagaggagagtggggtgcagaaatgcctcagcatggctcatgcacacagcattctcccgtggggcagggttccctcatgcaacaggcctccctgtggccagcctctctgcctgtctctcgctgcgtccccccaaccccttgtgttctattggttcattgttaataaatatcaaatgaggtcacgctcctta

SEQ ID NO: 178520 - DNA, 1911 bp, Artificial Sequence
  derived and/or modified sequence
atgaagaagctgcagggcgcccacctgagaaagcccgtgacccccgacctgctgatgacccccagcgaccagggcgacgtggacctggacgtggacttcgccgcccacagaggcaactggaccggcaagctggacttcctgctgagctgcatcggctactgcgtgggcctgggcaacgtgtggagattcccctacagagcctacaccaacggcggcggcgccttcctggtgccctacttcctgatgctggccatctgcggcatccccctgttcttcctggagctgagcctgggccagttcagcagcctgggccccctggccgtgtggaagatcagccccctgttcaagggcgccggcgccgccatgctgctgatcgtgggcctggtggccatctactacaacatgatcatcgcctacgtgctgttctacctgttcgccagcctgaccagcgacctgccctgggagcactgcggcaactggtggaacaccgagctgtgcctggagcacagagtgagcaaggacggcaacggcgccctgcccctgaacctgacctgcaccgtgagccccagcgaggagtactggagcagatacgtgctgcacatccagggcagccagggcatcggcagccccggcgagatcagatggaacctgtgcctgtgcctgctgctggcctgggtgatcgtgttcctgtgcatcctgaagggcgtgaagagcagcggcaaggtggtgtacttcaccgccaccttcccctacctgatcctgctgatgctgctggtgagaggcgtgaccctgcccggcgcctggaagggcatccagttctacctgaccccccagttccaccacctgctgagcagcaaggtgtggatcgaggccgccctgcagatcttctacagcctgggcgtgggcttcggcggcctgctgaccttcgccagctacaacaccttccaccagaacatctacagagacaccttcatcgtgaccctgggcaacgccatcaccagcatcctggccggcttcgccatcttcagcgtgctgggctacatgagccaggagctgggcgtgcccgtggaccaggtggccaaggccggccccggcctggccttcgtggtgtacccccaggccatgaccatgctgcccctgagccccttctggagcttcctgttcttcttcatgctgctgaccctgggcctggacagccagttcgccttcctggagaccatcgtgaccgccgtgaccgacgagttcccctactacctgagacccaagaaggccgtgttcagcggcctgatctgcgtggccatgtacctgatgggcctgatcctgaccaccgacggcggcatgtactggctggtgctgctggacgactacagcgccagcttcggcctgatggtggtggtgatcaccacctgcctggccgtgaccagagtgtacggcatccagagattctgcagagacatccacatgatgctgggcttcaagcccggcctgtacttcagagcctgctggctgttcctgagccccgccaccctgctggccctgatggtgtacagcatcgtgaagtaccagcccagcgagtacggcagctacagattccccccctgggccgagctgctgggcatcctgatgggcctgctgagctgcctgatgatccccgccggcatgctggtggccgtgctgagagaggagggcagcctgtgggagagactgcagcaggccagcagacccgccatggactggggccccagcctggaggagaacagaaccggcatgtacgtggccaccctggccggcagccagagccccaagcccctgatggtgcacatgagaaagtacggcggcatcaccagcttcgagaacaccgccatcgaggtggacagagagatcgccgaggaggaggagagcatgatgtag

SEQ ID NO: 178521 - protein, 632 aa, Artificial Sequence
  derived and/or modified sequence
MTAEKALPLGNGKAAEEARESEAPGGGCSSGGAAPARHPRVKRDKAVHERGHWNNKVEFVLSVAGEIIGLGNVWRFPYLCYKNGGGAFLIPYVVFFICCGIPVFFLETALGQFTSEGGITCWRKVCPLFEGIGYATQVIEAHLNVYYIIILAWAIFYLSNCFTTELPWATCGHEWNTENCVEFQKLNVSNYSHVSLQNATSPVMEFWEHRVLAISDGIEHIGNLRWELALCLLAAWTICYFCIWKGTKSTGKVVYVTATFPYIMLLILLIRGVTLPGASEGIKFYLYPDLSRLSDPQVWVDAGTQIFFSYAICLGCLTALGSYNNYNNNCYRDCIMLCCLNSGTSFVAGFAIFSVLGFMAYEQGVPIAEVAESGPGLAFIAYPKAVTMMPLSPLWATLFFMMLIFLGLDSQFVCVESLVTAVVDMYPKVFRRGYRRELLILALSVISYFLGLVMLTEGGMYIFQLFDSYAASGMCLLFVAIFECICIGWVYGSNRFYDNIEDMIGYRPPSLIKWCWMIMTPGICAGIFIFFLIKYKPLKYNNIYTYPAWGYGIGWLMALSSMLCIPLWICITVWKTEGTLPEKLQKLTTPSTDLKMRGKLGVSPRMVTVNDCDAKLKSDGTIAAITEKETHF

SEQ ID NO: 178522 - protein, 208 aa, Artificial Sequence
  derived and/or modified sequence
MTAEKALPLGNGKAAEEARESEAPGGGCSSGGAAPARHPRVKRDKAVHERGHWNNKVEFVLSVAGEIIGLGNVWRFPYLCYKNGGGAFLIPYVVFFICCGIPVFFLETALGQFTSEGGITCWRKVCPLFEGIGYATQVIEAHLNVYYIIILAWAIFYLSNCFTTELPWATCGHEWNTENCVEFQKLNVSNYSHVSLQNATSPVMEFWE

SEQ ID NO: 178523 - DNA, 1899 bp, Artificial Sequence
  derived and/or modified sequence
atgaccgccgagaaggccctgcccctgggcaacggcaaggccgccgaggaggccagagagagcgaggcccccggcggcggctgcagcagcggcggcgccgcccccgccagacaccccagagtgaagagagacaaggccgtgcacgagagaggccactggaacaacaaggtggagttcgtgctgagcgtggccggcgagatcatcggcctgggcaacgtgtggagattcccctacctgtgctacaagaacggcggcggcgccttcctgatcccctacgtggtgttcttcatctgctgcggcatccccgtgttcttcctggagaccgccctgggccagttcaccagcgagggcggcatcacctgctggagaaaggtgtgccccctgttcgagggcatcggctacgccacccaggtgatcgaggcccacctgaacgtgtactacatcatcatcctggcctgggccatcttctacctgagcaactgcttcaccaccgagctgccctgggccacctgcggccacgagtggaacaccgagaactgcgtggagttccagaagctgaacgtgagcaactacagccacgtgagcctgcagaacgccaccagccccgtgatggagttctgggagcacagagtgctggccatcagcgacggcatcgagcacatcggcaacctgagatgggagctggccctgtgcctgctggccgcctggaccatctgctacttctgcatctggaagggcaccaagagcaccggcaaggtggtgtacgtgaccgccaccttcccctacatcatgctgctgatcctgctgatcagaggcgtgaccctgcccggcgccagcgagggcatcaagttctacctgtaccccgacctgagcagactgagcgacccccaggtgtgggtggacgccggcacccagatcttcttcagctacgccatctgcctgggctgcctgaccgccctgggcagctacaacaactacaacaacaactgctacagagactgcatcatgctgtgctgcctgaacagcggcaccagcttcgtggccggcttcgccatcttcagcgtgctgggcttcatggcctacgagcagggcgtgcccatcgccgaggtggccgagagcggccccggcctggccttcatcgcctaccccaaggccgtgaccatgatgcccctgagccccctgtgggccaccctgttcttcatgatgctgatcttcctgggcctggacagccagttcgtgtgcgtggagagcctggtgaccgccgtggtggacatgtaccccaaggtgttcagaagaggctacagaagagagctgctgatcctggccctgagcgtgatcagctacttcctgggcctggtgatgctgaccgagggcggcatgtacatcttccagctgttcgacagctacgccgccagcggcatgtgcctgctgttcgtggccatcttcgagtgcatctgcatcggctgggtgtacggcagcaacagattctacgacaacatcgaggacatgatcggctacagaccccccagcctgatcaagtggtgctggatgatcatgacccccggcatctgcgccggcatcttcatcttcttcctgatcaagtacaagcccctgaagtacaacaacatctacacctaccccgcctggggctacggcatcggctggctgatggccctgagcagcatgctgtgcatccccctgtggatctgcatcaccgtgtggaagaccgagggcaccctgcccgagaagctgcagaagctgaccacccccagcaccgacctgaagatgagaggcaagctgggcgtgagccccagaatggtgaccgtgaacgactgcgacgccaagctgaagagcgacggcaccatcgccgccatcaccgagaaggagacccacttctag

SEQ ID NO: 178524 - DNA, 1899 bp, Artificial Sequence
  derived and/or modified sequence
atgaccgctgaaaaggcattgcccctcggaaatgggaaggctgctgaagaggctagagagtccgaagcccccggcggtggctgctcttcagggggagctgcgcccgctcgtcacccacgagtaaagcgagataaagcagtgcatgagagagggcactggaacaacaaggtcgagttcgtcctgtcagtggcaggtgagattatcggtttgggcaatgtctggaggtttccgtacctctgttacaagaatggaggcggcgccttcctgatcccgtatgtggtcttcttcatttgctgtggaattcccgtgtttttcctggagaccgcactggggcagtttactagtgagggggggataacatgctggagaaaagtttgtccccttttcgaaggcatcggatacgctacgcaggtcattgaagcccatctgaatgtttattatataatcattttggcttgggcaattttctatcttagcaattgttttactactgaactcccttgggccacgtgcgggcacgagtggaacacagagaattgtgtcgaatttcaaaaattgaatgtcagtaactactcacacgtcagcctgcagaatgctacatccccagttatggagttttgggagcaccgcgtgctggcaatctcagatggaatcgagcatatcggtaacttacgctgggagctagcgctgtgccttctggcagcatggactatatgttacttctgcatttggaaaggcactaaaagtacagggaaggtcgtttacgtaacggctacattcccttacatcatgcttctgatcctgcttatccgaggcgttactttacctggcgcatctgagggaatcaaattctacctgtacccagacttatcacgcctatcagatccccaggtctgggtggatgcaggtacacagatcttcttctcatacgccatctgcctgggctgtttaacagcgctgggctcatataataattacaataacaactgctacagagactgcataatgctgtgttgtctcaactccggtacatcatttgtcgctggcttcgccattttctcggtcttgggctttatggcctatgaacagggagtgccaatagccgaggtggccgagtccggcccaggactcgcattcatcgcctatcctaaggccgtgacaatgatgcctttgagccccctgtgggcaacactgttttttatgatgctaatttttctgggactcgatagtcaatttgtgtgcgtggaaagcctggtcactgccgtggtcgacatgtacccaaaggtgttcaggagaggttataggagggaactcttaattctcgccctgtcagtgatctcgtatttcttgggcctggttatgctgaccgaaggtggtatgtacattttccagctgttcgacagctacgcagcgtcgggcatgtgtcttctgttcgtggccatctttgagtgtatatgcatcgggtgggtgtacggcagtaaccgattttacgataatatagaggatatgatcggctaccgccccccaagtctgatcaaatggtgctggatgatcatgactcccggcatttgtgctggtatcttcatctttttcctgattaaatacaagcccctcaagtacaataacatatacacgtaccccgcatggggctacggaattgggtggcttatggccctgagctctatgctgtgtatacctctgtggatctgcattacggtgtggaagacagagggaacactccctgagaagctacagaaactgacaaccccctccaccgatttgaagatgcgaggtaagctgggggtgtctccccgaatggtcactgttaatgactgcgacgctaagctcaaatcagacgggaccattgcagcaattacagagaaagagacccatttctag

SEQ ID NO: 178525 - DNA, 1899 bp, Artificial Sequence
  derived and/or modified sequence
atgacagctgagaaggccctgcccctgggcaatggcaaggctgctgaggaggcccgggagagcgaggcccctgggggcggctgcagcagcggcggggccgccccagcccggcacccccgggtgaagagggacaaggctgtgcatgagcggggccactggaacaacaaggtggagtttgtgctgtctgtggccggggagatcatcggcctgggcaatgtgtggaggttcccctacctgtgctacaagaatggaggaggagccttcctgatcccctacgtggtgttcttcatctgctgcggcatccctgtgttcttcctggagacagccctgggccagttcaccagcgagggcggcatcacctgctggaggaaggtgtgccccctgtttgagggcatcggctacgccacccaggtgattgaggcccacctgaatgtgtactacatcatcatcctggcctgggccatcttctacctgagcaactgcttcaccacagagctgccctgggccacctgtggccacgagtggaacacagagaactgtgtggagttccagaagctgaatgtgagcaactacagccacgtgtccctgcagaatgccaccagccctgtgatggagttctgggagcaccgggtgctggccatcagtgatggcatcgagcacatcggcaacctgcgctgggagctggccctgtgcctgctggccgcctggaccatctgctacttctgcatctggaagggcaccaagagcacaggcaaggtggtgtatgtgacagccaccttcccctacatcatgctgctgatcctgctgatccggggcgtgaccctgcccggggccagcgagggcatcaagttctacctgtacccagacctgagccggctgagtgacccccaggtgtgggtggatgctggcacccagatcttcttctcctatgccatctgcctgggctgcctgacagccctgggcagctacaacaactacaacaacaactgctacagagactgcatcatgctgtgctgcctgaacagcggcaccagctttgtggccggctttgccatcttctctgtgctgggcttcatggcctatgagcagggcgtgcccatcgccgaggtggccgagagcggccctggcctggccttcatcgcctaccccaaggctgtgaccatgatgcccctgagccccctgtgggccaccctcttcttcatgatgctgatcttcctgggcctggacagccagtttgtgtgtgtggagagcctggtgacagctgtggtggacatgtaccccaaggtgttcagaagaggctacagaagagagctgctgatcctggccctgagcgtcatctcctacttcctgggcctggtgatgctgacagagggcggcatgtacatcttccagctgtttgacagctatgctgccagcggcatgtgcctgctgtttgtggccatctttgagtgcatctgcatcggctgggtgtatggcagcaaccgcttctatgacaacatcgaggacatgattggctaccggccccccagcctcatcaagtggtgctggatgatcatgaccccaggcatctgtgccggcatcttcatcttcttcctgatcaagtacaagcccctgaagtacaacaacatctacacctacccagcctggggctatggaattggctggctgatggccctgagctccatgctgtgcatccccctgtggatctgcatcaccgtgtggaagacagagggcaccctgcctgagaagctgcagaagctgaccacccccagcacagacctgaagatgaggggcaagctgggcgtgagccccaggatggtgacagtgaatgactgtgatgccaagctgaagagtgatggcaccatcgccgccatcacagagaaggagacccacttctag

SEQ ID NO: 178526 - DNA, 1899 bp, Artificial Sequence
  derived and/or modified sequence
atgaccgccgagaaggccctgcccctgggcaacggcaaggccgccgaagaggcgcgggaatctgaagccccaggcggggggtgttccagcgggggtgccgctcccgcgaggcacccaagggtcaagagagacaaagctgtccatgagcgaggtcactggaacaacaaggtagaatttgtgctgtcagtggcaggcgagataattggattgggtaacgtatggcgcttcccttacctctgctacaaaaatggagggggtgccttcctgatcccatatgtggtgttctttatctgttgcgggattcccgtttttttcctggagactgcgttgggccagtttacatccgagggaggaattacgtgctggagaaaagtctgcccgctgtttgagggcattggatatgcaacacaggtgatcgaagcccacctgaatgtctactatatcatcatcctcgcatgggccatcttctatttgtcgaactgctttactacggaactgccttgggccacctgcggtcacgagtggaataccgagaactgtgtggaattccaaaaactgaatgtcagcaactactcacacgttagcctgcagaacgccacaagccccgttatggagttctgggagcaccgggtgctggctatctctgatggcattgagcatatcggaaatctgcgatgggagctggcactgtgccttttagctgcttggactatctgctacttctgcatttggaagggcaccaaaagtactgggaaggtggtgtacgtaacagctacctttccctacatcatgttgttaattctgctgattagaggagtgacccttcctggagctagtgagggcatcaaattctatctttaccccgatcttagtcgcctcagtgacccccaggtgtgggtggatgcgggaacccagatcttcttctcatatgccatctgcttgggctgccttactgcactcgggagctataataactacaataataattgctaccgggactgcatcatgttgtgctgcctgaattccggaacaagtttcgtggctgggtttgcaatcttttcggtcctgggctttatggcttacgaacagggggtccccattgccgaggtggccgaatcaggacccggactagccttcatcgcataccctaaggcggtcactatgatgcctctttccccactttgggcaacattattctttatgatgttaatctttttaggactcgacagtcagttcgtctgcgtcgaaagcctggtgaccgctgttgtcgacatgtatcccaaggtgtttcggaggggatataggcgcgaactgttaatcctggctctgagcgttatatcttatttcctgggattggtgatgctcacagaaggcgggatgtatatcttccagctctttgacagttatgcggcctccggtatgtgcctgctattcgtagcaatttttgagtgcatctgcatcggctgggtctacggaagtaaccgcttttacgacaatatcgaggatatgattggttacaggcctccatcactgattaagtggtgctggatgattatgactcctggaatttgcgccgggatttttattttttttctgataaagtataaaccactcaaatataataacatatacacttacccggcttggggttacggaatcggctggctcatggctctctccagtatgttgtgcatcccattatggatatgtattacagtctggaaaaccgagggaactctccctgagaagttgcagaagctcacgactcctagtaccgatcttaagatgaggggtaagctaggggtcagtccccgcatggtgacagttaatgattgcgacgcgaaattgaaaagtgacggcaccattgctgccataaccgaaaaggagactcacttctag

SEQ ID NO: 178527 - DNA, 1899 bp, Artificial Sequence
  derived and/or modified sequence
atgactgcggagaaggctctgcccctgggtaatggcaaggctgcagaggaggctcgtgagagcgaagccccaggcggagggtgtagttcaggaggagcagctcctgcacgacaccctagagttaagcgtgacaaagccgttcatgaaagggggcactggaacaataaggtcgagtttgtgctctccgttgccggagaaattatcggccttggcaatgtgtggagattcccctacctgtgttacaagaatggaggaggagccttcctcatcccttatgtggtgttcttcatatgctgcgggattcctgttttctttttagagaccgcccttgggcagttcaccagcgagggcggtataacatgttggcgcaaggtatgccctctctttgaagggatcggttacgccactcaggtgatcgaggctcatctaaacgtctactacattattatactcgcctgggctatcttctatctgtcgaattgctttaccacagaactcccttgggcaacttgcggacatgaatggaacactgagaactgtgttgaatttcaaaagctgaacgtttcaaactactcacacgtatccctgcagaatgcgacaagtcccgtcatggagttttgggaacatagggtgctcgccattagtgacgggatcgagcacattgggaatctgcgctgggagctggcactgtgcctcctggctgcttggacaatctgttacttttgtatttggaaaggcaccaagtctaccggcaaagtagtgtatgtaactgcaacgtttccgtacatcatgcttctcatcctattgattaggggggtgactttgcccggagcgagtgagggcattaagttttacctctatccagatttgtcgcgcctaagcgatcctcaggtgtgggtggacgccggtacacagattttcttctcctacgcgatttgtcttggctgcctgacagctctgggaagttacaacaactataataataactgctacagggactgcattatgttgtgctgcctgaacagcggaacctcatttgtggctggtttcgcgattttctcagtcctgggtttcatggcatacgaacagggggtgcctatcgccgaggtggccgagagcggcccaggcttggccttcatcgcataccccaaggctgtgaccatgatgcccctctcgccattgtgggccacactgttctttatgatgcttatctttttggggttagacagccaattcgtgtgcgtggagagtctagtcactgcggtggtcgacatgtaccctaaggtgttccggagaggctatagacgggaactgctcatcctcgcccttagtgtcatttcatattttctcgggctcgtgatgctgacagaaggcggtatgtacatctttcagctctttgactcctacgccgcaagtggcatgtgcctgctatttgtggctattttcgagtgcatctgcatcgggtgggtatatggtagtaataggttctacgataacattgaggacatgatcgggtacagaccaccatcactgattaagtggtgttggatgatcatgacccccggtatttgtgcaggcatctttatcttctttctgatcaaatataaacctctgaagtacaataacatctacacctatcctgcttgggggtacggcatcggctggcttatggctttatctagtatgctttgtataccactttggatctgtatcactgtgtggaagacagagggaaccctccccgaaaagctccagaagcttacaaccccctcaacagacttgaaaatgcggggaaagctgggggtaagccccaggatggtgacggtcaatgactgtgacgccaagttaaaatcagatggaacgattgcagctatcacagagaaggaaacccacttctag

SEQ ID NO: 178528 - DNA, 4296 bp, Artificial Sequence
  derived and/or modified sequence
gaaaagccagctcgcccggggcggcggcgcagagccgggccggcgcacgaggcagccagcgcggccatgacggcggagaaggcgctgcccctgggcaatgggaaggctgctgaggaggcgcgggagtccgaggcgccgggtggcggctgcagcagcgggggcgcggcgcccgcgcgccacccgcgcgtcaagcgcgacaaggcggtccacgagcgcggccactggaacaacaaggtggagttcgtgctgagcgtggccggggagatcattgggctgggcaacgtgtggcgcttcccctacctgtgctacaagaacggaggaggggcattcctgattccctacgtggtgttttttatttgctgtggaattcctgtttttttcctggagacagctctggggcagttcacaagtgaaggtggcattacgtgttggaggaaagtttgccctttatttgaaggcattggctatgcaacacaggtgattgaggcccatctgaatgtgtactacatcatcatcctggcatgggccattttttacctgagcaactgcttcactactgagctaccctgggctacctgtgggcatgagtggaacacagagaattgtgtggagttccagaaactgaatgtgagcaactacagccatgtgtctctgcagaatgccacctcccctgtcatggagttttgggagcaccgggtcctggccatctctgacgggatcgagcacatcgggaaccttcgctgggagctggccttgtgtctcttggcagcctggaccatctgttacttctgtatctggaaggggaccaagtctacaggaaaggttgtatacgtgactgcgacattcccctacatcatgctgctgatcctcctgatacgaggggtcacgttgcccggggcctcagagggcatcaagttctacttgtaccctgacctctcccggctctccgacccccaggtctgggtagatgctggaacgcagatctttttctcctatgccatttgcctgggctgtctgaccgctctgggaagttataacaattataacaacaactgctacagggactgcatcatgctctgttgcctgaacagcggcaccagcttcgtggctgggtttgccatcttctcagtcctgggttttatggcgtacgagcagggggtacccattgctgaggtggcagagtcaggccccggcctggcctttattgcgtaccccaaggcggtcaccatgatgcctctctccccgctgtgggccaccttgttcttcatgatgctcatcttcctgggcctggacagccagtttgtgtgtgtggaaagcctggtgaccgccgtggtggacatgtaccccaaggttttccggaggggttaccggcgggagctgctcatcctagccttgtctgttatctcctattttctgggcctcgtgatgttaacagagggtggcatgtacatcttccagctctttgactcctatgccgccagtgggatgtgccttctcttcgtggccatctttgagtgcatctgcatcggctgggtgtatggaagcaaccggttctatgataacattgaagacatgattggctaccggccaccgtcgctcattaagtggtgctggatgatcatgacccctgggatctgcgcggggatcttcatcttcttcttgatcaagtacaagccactcaagtacaacaacatctacacctacccagcctggggctatggcattggctggctcatggccctgtcctccatgctctgcatcccgctctggatctgcatcacagtgtggaagacggaggggacactgcccgagaaactccagaagttgacgacccccagcacagatctgaaaatgcggggcaagcttggggtgagcccacggatggtgacagttaatgactgtgatgccaaactcaagagtgacgggaccatcgcagccatcacagagaaggagacgcacttctgagcggccaccagccatctggggctcttcttcctttcttccccccgtgtatgtaaatgaattcctgaaccccatacttcacctaatggtaggggcttgcttgttttgcacaggattaattaacaagttaattttaaggtggccactgtacactgctctaaagtcatatcccctccccgcccccagtcatcatggaagtaaccactacaaagagataacactgtacggggactgccagatcttctgtcctagggcagttttaatcaatgttttctagggattaggaagaagtgtataatattgtaaaactttttttactggggttgtgggccaggtggggtggggagtgatggctgtcctcctctgtcggccttttaatgaccgttctgtgtcccatgtatgtctctgaccatccacagccgcccctcctccataccccagggataatttttccttcaaaccttccctttccaagggacactgggtttgcagacagcaaggctatgtggcagagaagaaaaagtccagcagactcaggactcctgggctgcaggcccccctctgccctgatcccatgaagtgaccttgggcactccctttccctccctgggcctcagtttccccatctcccaaatgggaggaggagccggattgggttatttcttagggattctctttgtgtgccttgctggcttccagacctgccgtggaccttggcttcctctgaagacttgcaggcaataatctccgccctcccagttgtacctcctccccacctgcttatttaaaatcaagtttattgtagaaatggtgtggtgttgatgtgtgttttccctaaaactctaatttcatctcatctgtgggcagccctgctctctggacaccagtgggtcctcagcccccatggcaggggctcctctgtctggcctgcctttttttcctggtcagctgctcttagcgccggctctgcctctccacccttggcagggctggctggagttgctgtggggactgattttctgggtggggaagcagccatctattcttgcagccatctcagccagggtctatgtcttaggaccttcctccggccttccatgagaagcagccacagggggcctggtttcctcctaaggcccttctctgtcccaggccacctcttctccctcctcctgtcccctaacctccacctaccaccatcctccctctcagttctctcccatccttgcccctggttcaggagccattctacctgcctcagtggccaggcgcaaggctacaggtgcagtcacctgttcccggccaccttccctcccatctttggcagacagaagtctcagctctcactagagggaagacctgggcatcctgctggctcctctctccgtggggcctggagtctggtgctgttccccagccagcctggctgcagacctctctggctgataccgctcttcttctttaattggacttcatatcaagcctctgccttggtttctgagctatatgagggtggggaaggcacactcttttttcctttttccttaggttcccaatattatttggtggaaacgtgggctttctccaaaccaaggcctgagtttcctgtaagggtcctctgtttttgattcacccaaaagtctgcaaacccccagcatctctgctctggccagccctgatctgaagcctgtgtctactaagagggatgcccagtgccccactgggcaggacgggaagcctagcctgggccccctctgtgcacacagttcaggcctgcccagcttcttatgggcaagccaccatcccactctcgtctccctgagctgtctggttctgcggacccaggaagggccaggctggggccctgcttgtgtttatcctcggctgctgtcttcccagcaggccccaggcaaggaggcttcccattgctgctgctaccggttctccacagatccctgtggtccgccatcgccgacacacacacacgtcgtaatgtggctaacgcttgactcacttaacactactcatggggcagggcggagggtggattgttgctttttgttttttgtaatttcctactagtatttgggtaactttgggggtggggagggcaatgtgggggcaggggaacatgtcattgtgatgacttttttgatattcattagaaacaatacatcctttctgagatatttacagtattattaaaaaatgaaaaaggttgtactgttttgcataatgaacatttttattgggcattcaaagggtgcaagattgtctgcttactcatttttaaaaattaaagaaatgaacaatcagtgtggctattcctagcaa

SEQ ID NO: 178529 - protein, 596 aa, Artificial Sequence
  derived and/or modified sequence
MAAEKQVPGGGGGGGSGGGGGSGGGGSGGGRGAGGEENKENERPSAGSKANKEFGDSLSLEILQIIKESQQQHGLRHGDFQRYRGYCSRRQRRLRKTLNFKMGNRHKFTGKKVTEELLTDNRYLLLVLMDAERAWSYAMQLKQEANTEPRKRFHLLSRLRKAVKHAEELERLCESNRVDAKTKLEAQAYTAYLSGMLRFEHQEWKAAIEAFNKCKTIYEKLASAFTEEQAVLYNQRVEEISPNIRYCAYNIGETRAKQAATMSEVEWRGRTVPVKIDKVRIFLLGLADNEAAIVQAESEETKERLFESMLSECRDAIQVVREELKPDQKQRDYILEGEPGKVSNLQYLHSYLTYIKLSTAIKRNENMAKGLQRALLQQQPEDDSKRSPRPQDLIRLYDIILQNLVELLQLPGLEEDKAFQKEIGLKTLVFKAYRCFFIAQSYVLVKKWSEALVLYDRVLKYANEVNSDAGAFKNSLKDLPDVQELITQVRSEKCSLQAAAILDANDAHQTETSSSQVKDNKPLVERFETFCLDPSLVTKQANLVHFPPGFQPIPCKPLFFDLALNHVAFPPLEDKLEQKTKSGLTGYIKGIFGFRS

SEQ ID NO: 178530 - protein, 627 aa, Artificial Sequence
  derived and/or modified sequence
MAAEKQVPGGGGGGGSGGGGGSGGGGSGGGRGAGGEENKENERPSAGSKANKEFGDSLSLEILQIIKESQQQHGLRHGDFQRYRGYCSRRQRRLRKTLNFKMGNRHKFTGKKVTEELLTDNRYLLLVLMDAERAWSYAMQLKQEANTEPRKRFHLLSRLRKAVKHAEELERLCESNRVDAKTKLEAQAYTAYLSGMLRFEHQEWKAAIEAFNKCKTIYEKLASAFTEEQAVLYNQRVEEISPNIRYCAYNIGDQSAINELMQMRLRSGGTEGLLAEKLEALITQTRAKQAATMSEVEWRGRTVPVKIDKVRIFLLGLADNEAAIVQAESEETKERLFESMLSECRDAIQVVREELKPDQKQRDYILEGEPGKVSNLQYLHSYLTYIKLSTAIKRNENMAKGLQRALLQQQPEDDSKRSPRPQDLIRLYDIILQNLVELLQLPGLEEDKAFQKEIGLKTLVFKAYRCFFIAQSYVLVKKWSEALVLYDRVLKYANEVNSDAGAFKNSLKDLPDVQELITQVRSEKCSLQAAAILDANDAHQTETSSSQVKDNKPLVERFETFCLDPSLVTKQANLVHFPPGFQPIPCKPLFFDLALNHVAFPPLEDKLEQKTKSGLTGYIKGIFGFRS

SEQ ID NO: 178531 - protein, 526 aa, Artificial Sequence [sequence omitted]

SEQ ID NO: 178532 - protein, 327 aa, Artificial Sequence
  derived and/or modified sequence
MQMRLRSGGTEGLLAEKLEALITQTRAKQAATMSEVEWRGRTVPVKIDKVRIFLLGLADNEAAIVQAESEETKERLFESMLSECRDAIQVVREELKPDQKQRDYILEGEPGKVSNLQYLHSYLTYIKLSTAIKRNENMAKGLQRALLQQQPEDDSKRSPRPQDLIRLYDIILQNLVELLQLPGLEEDKAFQKEIGLKTLVFKAYRCFFIAQSYVLVKKWSEALVLYDRVLKYANEVNSDAGAFKNSLKDLPDVQELITQVRSEKCSLQAAAILDANDAHQTETSSSQVKDNKPLVERFESTPGTDGALKRFVMLLQYHGFEMNSSLL

SEQ ID NO: 178533 - protein, 369 aa, Artificial Sequence
  derived and/or modified sequence
MAAEKQVPGGGGGGGSGGGGGSGGGGSGGGRGAGGEENKENERPSAGSKANKEFGDSLSLEILQIIKESQQQHGLRHGDFQRYRGYCSRRQRRLRKTLNFKMGNRHKFTGKKVTEELLTDNRYLLLVLMDAERAWSYAMQLKQEANTEPRKRFHLLSRLRKAVKHAEELERLCESNRVDAKTKLEAQAYTAYLSGMLRFEHQEWKAAIEAFNKCKTIYEKLASAFTEEQAVLYNQRVEEISPNIRYCAYNIGDQSAINELMQMRLRSGGTEGLLAEKLEALITQTRAKQAATMSEVEWRGRTVPVKIDKVRIFLLGLADNEAAIVQAESEETKERLFESMLSECRDAIQVVREELKPDQRDLLLPSQGQ

SEQ ID NO: 178534 - DNA, 1791 bp, Artificial Sequence
  derived and/or modified sequence
atggcggccgaaaaacaagtgcccggaggaggcggcggaggtggttcaggaggcggaggaggaagcgggggaggcggaagtggcgggggacgtggcgccggaggtgaggaaaacaaggagaacgagaggcctagcgctggcagtaaagctaataaagagttcggcgattcactgagtttagaaattctacagataattaaggagtcgcaacagcagcatggcttgaggcatggagacttccagcgttacagaggatattgtagcagacggcagaggagactgcggaagaccttgaactttaagatgggaaaccgtcataagttcacaggaaaaaaagtgacagaagagctgttgaccgataaccgttatttgctgcttgtgctgatggacgctgagcgtgcctggtcatacgccatgcagttgaaacaagaagcaaatactgagccgcgaaagagattccatctgctgtcaagattacgtaaggcagtgaagcacgcggaagaattggaaaggttgtgtgagagtaacagggtggatgcaaaaacgaaattagaggctcaagcctataccgcctatctgtccggtatgcttcgttttgaacatcaggagtggaaagcagctatcgaagcgttcaataaatgtaaaacaatttatgagaaactggcgagcgcgttcaccgaggaacaggctgtcctgtacaaccagcgcgttgaagagatctcccctaacatacgatactgcgcctacaacatcggagagactcgtgccaagcaggcagccactatgagtgaagtggagtggcggggccggaccgtgcctgtcaaaatagataaagtgaggatatttctgctgggactggctgacaatgaggctgcaattgtgcaggccgagtccgaggagactaaagaacgactctttgaatcaatgttatccgagtgtcgagatgccattcaggtagtcagagaagaactgaaaccagaccagaaacagcgtgactatatacttgagggtgagcctgggaaggttagcaacttgcaatatctgcatagttatctgacttatatcaaactatcgactgcaataaaaagaaacgagaacatggccaagggattgcaacgggccctgctgcagcagcagcccgaggatgattctaagcgcagtcctagacctcaggacctaatccggctatatgacatcatcctacaaaaccttgtcgaactgctgcaattgcccggcctggaggaggacaaggcattccagaaggagatcggcttgaagaccctggtcttcaaggcttataggtgcttcttcattgcacagtcctatgtgctcgtgaagaaatggtccgaggctctggtcctttacgatagagttctcaaatacgctaatgaagtgaattctgatgccggtgcatttaaaaatagcttgaaggatctgcccgatgtccaagagctcataactcaagtacgctccgaaaaatgcagccttcaggccgccgccatcctggatgccaacgatgcccaccagactgaaacaagctccagccaggttaaggacaataaacctctggtcgaaagatttgaaacgttttgtctggatccatctttggtgaccaagcaagccaacctagtgcattttccacccggtttccagcctatcccttgcaagccgctcttcttcgacctcgcgctgaatcacgttgccttccctcctcttgaggacaagctagagcagaaaactaaatccggattgaccggttacataaagggaatctttgggttccgcagttag

SEQ ID NO: 178535 - DNA, 1884 bp, Artificial Sequence
  derived and/or modified sequence
atggccgccgagaaacaggtccctggtggtggcgggggtggcggttccggtgggggtgggggcagcggcggtggcggttccggcggcggtaggggcgctggcggggaggaaaataaggagaatgagcgtcccagtgcaggatccaaggccaacaaagagtttggcgactctctgtccctggagattctgcagatcatcaaggagagccagcagcagcatggtctgaggcatggagacttccagcgctacagaggatattgcagccgtagacagcgccgcctccgaaaaaccctgaactttaagatgggcaacagacataaattcacaggaaagaaggtgacagaagagctgctgactgataatcgatacttgctgctggttctgatggatgcggaaagggcttggtcttacgccatgcagctgaaacaggaagcaaataccgaacctagaaagcgtttccacttgctatcgcgcttgcggaaggctgtcaagcatgcagaggagttggagcggctctgtgaaagcaacagggtcgacgctaaaaccaagttggaagctcaagcttatacagcctacctctcagggatgctccgctttgagcatcaagaatggaaggcggctattgaggcgttcaacaagtgcaagaccatatacgaaaagcttgcctcagctttcacagaggagcaggctgtgctgtacaatcaaagggtggaggagatttccccaaacattcggtattgtgcttataacattggagaccagtcagcaatcaacgagctgatgcaaatgcggctcaggtcgggaggtactgagggcctgctggccgagaaacttgaagccctgattacacaaacgcgcgccaagcaagctgccacaatgagcgaagttgaatggcgcggacggacagtacctgtgaagattgacaaggtgcggatcttcctcctgggtctggctgacaacgaagcagccattgttcaggcggaatcagaggaaacaaaggagcggttatttgaatctatgctttccgagtgccgagacgccatacaggtggtgagagaggagcttaagcccgaccagaagcagcgagattacatcctcgagggcgagccgggaaaagtgtccaatctgcagtatttacatagttacctcacctatatcaagctgtctacggcaatcaagagaaacgaaaatatggcaaagggtctgcagagggctttactccagcagcaacctgaggacgacagcaaacgaagtcccaggccccaggacctgattagactgtatgacataatcctgcagaacttggtggagctcctccagttgcctggcctagaagaggacaaagccttccaaaaggagattgggctgaagactctggtgttcaaggcgtatcgctgcttctttattgcccagagctatgtgttagttaagaaatggtccgaggcccttgtgctatatgacagggtgctgaagtacgctaacgaggtgaattctgatgcaggggcgttcaagaatagccttaaagacttacccgacgtgcaggagcttattactcaggtgcgtagcgagaagtgttctctccaagctgcagcaattctcgacgccaacgacgcccatcagaccgagacaagttcgtctcaagtgaaagataacaagccattagtcgaacgcttcgaaactttctgtctggatccttccctcgtaacaaaacaagctaatttggtccactttcctccagggttccaaccaattccatgcaaacctctgtttttcgatctcgctctgaatcacgtggcatttccccctctggaagacaagctggaacagaaaacaaaatcggggttgaccggctacatcaagggaatcttcggatttcgctcatag

SEQ ID NO: 178536 - DNA, 1581 bp, Artificial Sequence
  derived and/or modified sequence
atgggcaaccgacataagtttacaggaaagaaagttaccgaggagctcctgacagataatcgctacctgctgttggttctgatggatgccgagagagcatggagctacgcaatgcagctgaaacaggaagctaacaccgagcccagaaaacggtttcatctgctctcccggttaaggaaggctgtcaagcatgccgaggaactggaacgtttatgcgaatctaatcgagtggatgcgaagactaagttggaggcacaggcctacacagcctatctgagtggaatgctgaggtttgagcaccaagaatggaaagcagctattgaagcatttaacaaatgcaaaacgatttacgaaaagctggctagcgcattcacagaggagcaggctgtgctgtataaccagagagttgaggaaataagccccaacatccgttattgtgcctacaacattggggatcaaagcgcaataaatgaactgatgcagatgcgtctacgatctggcggcaccgaggggctgttagccgagaagttagaagcattaatcacacagacacgggctaaacaggccgcaactatgtctgaagtggagtggcgcggcagaacagttcccgtcaaaatcgacaaggtgaggatatttctgctcggactggctgacaatgaggcagcaattgtccaggcagaatccgaagaaaccaaggaaaggttgttcgagtccatgttgagtgaatgccgcgatgccatacaggttgttagagaggaattgaaacccgatcagaaacagcgggattacatcctcgagggtgagccaggcaaagtaagtaatttacagtacctacactcatatttgacctatataaagttgagcactgcgataaaacggaatgaaaatatggcaaagggcctgcaaagggccttgcttcaacagcagcccgaagatgacagtaagcggtcaccccgccctcaggacttgatcagactttacgacatcattttacagaatctcgtcgagctgctgcaactccctggtctggaggaggacaaggccttccaaaaggagatcggccttaaaactttggtgttcaaggcctacaggtgcttcttcatcgctcagagttacgtacttgtcaagaaatggagcgaggccctggtgctttacgatcgtgtgcttaagtacgctaacgaagttaactccgacgctggcgctttcaagaattctctgaaagacttgccagacgttcaggaactgatcacccaggttcggtcagagaaatgttcattacaagccgccgctatcctcgacgctaatgacgcccaccagacggagacctcctcctcacaagtgaaagacaacaaacccctggttgagcgcttcgagaccttttgtcttgacccctctctcgtcaccaagcaggcgaacctggtgcactttccgcccggatttcagcctatcccatgtaaaccactgttctttgacctcgctcttaatcacgtcgcctttccccccctagaagacaagctggagcagaagactaagagcggactaaccggctacattaaggggatttttggctttcgcagctag

SEQ ID NO: 178537 - DNA, 1110 bp, Artificial Sequence
  derived and/or modified sequence
atggccgctgagaagcaggtgcccggtgggggtgggggcggcggctctgggggcggaggggggagcggcggtgggggctcaggaggtggcagaggagccggtggcgaggaaaataaagagaacgagcggccatccgccgggtcaaaagctaacaaggagttcggtgacagcctgtcactcgaaatcctgcagatcatcaaggagagtcaacagcagcacggactgagacacggcgactttcagcggtaccgaggttactgttcaaggcgacagcgccgtctgcgtaaaacactgaacttcaagatgggaaatcgacacaaattcactggcaagaaggtgaccgaggaattactaactgataatcgctatctgctgctagtcctaatggatgccgaaagggcatggagctacgctatgcagctaaaacaggaggcaaacaccgaaccacgcaagcgctttcatctcctctcgagactgagaaaggccgtcaaacacgctgaggagctggaaaggctgtgcgagtccaatagggtggatgccaaaaccaaactggaagcccaggcatacacagcatacctgtccggcatgcttcggtttgagcatcaggagtggaaggccgcaattgaggcgttcaataagtgtaagacaatctacgaaaagcttgcatctgcatttacagaagaacaagcagtgctctacaatcagagggtcgaggaaatttcccctaatatcaggtattgtgcgtataacataggcgatcagagtgcaattaatgaactcatgcagatgcgtttgaggagcggagggacagaagggctgttggctgagaagcttgaagccctgatcacacagactcgggccaaacaagctgctactatgtccgaggttgagtggcgaggcagaactgtcccagtcaagatagataaagtccgcatctttctgttagggctggccgacaatgaagcagctattgttcaggccgagagcgaggaaacaaaggaaaggcttttcgaatccatgttaagtgagtgtcgggatgcgatccaggtcgtgcgcgaggaactgaaacccgatcaaagggatctgctgttgccttcacaagggcagtag

SEQ ID NO: 178538 - DNA, 1791 bp, Artificial Sequence
  derived and/or modified sequence
atggctgctgagaagcaggtgcctgggggcggcggcggcggcggcagcggcggcggcggcggcagcggcggcggcggcagcggcggcggcagaggagctggaggagaggagaacaaggaaaatgaaagaccttctgctggcagcaaggccaacaaggagtttggagacagcctgagcctggagatcctgcagatcatcaaggagagccagcagcagcacggcctgcggcatggagacttccagcgctaccggggctactgcagccggcggcagaggcggctgaggaagaccctgaacttcaagatgggcaacagacacaagttcaccgggaagaaggtgacagaggagctgctgacagacaaccgctacctgctgctggtgctgatggatgctgagcgggcctggagctatgccatgcagctgaagcaggaggccaacacagagcccaggaagcgcttccacctgctgagccggctgaggaaggctgtgaagcacgccgaggagctggagcggctgtgtgagagcaacagagtggatgccaagaccaagctggaggcccaggcctacacagcctacctgagcggcatgctgcgctttgagcaccaggagtggaaggccgccatcgaggccttcaacaagtgcaagaccatctatgagaagctggccagcgccttcacagaggagcaggccgtgctgtacaaccagagggtggaggagatcagccccaacatccgctactgtgcctacaacattggagagacccgggccaagcaggccgccaccatgtctgaggtggagtggaggggccgcacagtgcctgtgaagattgacaaggtgcgcatcttcctgctgggcctggccgacaatgaagctgccatcgtgcaggccgagagcgaggagaccaaggagcggctgtttgagagcatgctgtctgagtgcagagatgccatccaggtggtgcgggaggagctgaagccagaccagaagcagagggactacatcctggagggggagcccgggaaggtgagcaacctgcagtacctgcacagctacctgacctacatcaagctgagcacagccatcaagagaaatgaaaacatggccaagggcctgcagagggccctgctgcagcagcagccagaagatgacagcaagaggagcccccggccccaggacctgatccggctgtatgacatcatcctgcagaacctggtggagctgctgcagctgcccggcctggaggaggacaaggccttccagaaggagatcggcctgaagaccctggtgttcaaggcctaccgctgcttcttcatcgcccagagctatgtgctggtgaagaagtggagcgaggccctggtgctgtatgacagagtgctgaagtatgccaatgaggtgaacagtgatgctggggccttcaagaacagcctgaaggacctgcctgatgtgcaggagctgatcacccaggtgcgctctgagaagtgcagcctgcaggccgccgccatcctggatgccaatgatgcccaccagacagagaccagcagcagccaggtgaaggacaacaagcccctggtggagagatttgagaccttctgcctggaccccagcctggtgaccaagcaggccaacctggtgcacttccccccaggcttccagcccatcccctgcaagcccctcttctttgacctggccctgaaccacgtggccttcccccccctggaggacaagctggagcagaagaccaagagcggcctgaccggctacatcaagggcatcttcggcttccgctcctag

SEQ ID NO: 178539 - DNA, 1884 bp, Artificial Sequence
  derived and/or modified sequence
atggctgctgagaagcaggtgcctgggggcggcggcggcggcggcagcggcggcggcggcggcagcggcggcggcggcagcggcggcggcagaggagctggaggagaggagaacaaggaaaatgaaagaccttctgctggcagcaaggccaacaaggagtttggagacagcctgagcctggagatcctgcagatcatcaaggagagccagcagcagcacggcctgcggcatggagacttccagcgctaccggggctactgcagccggcggcagaggcggctgaggaagaccctgaacttcaagatgggcaacagacacaagttcaccgggaagaaggtgacagaggagctgctgacagacaaccgctacctgctgctggtgctgatggatgctgagcgggcctggagctatgccatgcagctgaagcaggaggccaacacagagcccaggaagcgcttccacctgctgagccggctgaggaaggctgtgaagcacgccgaggagctggagcggctgtgtgagagcaacagagtggatgccaagaccaagctggaggcccaggcctacacagcctacctgagcggcatgctgcgctttgagcaccaggagtggaaggccgccatcgaggccttcaacaagtgcaagaccatctatgagaagctggccagcgccttcacagaggagcaggccgtgctgtacaaccagagggtggaggagatcagccccaacatccgctactgtgcctacaacattggagaccagagcgccatcaatgagctgatgcagatgaggctgcggagcggcggcacagagggcctgctggccgagaagctggaggccctgatcacccagacccgggccaagcaggccgccaccatgtctgaggtggagtggaggggccgcacagtgcctgtgaagattgacaaggtgcgcatcttcctgctgggcctggccgacaatgaggccgccatcgtgcaggccgagagcgaggagaccaaggagcggctgtttgagagcatgctgtctgaatgtagagatgccatccaggtggtgcgggaggagctgaagccagaccagaagcagagggactacatcctggagggggagcccgggaaggtgagcaacctgcagtacctgcacagctacctgacctacatcaagctgagcacagccatcaagagaaatgaaaacatggccaagggcctgcagagggccctgctgcagcagcagccagaagatgacagcaagaggagcccccggccccaggacctgatccggctgtatgacatcatcctgcagaacctggtggagctgctgcagctgcccggcctggaggaggacaaggccttccagaaggagatcggcctgaagaccctggtgttcaaggcctaccgctgcttcttcatcgcccagagctatgtgctggtgaagaagtggagcgaggccctggtgctgtatgacagagtgctgaagtatgccaatgaggtgaacagtgatgctggggccttcaagaacagcctgaaggacctgcctgatgtgcaggagctgatcacccaggtgcgctctgagaagtgcagcctgcaggccgccgccatcctggatgccaatgatgcccaccagacagagaccagcagcagccaggtgaaggacaacaagcccctggtggagagatttgagaccttctgcctggaccccagcctggtgaccaagcaggccaacctggtgcacttccccccaggcttccagcccatcccctgcaagcccctcttctttgacctggccctgaaccacgtggccttcccccccctggaggacaagctggagcagaagaccaagagcggcctgaccggctacatcaagggcatcttcggcttccgctcctag

SEQ ID NO: 178540 - DNA, 1581 bp, Artificial Sequence
  derived and/or modified sequence
atgggcaacagacacaagttcaccgggaagaaggtgacagaggagctgctgacagacaaccgctacctgctgctggtgctgatggatgctgagcgggcctggagctatgccatgcagctgaagcaggaggccaacacagagcccaggaagcgcttccacctgctgagccggctgaggaaggctgtgaagcatgctgaggagctggagcggctgtgtgagagcaacagagtggatgccaagaccaagctggaggcccaggcctacacagcctacctgagcggcatgctgcgctttgagcaccaggagtggaaggccgccatcgaggccttcaacaagtgcaagaccatctatgagaagctggccagcgccttcacagaggagcaggccgtgctgtacaaccagagggtggaggagatcagccccaacatccgctactgtgcctacaacatcggggaccagagcgccatcaatgagctgatgcagatgaggctgcggagcggcggcacagagggcctgctggccgagaagctggaggccctgatcacccagacccgggccaagcaggccgccaccatgtctgaggtggagtggaggggccgcacagtgcctgtgaagattgacaaggtgcgcatcttcctgctgggcctggccgacaatgaagctgccatcgtgcaggccgagagcgaggagaccaaggagcggctgtttgagagcatgctgtctgagtgcagagatgccatccaggtggtgcgggaggagctgaagccagaccagaagcagagggactacatcctggagggggagcccgggaaggtgagcaacctgcagtacctgcacagctacctgacctacatcaagctgagcacagccatcaagagaaatgaaaacatggccaagggcctgcagagggccctgctgcagcagcagccagaagatgacagcaagaggagcccccggccccaggacctgatccggctgtatgacatcatcctgcagaacctggtggagctgctgcagctgcccggcctggaggaggacaaggccttccagaaggagatcggcctgaagaccctggtgttcaaggcctaccgctgcttcttcatcgcccagagctatgtgctggtgaagaagtggagcgaggccctggtgctgtatgacagagtgctgaagtatgccaatgaggtgaacagtgatgctggggccttcaagaacagcctgaaggacctgcctgatgtgcaggagctgatcacccaggtgcgctctgagaagtgcagcctgcaggccgccgccatcctggatgccaatgatgcccaccagacagagaccagcagcagccaggtgaaggacaacaagcccctggtggagagatttgagaccttctgcctggaccccagcctggtgaccaagcaggccaacctggtgcacttccccccaggcttccagcccatcccctgcaagcccctcttctttgacctggccctgaaccacgtggccttcccccccctggaggacaagctggagcagaagaccaagagcggcctgaccggctacatcaagggcatcttcggcttccgctcctag

SEQ ID NO: 178541 - DNA, 1110 bp, Artificial Sequence
  derived and/or modified sequence
atggctgctgagaagcaggtgcctgggggcggcggcggcggcggcagcggcggcggcggcggcagcggcggcggcggcagcggcggcggcagaggagctggaggagaggagaacaaggaaaatgaaagaccttctgctggcagcaaggccaacaaggagtttggagacagcctgagcctggagatcctgcagatcatcaaggagagccagcagcagcacggcctgcggcatggagacttccagcgctaccggggctactgcagccggcggcagaggcggctgaggaagaccctgaacttcaagatgggcaacagacacaagttcaccgggaagaaggtgacagaggagctgctgacagacaaccgctacctgctgctggtgctgatggatgctgagcgggcctggagctatgccatgcagctgaagcaggaggccaacacagagcccaggaagcgcttccacctgctgagccggctgaggaaggctgtgaagcacgccgaggagctggagcggctgtgtgagagcaacagagtggatgccaagaccaagctggaggcccaggcctacacagcctacctgagcggcatgctgcgctttgagcaccaggagtggaaggccgccatcgaggccttcaacaagtgcaagaccatctatgagaagctggccagcgccttcacagaggagcaggccgtgctgtacaaccagagggtggaggagatcagccccaacatccgctactgtgcctacaacattggagaccagagcgccatcaatgagctgatgcagatgaggctgcggagcggcggcacagagggcctgctggccgagaagctggaggccctgatcacccagacccgggccaagcaggccgccaccatgtctgaggtggagtggaggggccgcacagtgcctgtgaagattgacaaggtgcgcatcttcctgctgggcctggccgacaatgaggccgccatcgtgcaggccgagagcgaggagaccaaggagcggctgtttgagagcatgctgtctgaatgtagagatgccatccaggtggtgcgggaggagctgaagccagaccagagggacctgctgctgcccagccagggccagtag

SEQ ID NO: 178542 - DNA, 1791 bp, Artificial Sequence
  derived and/or modified sequence
atggccgccgagaagcaggtgcccggcggcggcggcggcggcggcagcggaggagggggaggatctgggggtggtggatccggagggggtagaggggcgggaggggaggagaacaaggaaaatgagcgccctagcgccggtagcaaggcaaacaaagaatttggcgactctttatccctggagatcttgcaaattataaaggaaagccaacaacagcacggcctgaggcacggggactttcagcgctacaggggatattgcagtcgcaggcagcggcgcctacggaagactctaaattttaaaatgggtaaccgtcacaagttcacaggcaaaaaggtaactgaggagctgctgaccgacaacagatatcttctgctggtgctgatggacgccgaacgcgcatggtcctacgctatgcagctgaagcaggaagccaacaccgaaccacgcaagcggttccacctactgagccggttacggaaggccgtaaaacatgcagaagagctcgagaggttgtgtgagagcaaccgagtagatgccaagactaaattggaggctcaggcctataccgcatatctgtctggcatgctcagattcgaacaccaagaatggaaagccgctatcgaggcgtttaataagtgcaagaccatatatgagaagctagcctccgctttcacagaagaacaagctgtgctttataatcagagagtggaggaaataagccctaatatccggtattgtgcctacaacattggcgagacccgcgcgaagcaggcagccaccatgagcgaggttgaatggcgtggaagaacagtccccgtgaagatagataaagttaggatctttttgctcggtttggcggataacgaagcagccatcgtgcaggccgaatcagaggagactaaggagcgactgtttgagtccatgctgtctgaatgtcgcgacgcaattcaggttgtgcgagaagagctcaagcctgaccagaagcagcgcgactatatcctggagggtgaacctggtaaggtatcaaacttgcagtatctgcattcgtacctgacttacatcaaactttccactgcaattaagagaaacgaaaacatggcaaaagggctgcagagagccttgttgcaacaacagccagaggatgattcaaagcgctctccccggccccaggatctgatcagactgtatgatatcattctgcagaacttagtggagctgttgcaactccctggtttggaggaggacaaagctttccagaaagaaatcggactgaagacgctcgtcttcaaagcatacagatgcttcttcatagctcagtcatacgtgctagtgaagaagtggagcgaggcccttgtcctctatgacagagtgctcaaatatgccaatgaagtcaacagtgatgcgggcgctttcaaaaatagcctcaaagaccttcccgacgtccaagaactgatcactcaggtgcgctcagaaaaatgcagcctgcaggccgcagccatccttgatgcgaatgatgcacaccagacggagacgtcaagcagccaagtgaaggacaataaacccctggtggaaagatttgagactttctgtttggatcccagcctggtaaccaaacaggcaaacttagtacacttcccacccgggtttcagcccatcccttgcaaacctctcttttttgatttggccctgaaccatgtagcctttccccctctggaggataagttagaacagaagacaaaatccgggctcaccggatacattaagggcatatttggcttccgctcttag

SEQ ID NO: 178543 - DNA, 1884 bp, Artificial Sequence
  derived and/or modified sequence
atggccgccgagaagcaggtgcccggcggcggcggcggcggcggctccggtggggggggaggtagcggcggtgggggcagcggtggtggtcgcggagctgggggtgaggagaataaagagaacgagcgcccaagtgctggctccaaagctaacaaggaattcggagatagtctttctctcgagatcctacaaatcataaaggagagtcagcagcagcatgggttaagacacggagactttcagaggtacaggggatactgttcccgtagacagcggcgccttcggaagacactgaacttcaagatgggaaatcggcataaattcaccggcaaaaaagtgaccgaggaactgttgaccgacaatcggtatctgctgctagtacttatggacgcagaaagagcgtggagttacgcaatgcagctgaagcaggaggcgaataccgagcccaggaagagattccacctcttgtcaagactcagaaaagcagtgaaacacgcagaggagctggagcgcctatgcgagagtaacagagtcgatgctaaaactaaactggaggcccaggcatacaccgcatatctctccggaatgctccggttcgaacaccaggaatggaaggctgctatcgaggcctttaacaaatgcaaaactatatatgaaaaactggcatcagctttcacggaggagcaggcagtgctctacaatcagcgcgtagaagaaatctcccctaatatccgttactgcgcatataatattggggatcaaagcgccattaatgaactgatgcagatgcggctgcgctccggcggcacagagggcctgttagctgagaaacttgaggctttaatcactcagactcgcgctaagcaggccgctacaatgtctgaagtggagtggcgcggcaggaccgtgcccgtgaagatcgacaaggtgcggatattcctgctgggactcgctgacaacgaggccgcgatagtgcaggccgagtcggaggaaacaaaggagcgtctttttgagtcaatgctctccgaatgtcgcgacgcaatccaggtcgtaagagaggagcttaaacctgaccagaagcaacgggactatattctggaaggtgagccagggaaagtgtccaacctccagtacctccatagctatctgacttacatcaaacttagcaccgcaattaagcgcaacgagaatatggctaagggactgcagcgcgcccttctccagcagcagcctgaagatgattcaaagaggtcgccacgccctcaggacctgattcgcctctatgatattattttacaaaacctggtggaactcctgcagcttcctggactggaagaggacaaggcctttcaaaaagagatcgggctcaagaccctggtctttaaggcttatcgctgttttttcatagctcagtcttacgttctcgtgaagaagtggtccgaagcactggtgctttatgatcgagtgctgaagtatgcaaacgaggttaatagcgacgctggcgcttttaaaaatagcctaaaagatctcccggacgtccaggaactgattacccaggtgagaagtgagaaatgctctctacaggctgccgctatcctcgatgccaatgatgcccaccagacggaaactagctcatcccaggtgaaggataacaagcccctggttgagagattcgaaacgttctgcctagaccctagcttagttactaagcaagcaaatttagtccatttccctcccggctttcagccaatcccttgcaagccactcttctttgacttggcccttaaccatgtggcctttccccccttagaagacaagctcgagcagaaaacaaagagtgggctgactgggtatatcaagggcatctttgggttccggtcgtag

SEQ ID NO: 178544 - DNA, 1581 bp, Artificial Sequence
  derived and/or modified sequence
atgggcaaccggcacaagttcaccggcaagaaggtgaccgaggagctgctgaccgataatcgatacttgttgctggtgctaatggatgctgaaagagcatggtcttacgccatgcagctaaaacaggaggccaacacagaacctcggaagcggttccatctactctccaggctgcgcaaggcagtgaagcacgcagaagagttagaacgcctctgcgaatctaacagagtggatgccaagaccaagctggaggcccaggcttacacagcttacctttccgggatgctaaggttcgagcatcaggaatggaaggcagccatcgaggcctttaacaaatgcaaaacaatctatgagaagttggccagcgcttttaccgaggagcaggccgttctatataaccagcgcgttgaagaaatatctccaaatatccggtattgcgcctacaacatcggggatcagagtgctatcaacgaattgatgcagatgaggctgcggtccgggggcactgagggattgctggccgagaaattggaggccttgatcactcagacccgcgctaagcaggcagcaaccatgtctgaggtcgaatggagaggtagaaccgttccggtcaaaattgataaggtgaggatcttccttctggggctggcagacaacgaagccgcaatagtccaggccgagagcgaggaaaccaaggaaaggcttttcgagtcaatgttgtcggaatgccgagacgcgattcaagtggtcagggaggagctgaaacccgaccagaaacagagggactatatcctcgaaggagaacctggaaaagtgagcaacctccaatatcttcattcgtacctgacatacatcaagctcagcacggccatcaagcgtaacgagaatatggcaaaagggctgcagagggcgctgctacagcagcagcccgaagatgattcaaagaggtctccccggcctcaggatctaattcggctatatgacataattctgcagaacttggtcgagctcttacagctccccggactcgaagaagataaggcttttcagaaagagatcggtctcaagactctggttttcaaggcctatagatgtttcttcatagcccaaagctacgtgcttgttaaaaagtggagtgaagcgctggtgctgtacgaccgcgtgctgaagtacgctaatgaggtgaatagcgacgcaggcgcctttaaaaatagcctgaaggatctccctgacgtgcaggagctgataacacaagttcggtccgagaaatgttcgctccaggccgcagccatactcgacgccaacgacgcccaccagacagagaccagctcctcacaagtgaaggacaataaacctctcgtggagcggtttgagactttctgcctcgacccttccctcgtgacaaagcaggctaaccttgtacatttcccccctggttttcagccaatcccctgcaaacctctatttttcgatcttgctttgaatcacgtcgcatttcctcccctggaggataagctggagcaaaaaacaaaaagtggcctcaccggctatatcaaaggcatattcggctttaggagttag

SEQ ID NO: 178545 - DNA, 1110 bp, Artificial Sequence
  derived and/or modified sequence
atggccgccgagaagcaggtgcccggcggcggcggcggcggcggctctggaggaggaggcgggtccggtggcgggggcagtgggggaggccggggagccggcggcgaagagaataaagagaacgaacgtccttccgccggatcaaaggcaaacaaagaattcggagattccctcagcctggagatcttacaaatcatcaaagaaagtcagcaacagcatggactgcggcacggagactttcagaggtacaggggttactgcagcagacgccagcggagactaagaaagacactgaatttcaaaatggggaacaggcacaagttcaccggaaagaaggtcactgaagagctgctcacagataatcggtatctgctgctcgtactgatggacgccgaaagagcctggtcctacgcgatgcaattgaagcaggaggcaaacacagagccacgtaagagattccatctgctcagtcgcctgagaaaggcggtgaagcatgccgaagaactggaacgactgtgtgaaagcaatcgggttgacgcaaaaacaaagcttgaggctcaggcgtacacagcttacttgagcggcatgctgagattcgagcatcaggagtggaaggcagctatagaggcatttaacaagtgtaagactatctacgagaagttggcctctgcgtttacggaagaacaggctgttctatacaaccagagagtggaggaaatctctcccaacatccgttattgtgcatacaatattggggaccagagtgcaattaatgaactcatgcagatgcgtctgagaagcggtggaaccgaggggctcttggccgagaagcttgaagccttgataacccaaacgcgcgctaagcaggcggccacaatgagcgaggtggaatggaggggtcgcactgttccagtaaaaattgacaaagtgcgaattttcctgttaggcctcgcggacaacgaggccgcaattgtccaggctgagtccgaggaaacaaaggagcgtttgttcgagtcaatgctttctgaatgccgggatgctatccaagtggtccgggaagagcttaagccagatcaacgggacctgctcctgcccagccagggccagtag

SEQ ID NO: 178546 - DNA, 1791 bp, Artificial Sequence
  derived and/or modified sequence
atggccgcagaaaaacaagtccccggaggtgggggtggagggggatcaggcggaggtggcggttccggaggtggtggatccggtggagggagaggagctgggggagaagagaacaaggagaatgagcggccttctgccggttctaaggctaataaggaattcggggatagcctatcacttgagatactgcagattatcaaggaaagtcagcagcagcacggcctgagacatggcgactttcaacgttatagaggctactgttcgagacgacagcgccgactgcgcaaaacgctgaatttcaagatgggcaaccgtcacaaatttactggcaagaaagttaccgaggagctactcactgataacagataccttctgctcgttctgatggatgccgagcgcgcatggtcatacgctatgcagttaaagcaggaggccaacacggaaccccgtaagaggtttcacctgttgtcacggctgcggaaagcagtgaagcacgccgaagaactggagagactgtgcgagtccaatagggttgatgcaaaaaccaagttggaggctcaggcctataccgcttatctttctggcatgcttaggtttgaacatcaggagtggaaggctgctatcgaggctttcaataagtgtaagactatctacgagaaactcgcttctgcttttacggaggaacaggccgtgctgtacaaccagcgcgtcgaggaaattagtcctaatatcagatattgcgcatataacatcggggaaacgcgcgcaaaacaggcagctaccatgtccgaagttgagtggcgcggacgcacagtccctgttaagatagataaagtacgcattttcctgctcggcctggcagataatgaagcagcaatcgtccaagcagagagcgaagagaccaaggagagattgttcgaaagtatgttgagcgagtgtcgcgatgccattcaggtcgtcagagaggaactcaagcctgaccagaaacagcgcgactatatactggagggggagcccggaaaagtttccaatctacagtatttgcacagttatctaacatacatcaagctcagcactgcaattaaaagaaatgagaacatggcaaaaggcctccaacgcgcactgctccagcagcaaccagaagacgacagcaagcgcagcccccgtccgcaagatctcatccgtctgtacgatataatactccagaatctggttgagttgttgcagcttccaggcctggaagaggacaaggccttccagaaagaaattggcctgaagacgcttgtctttaaagcttatcgatgtttcttcatcgctcagtcctacgtcctggtcaagaagtggtccgaggccctcgttctatacgaccgcgttctgaaatacgccaatgaagtgaatagtgatgccggagcctttaaaaacagcctgaaggatctcccagatgtgcaggagctcatcacccaggtccgttctgaaaaatgttcattacaggccgcagctatcttagacgcgaacgatgcccatcagaccgagacttcctcttctcaggtgaaagacaataagcctctcgtggagaggtttgagactttctgcttggatccgtctcttgtgactaagcaggcgaacctggtccattttcccccagggtttcaacctatcccctgcaaacctttattcttcgacctcgctctaaatcacgtggcttttcctcccttggaggacaagctcgaacaaaaaaccaagagtggtctcactggatatataaagggcatttttggctttcgatcatag

SEQ ID NO: 178547 - DNA, 1884 bp, Artificial Sequence
  derived and/or modified sequence
atggctgccgaaaagcaagttcccggtggagggggtgggggaggctctggagggggtggcggttccggcggaggcggatccggaggcggacggggtgccggaggcgaggaaaacaaagagaatgaacgccctagtgcaggatctaaggcaaacaaagagttcggggattcactcagcctggaaattctgcagattataaaggagtctcagcaacaacacgggctgcggcatggggatttccagcgatatcgagggtattgtagccgaaggcagaggcgtctgcgaaaaacgctgaacttcaagatggggaacaggcataaatttactggaaagaaagtgacagaggagctgctgaccgataaccgctatcttttgctggtgctgatggatgccgagagggcctggagctatgccatgcaactgaaacaggaagctaacaccgaacccaggaaacgctttcaccttcttagccgcctgcgcaaggccgtgaagcatgctgaagagctggaacgactgtgcgagtccaatcgagtggatgccaaaaccaagcttgaagcacaggcttatacagcttacctgagtggcatgctccgttttgagcaccaggaatggaaggccgctattgaggcttttaataagtgtaagaccatttacgaaaaactcgcctccgcattcaccgaggaacaagccgtcctctacaaccaaagggttgaggaaatttctccaaacatccggtactgtgcatataacattggcgatcagtccgcaataaatgaactcatgcaaatgagactcaggagcgggggaactgaaggtctgttagccgagaaactcgaagcattgatcactcaaacccgggcaaaacaggccgctaccatgagcgaggtggaatggcggggaaggaccgttccagtcaaaatagacaaggtacggatattcctcctgggactagcagacaatgaggctgccatagtgcaggcggagtctgaggagaccaaggaacggttgttcgaatctatgcttagcgagtgtagggatgccattcaggtagttcgcgaggagctgaagcctgatcagaagcagagagactacatacttgaaggagagcccggtaaagtgtctaacctgcagtacctacatagctacctcacatacattaagctaagtactgcaatcaagcgcaatgaaaacatggctaaggggctccagcgagccctccttcagcaacaacccgaagacgatagcaagcggagcccaagaccacaagacctgatccgcctgtatgacatcattttgcagaatcttgtggaactgctccagttacccggactggaggaggataaggcctttcagaaggaaattgggctgaaaactctggtgttcaaggcctaccgctgtttcttcatcgcacaaagctatgtgttggtcaagaaatggtcagaggccctagtcctgtatgaccgggtgttgaaatacgccaacgaggtcaacagtgacgctggcgcttttaagaatagtttaaaggatctccctgatgtgcaggaactcattactcaggtaaggtcagaaaagtgctctctgcaggcagccgctattctggatgcgaacgatgctcaccagacggagacatccagctcccaagtgaaagacaataagccactggttgagaggttcgaaactttttgtctcgacccctccctcgtgacaaaacaggcaaatctcgttcattttccaccagggtttcagccaatcccctgcaaacctttattcttcgatctggctttgaatcatgttgctttccctccactggaggacaaactcgagcagaaaactaagagcggcctaaccgggtacatcaagggaattttcggcttccggagctag

SEQ ID NO: 178548 - DNA, 1581 bp, Artificial Sequence
  derived and/or modified sequence
atggggaacaggcataaattcacagggaagaaggtcaccgaagagctcctcactgacaataggtatctattgctggtgcttatggatgcagagcgtgcctggtcgtatgccatgcagctgaagcaagaggcgaacacagagccacggaaaaggtttcatctgctgtccagactccggaaagcagtgaaacacgcagaggaactggagcggttatgcgaaagtaacagggtggacgccaaaactaagctggaggcccaggcctacacagcatatctatctggaatgctgcgttttgaacatcaagagtggaaagccgcaatcgaagcttttaacaagtgcaaaaccatttacgagaagctggcctccgccttcacagaagagcaagcagtcctgtataaccagcgtgtcgaggagatttcccccaatattagatattgcgcctacaacattggggatcagtcagctatcaatgagttgatgcaaatgcgtcttcgatctggaggcaccgaaggtcttctggcggaaaaactggaagccctcattacacagacgagggcaaagcaggcggctaccatgtcagaggtcgagtggcgtgggcgaacagtgcctgttaaaattgataaagtacgtattttcctactcggcctcgccgataacgaagctgctatcgtgcaggcagaatcagaggagacgaaagaaaggttgttcgagtccatgctaagtgagtgccgagatgcaatccaagttgtgcgcgaagaactgaaacctgatcagaagcagcgcgactacatcctcgagggcgaacccggtaaggtctctaacctgcagtacctccatagctatctcacttacattaagctgtcaacggcaatcaagcggaacgaaaacatggcaaaggggctgcaacgggctttactgcaacagcagcctgaggatgattccaagagatcacccaggcctcaggatctgatccgtctgtacgacattatcctgcagaatttggttgagctactacaattgccgggtttggaagaggataaagctttccagaaggaaattggccttaaaacgttggtctttaaagcctatcgctgtttttttattgcccagtcgtatgtcctcgtaaagaagtggtccgaggcactggtgctgtatgatagagtgctgaagtacgcgaacgaggtaaactctgatgctggcgcttttaagaactctctcaaggatctccccgacgtgcaggagctcataactcaggtcagatcagaaaaatgctccctgcaggctgcggctattctggacgccaacgatgctcaccaaacggaaacgtcaagcagccaggtgaaagataataagcctctggtggagcgcttcgaaacgttttgtctggatcccagcctagtgactaaacaagccaacctggtacatttcccccctggcttccagcccatcccctgcaaaccgctgttcttcgacttggcactaaatcacgtagccttcccgcctttggaggataagctagaacagaagactaagtccgggctgacagggtatataaaaggcatcttcggtttccgatcatag

SEQ ID NO: 178549 - DNA, 1110 bp, Artificial Sequence
  derived and/or modified sequence
atggcggcagagaagcaggtgccaggcggaggagggggaggaggaagcggtggcggtggcggtagtggcggaggcggttcggggggaggcagaggagcaggcggtgaggagaataaagagaacgagcggccttctgccggatccaaagctaacaaagagtttggcgacagcctcagccttgagatactgcagataattaaggagagccagcagcaacatggactgaggcacggggactttcagaggtatagaggctactgctcgcgaagacagcgtcgcctgaggaaaaccctgaactttaaaatgggaaaccggcacaagtttaccggaaagaaggtgacagaggaacttctgacagataataggtatctattgcttgtgctaatggacgccgagagggcctggtcatatgcgatgcaactgaaacaggaagccaacactgaacctaggaaaaggtttcatttgctaagtaggctaaggaaggcagtcaagcacgcagaggaacttgaacggctctgtgaatctaaccgggtggatgccaagaccaagctcgaagctcaagcttataccgcttacctgtctgggatgctccgattcgaacaccaggagtggaaggccgcaatcgaggcgttcaataagtgcaagaccatctatgaaaaactggccagcgcctttaccgaggaacaagcggtcctgtacaatcagagggtggaagaaataagccccaatatacgctactgcgcttacaatattggcgatcagtccgccatcaacgagttgatgcagatgcgtctgcgaagcgggggaaccgaggggctgctggccgaaaagttggaggccctgatcacacaaactagagcgaagcaggctgccaccatgtcggaggtcgaatggcgcggacgcacagtgcccgtgaaaatcgacaaagtcaggatcttcctcctggggcttgctgataacgaagcagccattgtccaagctgaatctgaggagaccaaggaaagactctttgaatccatgctgagcgaatgccgcgacgctattcaggtggtgcgcgaggagctgaagccggatcagcgagaccttctccttccctctcagggccaatag

SEQ ID NO: 178550 - DNA, 2398 bp, Artificial Sequence
  derived and/or modified sequence
gcaggggcaagatggctgctgagaagcaggtcccaggcggcggcggcggcggcggcagtggcggcggcggtggcagtggcggcggcggtagcggcggtggacgtggtgccggaggggaagaaaataaagaaaacgaacgcccttcggccggatcgaaggcaaacaaagaatttggggatagcctgagtttggagattcttcagattattaaggaatcccagcagcagcatggtttacggcatggagattttcagaggtacaggggctactgttcccgtagacaaagacgtcttcgaaaaacactcaacttcaagatgggtaacagacacaaattcacagggaagaaagtgactgaagagcttctgaccgataatagatacttgcttctggttctgatggatgctgaaagagcctggagctacgccatgcagctgaaacaggaagccaacactgaaccccgaaaacggtttcacttgttatctcgcctacgcaaagccgtgaagcatgcagaggaattggaacgcttgtgtgagagcaatcgcgtggatgccaagaccaaattagaggctcaggcttacacagcttacctctcaggaatgctacgttttgaacatcaagaatggaaagctgccattgaggcttttaacaaatgcaaaactatctatgagaagctagccagtgctttcacagaggagcaggctgtgctgtataaccaacgtgtggaagagatttcacccaacatccgctattgtgcatataatattggtgagactcgagccaaacaggcagctaccatgagtgaagtggagtggagagggagaacggttccagtgaagattgacaaagtgcgcattttcttattaggactggctgataacgaagcagctattgtccaggctgaaagcgaagaaactaaggagcgcctgtttgaatcaatgctcagcgagtgtcgggacgccatccaggtggttcgggaggagctcaagccagatcagaaacagagagattatatccttgaaggagagccagggaaggtgtctaatcttcaatacttgcatagctacctgacttacatcaagctatcaacggcaatcaagcgtaatgagaacatggccaaaggtctgcagagggctctgctgcagcagcagccagaggatgacagcaagcgctcaccccggccccaggacctgatccgactctatgacatcatcttacagaatctggtggaattgctccagcttcctggtttagaggaagacaaagccttccagaaagagataggcctcaagactctggtgttcaaagcttacaggtgttttttcattgctcagtcctatgtgctggtgaagaagtggagcgaagcccttgtcctgtatgacagagtcctgaaatatgcaaatgaagtaaattctgatgctggcgccttcaagaacagcctaaaggacctgcctgatgtgcaagagctcatcactcaagtgcggtcagagaagtgctccctgcaggccgcagccatccttgatgcaaacgacgctcatcaaacagagacctcctcctcccaagtcaaggacaataagcctctggttgaacggtttgagacattctgcctggacccttcccttgtcaccaagcaagccaaccttgtgcacttcccaccaggcttccagcccattccctgcaagcctttgttctttgacctggccctcaaccatgtggctttcccaccccttgaggacaagttggaacagaagaccaagagtggcctcactggatacatcaagggcatctttggattcaggagctaaccaggctcttcctcgggggcgggggagattctgactcttaatctgtattgtgagaaaatcccagcaagttccatgatattaaatccaggtctgcattggcccggggcaagagtttaacatcttcggccctgcattcctacatcttgtgtctgtacacgttcttaagcagcgtgtcaggagagcaccctgttgtcttctggtaaatgtgtgcagggtcatcctgtctcctgtacctcctgggaaaggggccgctgctgtctggtgccctgtgagctgtgattgattgcctttggtcagtaatgcgttcaggagtccacaccaggcacagatggggccttgaaacgctttgtcatgcttcttcagtaccatggatttgaaatgaactcatccttgctgtgagcatccaggagcccttgagaagtttatctatgactatgaaactggcaacgtcaccccagaattacggtcagccttattccccttcacctcccagtgaacgctaagaagtttcagacaagcagagagctctatttttagaagaaatatgttacactcagaaatgatgaaaccaaatcttatattaaaaggcaaagatg

SEQ ID NO: 178551 - DNA, 2515 bp, Artificial Sequence
  derived and/or modified sequence
ccctatcccgtcttgctctgcggcgcaggggcaagatggctgctgagaagcaggtcccaggcggcggcggcggcggcggcagtggcggcggcggtggcagtggcggcggcggtagcggcggtggacgtggtgccggaggggaagaaaataaagaaaacgaacgcccttcggccggatcgaaggcaaacaaagaatttggggatagcctgagtttggagattcttcagattattaaggaatcccagcagcagcatggtttacggcatggagattttcagaggtacaggggctactgttcccgtagacaaagacgtcttcgaaaaacactcaacttcaagatgggtaacagacacaaattcacagggaagaaagtgactgaagagcttctgaccgataatagatacttgcttctggttctgatggatgctgaaagagcctggagctacgccatgcagctgaaacaggaagccaacactgaaccccgaaaacggtttcacttgttatctcgcctacgcaaagccgtgaagcatgcagaggaattggaacgcttgtgtgagagcaatcgcgtggatgccaagaccaaattagaggctcaggcttacacagcttacctctcaggaatgctacgttttgaacatcaagaatggaaagctgccattgaggcttttaacaaatgcaaaactatctatgagaagctagccagtgctttcacagaggagcaggctgtgctgtataaccaacgtgtggaagagatttcacccaacatccgctattgtgcatataatattggggaccagtcagccatcaatgaactcatgcagatgagattgaggtctgggggcactgagggtctcttggctgaaaaattggaggctttgatcactcagactcgagccaaacaggcagctaccatgagtgaagtggagtggagagggagaacggttccagtgaagattgacaaagtgcgcattttcttattaggactggctgataacgaagcagctattgtccaggctgaaagcgaagaaactaaggagcgcctgtttgaatcaatgctcagcgagtgtcgggacgccatccaggtggttcgggaggagctcaagccagatcagaaacagagagattatatccttgaaggagagccagggaaggtgtctaatcttcaatacttgcatagctacctgacttacatcaagctatcaacggcaatcaagcgtaatgagaacatggccaaaggtctgcagagggctctgctgcagcagcagccagaggatgacagcaagcgctcaccccggccccaggacctgatccgactctatgacatcatcttacagaatctggtggaattgctccagcttcctggtttagaggaagacaaagccttccagaaagagataggcctcaagactctggtgttcaaagcttacaggtgttttttcattgctcagtcctatgtgctggtgaagaagtggagcgaagcccttgtcctgtatgacagagtcctgaaatatgcaaatgaagtaaattctgatgctggcgccttcaagaacagcctaaaggacctgcctgatgtgcaagagctcatcactcaagtgcggtcagagaagtgctccctgcaggccgcagccatccttgatgcaaacgacgctcatcaaacagagacctcctcctcccaagtcaaggacaataagcctctggttgaacggtttgagacattctgcctggacccttcccttgtcaccaagcaagccaaccttgtgcacttcccaccaggcttccagcccattccctgcaagcctttgttctttgacctggccctcaaccatgtggctttcccaccccttgaggacaagttggaacagaagaccaagagtggcctcactggatacatcaagggcatctttggattcaggagctaaccaggctcttcctcgggggcgggggagattctgactcttaatctgtattgtgagaaaatcccagcaagttccatgatattaaatccaggtctgcattggcccggggcaagagtttaacatcttcggccctgcattcctacatcttgtgtctgtacacgttcttaagcagcgtgtcaggagagcaccctgttgtcttctggtaaatgtgtgcagggtcatcctgtctcctgtacctcctgggaaaggggccgctgctgtctggtgccctgtgagctgtgattgattgcctttggtcagtaatgcgttcaggagtccacaccaggcacagatggggccttgaaacgctttgtcatgcttcttcagtaccatggatttgaaatgaactcatccttgctgtgagcatccaggagcccttgagaagtttatctatgactatgaaactggcaacgtcaccccagaattacggtcagccttattccccttcacctcccagtgaacgctaagaagtttcagacaagcagagagctctatttttagaagaaatatgttacactcagaaatgatgaaaccaaatcttatattaaaaggcaaagatg

SEQ ID NO: 178552 - DNA, 1941 bp, Artificial Sequence
  derived and/or modified sequence
ggcaagatggctgctgagaagcaggtcccaggcggcggcggcggcggcggcagtggcggcggcggtggcagtggcggcggcggtagcggcggtggacgtggtgccggaggggaagaaaataaagaaaacgaacgcccttcggccggatcgaaggggctactgttcccgtagacaaagacgtcttcgaaaaacactcaacttcaagatgggtaacagacacaaattcacagggaagaaagtgactgaagagcttctgaccgataatagatacttgcttctggttctgatggatgctgaaagagcctggagctacgccatgcagctgaaacaggaagccaacactgaaccccgaaaacggtttcacttgttatctcgcctacgcaaagccgtgaagcatgcagaggaattggaacgcttgtgtgagagcaatcgcgtggatgccaagaccaaattagaggctcaggcttacacagcttacctctcaggaatgctacgttttgaacatcaagaatggaaagctgccattgaggcttttaacaaatgcaaaactatctatgagaagctagccagtgctttcacagaggagcaggctgtgctgtataaccaacgtgtggaagagatttcacccaacatccgctattgtgcatataatattggggaccagtcagccatcaatgaactcatgcagatgagattgaggtctgggggcactgagggtctcttggctgaaaaattggaggctttgatcactcagactcgagccaaacaggcagctaccatgagtgaagtggagtggagagggagaacggttccagtgaagattgacaaagtgcgcattttcttattaggactggctgataacgaagcagctattgtccaggctgaaagcgaagaaactaaggagcgcctgtttgaatcaatgctcagcgagtgtcgggacgccatccaggtggttcgggaggagctcaagccagatcagaaacagagagattatatccttgaaggagagccagggaaggtgtctaatcttcaatacttgcatagctacctgacttacatcaagctatcaacggcaatcaagcgtaatgagaacatggccaaaggtctgcagagggctctgctgcagcagcagccagaggatgacagcaagcgctcaccccggccccaggacctgatccgactctatgacatcatcttacagaatctggtggaattgctccagcttcctggtttagaggaagacaaagccttccagaaagagataggcctcaagactctggtgttcaaagcttacaggtgttttttcattgctcagtcctatgtgctggtgaagaagtggagcgaagcccttgtcctgtatgacagagtcctgaaatatgcaaatgaagtaaattctgatgctggcgccttcaagaacagcctaaaggacctgcctgatgtgcaagagctcatcactcaagtgcggtcagagaagtgctccctgcaggccgcagccatccttgatgcaaacgacgctcatcaaacagagacctcctcctcccaagtcaaggacaataagcctctggttgaacggtttgagacattctgcctggacccttcccttgtcaccaagcaagccaaccttgtgcacttcccaccaggcttccagcccattccctgcaagcctttgttctttgacctggccctcaaccatgtggctttcccaccccttgaggacaagttggaacagaagaccaagagtggcctcactggatacatcaagggcatctttggattcaggagctaaccaggctcttcctcgggggcgggggagattctgactcttaatctgtattgtgagaaaatcccagcaagttccatgatattaaatccaggtctgcattggcccggggcaagagtttaacatcttcggccctgcattcctacatcttgtgtctgtac

SEQ ID NO: 178553 - DNA, 1974 bp, Artificial Sequence
  derived and/or modified sequence
ccctatcccgtcttgctctgcggcgcaggggcaagatggctgctgagaagcaggtcccaggcggcggcggcggcggcggcagtggcggcggcggtggcagtggcggcggcggtagcggcggtggacgtggtgccggaggggaagaaaataaagaaaacgaacgcccttcggccggatcgaaggcaaacaaagaatttggggatagcctgagtttggagattcttcagattattaaggaatcccagcagcagcatggtttacggcatggagattttcagaggtacaggggctactgttcccgtagacaaagacgtcttcgaaaaacactcaacttcaagatgggtaacagacacaaattcacagggaagaaagtgactgaagagcttctgaccgataatagatacttgcttctggttctgatggatgctgaaagagcctggagctacgccatgcagctgaaacaggaagccaacactgaaccccgaaaacggtttcacttgttatctcgcctacgcaaagccgtgaagcatgcagaggaattggaacgcttgtgtgagagcaatcgcgtggatgccaagaccaaattagaggctcaggcttacacagcttacctctcaggaatgctacgttttgaacatcaagaatggaaagctgccattgaggcttttaacaaatgcaaaactatctatgagaagctagccagtgctttcacagaggagcaggctgtgctgtataaccaacgtgtggaagagatttcacccaacatccgctattgtgcatataatattggggaccagtcagccatcaatgaactcatgcagatgagattgaggtctgggggcactgagggtctcttggctgaaaaattggaggctttgatcactcagactcgagccaaacaggcagctaccatgagtgaagtggagtggagagggagaacggttccagtgaagattgacaaagtgcgcattttcttattaggactggctgataacgaagcagctattgtccaggctgaaagcgaagaaactaaggagcgcctgtttgaatcaatgctcagcgagtgtcgggacgccatccaggtggttcgggaggagctcaagccagatcagagagacctcctcctcccaagtcaaggacaataagcctctggttgaacggtttgagacattctgcctggacccttcccttgtcaccaagcaagccaaccttgtgcacttcccaccaggcttccagcccattccctgcaagcctttgttctttgacctggccctcaaccatgtggctttcccaccccttgaggacaagttggaacagaagaccaagagtggcctcactggatacatcaagggcatctttggattcaggagctaaccaggctcttcctcgggggcgggggagattctgactcttaatctgtattgtgagaaaatcccagcaagttccatgatattaaatccaggtctgcattggcccggggcaagagtttaacatcttcggccctgcattcctacatcttgtgtctgtacacgttcttaagcagcgtgtcaggagagcaccctgttgtcttctggtaaatgtgtgcagggtcatcctgtctcctgtacctcctgggaaaggggccgctgctgtctggtgccctgtgagctgtgattgattgcctttggtcagtaatgcgttcaggagtccacaccaggcacagatggggccttgaaacgctttgtcatgcttcttcagtaccatggatttgaaatgaactcatccttgctgtgagcatccaggagcccttgagaagtttatctatgactatgaaactggcaacgtcaccccagaattacggtcagccttattccccttcacctcccagtgaacgctaagaagtttcagacaagcagagagctctatttttagaagaaatatgttacactcagaaatgatgaaaccaaatcttatattaaaaggcaaagatgacgg

SEQ ID NO: 178554 - DNA, 1791 bp, Artificial Sequence
  derived and/or modified sequence
atggccgccgagaagcaggtgcccggcggcggcggcggcggcggcagcggcggcggcggcggcagcggcggcggcggcagcggcggcggcagaggcgccggcggcgaggagaacaaggagaacgagagacccagcgccggcagcaaggccaacaaggagttcggcgacagcctgagcctggagatcctgcagatcatcaaggagagccagcagcagcacggcctgagacacggcgacttccagagatacagaggctactgcagcagaagacagagaagactgagaaagaccctgaacttcaagatgggcaacagacacaagttcaccggcaagaaggtgaccgaggagctgctgaccgacaacagatacctgctgctggtgctgatggacgccgagagagcctggagctacgccatgcagctgaagcaggaggccaacaccgagcccagaaagagattccacctgctgagcagactgagaaaggccgtgaagcacgccgaggagctggagagactgtgcgagagcaacagagtggacgccaagaccaagctggaggcccaggcctacaccgcctacctgagcggcatgctgagattcgagcaccaggagtggaaggccgccatcgaggccttcaacaagtgcaagaccatctacgagaagctggccagcgccttcaccgaggagcaggccgtgctgtacaaccagagagtggaggagatcagccccaacatcagatactgcgcctacaacatcggcgagaccagagccaagcaggccgccaccatgagcgaggtggagtggagaggcagaaccgtgcccgtgaagatcgacaaggtgagaatcttcctgctgggcctggccgacaacgaggccgccatcgtgcaggccgagagcgaggagaccaaggagagactgttcgagagcatgctgagcgagtgcagagacgccatccaggtggtgagagaggagctgaagcccgaccagaagcagagagactacatcctggagggcgagcccggcaaggtgagcaacctgcagtacctgcacagctacctgacctacatcaagctgagcaccgccatcaagagaaacgagaacatggccaagggcctgcagagagccctgctgcagcagcagcccgaggacgacagcaagagaagccccagaccccaggacctgatcagactgtacgacatcatcctgcagaacctggtggagctgctgcagctgcccggcctggaggaggacaaggccttccagaaggagatcggcctgaagaccctggtgttcaaggcctacagatgcttcttcatcgcccagagctacgtgctggtgaagaagtggagcgaggccctggtgctgtacgacagagtgctgaagtacgccaacgaggtgaacagcgacgccggcgccttcaagaacagcctgaaggacctgcccgacgtgcaggagctgatcacccaggtgagaagcgagaagtgcagcctgcaggccgccgccatcctggacgccaacgacgcccaccagaccgagaccagcagcagccaggtgaaggacaacaagcccctggtggagagattcgagaccttctgcctggaccccagcctggtgaccaagcaggccaacctggtgcacttcccccccggcttccagcccatcccctgcaagcccctgttcttcgacctggccctgaaccacgtggccttcccccccctggaggacaagctggagcagaagaccaagagcggcctgaccggctacatcaagggcatcttcggcttcagaagctag

SEQ ID NO: 178555 - DNA, 1884 bp, Artificial Sequence
  derived and/or modified sequence
atggccgccgagaagcaggtgcccggcggcggcggcggcggcggcagcggcggcggcggcggcagcggcggcggcggcagcggcggcggcagaggcgccggcggcgaggagaacaaggagaacgagagacccagcgccggcagcaaggccaacaaggagttcggcgacagcctgagcctggagatcctgcagatcatcaaggagagccagcagcagcacggcctgagacacggcgacttccagagatacagaggctactgcagcagaagacagagaagactgagaaagaccctgaacttcaagatgggcaacagacacaagttcaccggcaagaaggtgaccgaggagctgctgaccgacaacagatacctgctgctggtgctgatggacgccgagagagcctggagctacgccatgcagctgaagcaggaggccaacaccgagcccagaaagagattccacctgctgagcagactgagaaaggccgtgaagcacgccgaggagctggagagactgtgcgagagcaacagagtggacgccaagaccaagctggaggcccaggcctacaccgcctacctgagcggcatgctgagattcgagcaccaggagtggaaggccgccatcgaggccttcaacaagtgcaagaccatctacgagaagctggccagcgccttcaccgaggagcaggccgtgctgtacaaccagagagtggaggagatcagccccaacatcagatactgcgcctacaacatcggcgaccagagcgccatcaacgagctgatgcagatgagactgagaagcggcggcaccgagggcctgctggccgagaagctggaggccctgatcacccagaccagagccaagcaggccgccaccatgagcgaggtggagtggagaggcagaaccgtgcccgtgaagatcgacaaggtgagaatcttcctgctgggcctggccgacaacgaggccgccatcgtgcaggccgagagcgaggagaccaaggagagactgttcgagagcatgctgagcgagtgcagagacgccatccaggtggtgagagaggagctgaagcccgaccagaagcagagagactacatcctggagggcgagcccggcaaggtgagcaacctgcagtacctgcacagctacctgacctacatcaagctgagcaccgccatcaagagaaacgagaacatggccaagggcctgcagagagccctgctgcagcagcagcccgaggacgacagcaagagaagccccagaccccaggacctgatcagactgtacgacatcatcctgcagaacctggtggagctgctgcagctgcccggcctggaggaggacaaggccttccagaaggagatcggcctgaagaccctggtgttcaaggcctacagatgcttcttcatcgcccagagctacgtgctggtgaagaagtggagcgaggccctggtgctgtacgacagagtgctgaagtacgccaacgaggtgaacagcgacgccggcgccttcaagaacagcctgaaggacctgcccgacgtgcaggagctgatcacccaggtgagaagcgagaagtgcagcctgcaggccgccgccatcctggacgccaacgacgcccaccagaccgagaccagcagcagccaggtgaaggacaacaagcccctggtggagagattcgagaccttctgcctggaccccagcctggtgaccaagcaggccaacctggtgcacttcccccccggcttccagcccatcccctgcaagcccctgttcttcgacctggccctgaaccacgtggccttcccccccctggaggacaagctggagcagaagaccaagagcggcctgaccggctacatcaagggcatcttcggcttcagaagctag

SEQ ID NO: 178556 - DNA, 1581 bp, Artificial Sequence
  derived and/or modified sequence
atgggcaacagacacaagttcaccggcaagaaggtgaccgaggagctgctgaccgacaacagatacctgctgctggtgctgatggacgccgagagagcctggagctacgccatgcagctgaagcaggaggccaacaccgagcccagaaagagattccacctgctgagcagactgagaaaggccgtgaagcacgccgaggagctggagagactgtgcgagagcaacagagtggacgccaagaccaagctggaggcccaggcctacaccgcctacctgagcggcatgctgagattcgagcaccaggagtggaaggccgccatcgaggccttcaacaagtgcaagaccatctacgagaagctggccagcgccttcaccgaggagcaggccgtgctgtacaaccagagagtggaggagatcagccccaacatcagatactgcgcctacaacatcggcgaccagagcgccatcaacgagctgatgcagatgagactgagaagcggcggcaccgagggcctgctggccgagaagctggaggccctgatcacccagaccagagccaagcaggccgccaccatgagcgaggtggagtggagaggcagaaccgtgcccgtgaagatcgacaaggtgagaatcttcctgctgggcctggccgacaacgaggccgccatcgtgcaggccgagagcgaggagaccaaggagagactgttcgagagcatgctgagcgagtgcagagacgccatccaggtggtgagagaggagctgaagcccgaccagaagcagagagactacatcctggagggcgagcccggcaaggtgagcaacctgcagtacctgcacagctacctgacctacatcaagctgagcaccgccatcaagagaaacgagaacatggccaagggcctgcagagagccctgctgcagcagcagcccgaggacgacagcaagagaagccccagaccccaggacctgatcagactgtacgacatcatcctgcagaacctggtggagctgctgcagctgcccggcctggaggaggacaaggccttccagaaggagatcggcctgaagaccctggtgttcaaggcctacagatgcttcttcatcgcccagagctacgtgctggtgaagaagtggagcgaggccctggtgctgtacgacagagtgctgaagtacgccaacgaggtgaacagcgacgccggcgccttcaagaacagcctgaaggacctgcccgacgtgcaggagctgatcacccaggtgagaagcgagaagtgcagcctgcaggccgccgccatcctggacgccaacgacgcccaccagaccgagaccagcagcagccaggtgaaggacaacaagcccctggtggagagattcgagaccttctgcctggaccccagcctggtgaccaagcaggccaacctggtgcacttcccccccggcttccagcccatcccctgcaagcccctgttcttcgacctggccctgaaccacgtggccttcccccccctggaggacaagctggagcagaagaccaagagcggcctgaccggctacatcaagggcatcttcggcttcagaagctag

SEQ ID NO: 178557 - DNA, 1110 bp, Artificial Sequence
  derived and/or modified sequence
atggccgccgagaagcaggtgcccggcggcggcggcggcggcggcagcggcggcggcggcggcagcggcggcggcggcagcggcggcggcagaggcgccggcggcgaggagaacaaggagaacgagagacccagcgccggcagcaaggccaacaaggagttcggcgacagcctgagcctggagatcctgcagatcatcaaggagagccagcagcagcacggcctgagacacggcgacttccagagatacagaggctactgcagcagaagacagagaagactgagaaagaccctgaacttcaagatgggcaacagacacaagttcaccggcaagaaggtgaccgaggagctgctgaccgacaacagatacctgctgctggtgctgatggacgccgagagagcctggagctacgccatgcagctgaagcaggaggccaacaccgagcccagaaagagattccacctgctgagcagactgagaaaggccgtgaagcacgccgaggagctggagagactgtgcgagagcaacagagtggacgccaagaccaagctggaggcccaggcctacaccgcctacctgagcggcatgctgagattcgagcaccaggagtggaaggccgccatcgaggccttcaacaagtgcaagaccatctacgagaagctggccagcgccttcaccgaggagcaggccgtgctgtacaaccagagagtggaggagatcagccccaacatcagatactgcgcctacaacatcggcgaccagagcgccatcaacgagctgatgcagatgagactgagaagcggcggcaccgagggcctgctggccgagaagctggaggccctgatcacccagaccagagccaagcaggccgccaccatgagcgaggtggagtggagaggcagaaccgtgcccgtgaagatcgacaaggtgagaatcttcctgctgggcctggccgacaacgaggccgccatcgtgcaggccgagagcgaggagaccaaggagagactgttcgagagcatgctgagcgagtgcagagacgccatccaggtggtgagagaggagctgaagcccgaccagagagacctgctgctgcccagccagggccagtag

SEQ ID NO: 178558 - protein, 143 aa, Artificial Sequence
  derived and/or modified sequence
MSAPAQPPAEGTEGTAPGGGPPGPPPNMTSNRRLQQTQAQVEEVVDIIRVNVDKVLERDQKLSELDDRADALQAGASQFESSAAKLKRKYWWKNCKMMIMLGRWQLTQYCLVMWSFPSWTRPEEGPGGGPKSNLVSVQYPFRK

SEQ ID NO: 178559 - protein, 118 aa, Artificial Sequence
  derived and/or modified sequence
MSAPAQPPAEGTEGTAPGGGPPGPPPNMTSNRRLQQTQAQVEEVVDIIRVNVDKVLERDQKLSELDDRADALQAGASQFESSAAKLKRKYWWKNCKMMIMLGAICAIIVVVIVIYFFT

SEQ ID NO: 178560 - protein, 247 aa, Artificial Sequence
  derived and/or modified sequence
MSAPAQPPAEGTEGTAPGGGPPGPPPNMTSNRRLQQTQAQVEEVVDIIRVNVDKVLERDQKLSELDDRADALQAGASQFESSAAKLKRKYWWKNCKMMIMLGAICAIIVVVIVIYFYLRMYHPFPVVHCHPHSCPLPSVCSLNTLPHPPSSIPAQASPSPIPPFSLRSFALCPSTLEMLLVAQSKSLPEEQQLAPPPCLLFLYSQVPPKPQRVGGQGKGQGGEWLRRSTHEAAQTWEEKSIGAHGDF

SEQ ID NO: 178561 - DNA, 357 bp, Artificial Sequence
  derived and/or modified sequence
atgagcgcccccgcccagccccccgccgagggcaccgagggcaccgcccccggcggcggcccccccggccccccccccaacatgaccagcaacagaagactgcagcagacccaggcccaggtggaggaggtggtggacatcatcagagtgaacgtggacaaggtgctggagagagaccagaagctgagcgagctggacgacagagccgacgccctgcaggccggcgccagccagttcgagagcagcgccgccaagctgaagagaaagtactggtggaagaactgcaagatgatgatcatgctgggcgccatctgcgccatcatcgtggtggtgatcgtgatctacttcttcacctag

SEQ ID NO: 178562 - DNA, 744 bp, Artificial Sequence
  derived and/or modified sequence
atgagcgcccccgcccagccccccgccgagggcaccgagggcaccgcccccggcggcggcccccccggccccccccccaacatgaccagcaacagaagactgcagcagacccaggcccaggtggaggaggtggtggacatcatcagagtgaacgtggacaaggtgctggagagagaccagaagctgagcgagctggacgacagagccgacgccctgcaggccggcgccagccagttcgagagcagcgccgccaagctgaagagaaagtactggtggaagaactgcaagatgatgatcatgctgggcgccatctgcgccatcatcgtggtggtgatcgtgatctacttctacctgagaatgtaccaccccttccccgtggtgcactgccacccccacagctgccccctgcccagcgtgtgcagcctgaacaccctgccccacccccccagcagcatccccgcccaggccagccccagccccatcccccccttcagcctgagaagcttcgccctgtgccccagcaccctggagatgctgctggtggcccagagcaagagcctgcccgaggagcagcagctggccccccccccctgcctgctgttcctgtacagccaggtgccccccaagccccagagagtgggcggccagggcaagggccagggcggcgagtggctgagaagaagcacccacgaggccgcccagacctgggaggagaagagcatcggcgcccacggcgacttctag

SEQ ID NO: 178563 - DNA, 357 bp, Artificial Sequence
  derived and/or modified sequence
atgagtgcaccagcccagccccctgcggaagggacagagggaaccgctcccggtggggggcctcccgggccaccccctaatatgacttctaatagacgcctccagcagactcaggcccaagtagaggaggttgtcgatattatcagggttaatgtcgacaaagttttagagcgtgatcagaaactgagcgagttggatgaccgtgccgatgccctgcaagccggcgcctcgcagtttgaatcaagcgctgcgaagctgaagcgcaaatactggtggaagaattgtaagatgatgatcatgctaggtgcaatttgtgcgatcattgtggtggtgatagtgatttatttttttacctag

SEQ ID NO: 178564 - DNA, 744 bp, Artificial Sequence
  derived and/or modified sequence
atgtccgctcccgcacagcctcccgcagaggggaccgaggggacggcccccggaggaggaccaccaggacccccccccaatatgaccagcaacagacggttgcagcagacacaggcccaagttgaggaagttgttgatattattagagtgaacgtagacaaagttcttgagcgggatcagaagctgtcagagctcgacgatagggcagatgcgcttcaggccggagccagccagtttgaaagtagtgccgccaagctaaagcggaaatactggtggaaaaactgcaagatgatgataatgcttggcgctatctgtgccataattgtggtcgtaatcgtaatttacttttacctccgtatgtaccacccctttcctgtggttcattgccacccccacagttgtcccttgccaagcgtgtgttctctcaacacgctcccacacccaccctccagtattcccgcccaagcaagcccaagccccatccccccattttccctccgcagcttcgccttgtgcccgtctaccttggaaatgctgttggtggctcagtctaaatccctccctgaagagcaacaacttgccccgccaccatgtctgctcttcctctattcacaggtgccgccaaaaccccagcgtgttggcggccaggggaagggccaaggcggggagtggctgcgaaggtctacacacgaggcagcgcagacgtgggaggaaaaatccattggcgcgcatggtgacttttag

SEQ ID NO: 178565 - DNA, 357 bp, Artificial Sequence
  derived and/or modified sequence
atgtctgccccagcccagcccccagctgagggcacagagggcacagcccctgggggcggccccccaggccccccacccaacatgaccagcaacagaaggctgcagcagacccaggcccaggtggaggaggtggtggacatcatccgggtgaatgtggacaaggtgctggagcgggaccagaagctgtctgagctggatgacagagcagatgccctgcaggccggggccagccagtttgagagcagcgctgccaagctgaagaggaagtactggtggaagaactgcaagatgatgatcatgctgggcgccatctgtgccatcatcgtggtggtgattgtcatctacttcttcacctag

SEQ ID NO: 178566 - DNA, 744 bp, Artificial Sequence
  derived and/or modified sequence
atgtctgccccagcccagcccccagctgagggcacagagggcacagcccctgggggcggccccccaggccccccacccaacatgaccagcaacagaaggctgcagcagacccaggcccaggtggaggaggtggtggacatcatccgggtgaatgtggacaaggtgctggagcgggaccagaagctgtctgagctggatgacagagcagatgccctgcaggccggggccagccagtttgagagcagcgctgccaagctgaagaggaagtactggtggaagaactgcaagatgatgatcatgctgggcgccatctgtgccatcatcgtggtggtgattgtcatctacttctacctgaggatgtaccaccccttccctgtggtgcactgccacccccacagctgccccctgcccagcgtgtgcagcctgaacaccctgccccacccccccagcagcatcccagcccaggccagccccagccccatcccccccttcagcctgcggagctttgccctgtgccccagcaccctggagatgctgctggtggcccagagcaagagcctgcctgaggagcagcagctggcccccccaccctgcctgctcttcctgtacagccaggtgccccccaagccccagagggtgggcggccagggcaagggccagggcggggagtggctgcggcgcagcacccatgaggccgcccagacctgggaggagaagagcattggagcccacggggacttctag

SEQ ID NO: 178567 - DNA, 357 bp, Artificial Sequence
  derived and/or modified sequence
atgagcgcccccgcccagccccccgccgagggcaccgagggcaccgctcctggaggcggcccgcccggcccaccccctaacatgactagcaatcgcagacttcaacagactcaggcccaggtggaggaggtggtggatataatccgtgtcaatgtggacaaggtcctcgaaagagaccaaaagcttagtgaattggacgacagagcagacgccctgcaggccggggcgagtcagttcgagagtagcgctgccaaactcaagcgaaaatactggtggaaaaactgtaaaatgatgatcatgctgggcgccatctgtgcaattatcgtggtggtgattgttatctacttctttacctag

SEQ ID NO: 178568 - DNA, 744 bp, Artificial Sequence
  derived and/or modified sequence
atgagcgcccccgcccagccccccgccgagggcaccgagggcaccgcccctggtgggggtccacctggtcctccaccaaacatgacgtcgaatagaaggcttcaacaaacgcaggcccaggttgaggaggtcgttgacatcattcgagtgaacgtggacaaagtgttggaaagagaccagaagctctctgagttagacgaccgcgccgatgcactacaggccggcgcctctcagtttgaaagcagtgcagctaagcttaaaagaaaatactggtggaagaactgtaagatgatgatcatgctcggcgcgatctgtgctatcatagtcgtagtgattgtgatctacttctacttgaggatgtaccatccatttcctgtggtacattgccacccacatagctgcccactgccctctgtatgcagtctcaacactctgccacaccctcctagcagcattcccgcccaggctagtcccagccccatcccacctttttcccttcgaagttttgcgctgtgtccctctacattagagatgctgttagtggcccaaagcaagagtctccccgaggaacagcagctggcccccccgccctgtctgcttttcctttacagtcaggtaccaccgaagccgcagagagttggcgggcagggaaaaggtcaggggggagaatggctccggcgatccacgcatgaggctgcgcagacatgggaggaaaagtctatcggggcacatggggatttttag

SEQ ID NO: 178569 - DNA, 357 bp, Artificial Sequence
  derived and/or modified sequence
atgagtgcacccgctcagccccctgctgagggtacggagggcaccgcccctggcggaggaccaccgggtccccctccaaatatgacaagcaaccgacggttgcaacaaacccaggctcaggtggaggaggtcgttgacataatcagggtgaacgtggacaaggtacttgagagagaccagaagttatcagaattggatgaccgcgcagacgcactccaggcgggtgctagtcaattcgaatccagcgcggctaaactgaagcgcaaatactggtggaagaattgcaagatgatgatcatgcttggagccatatgtgcgattattgtcgtggtgattgttatttatttcttcacttag

SEQ ID NO: 178570 - DNA, 744 bp, Artificial Sequence
  derived and/or modified sequence
atgtccgccccagctcagcctccagcagaaggaaccgagggcacagccccaggagggggtcccccagggccaccgccaaatatgacctccaaccgcagactccaacaaacacaggcgcaggtggaagaggtggttgatattatcagagtcaacgtcgacaaggtgctcgagagggaccagaagctgagcgaactggacgatagggcagacgccctacaggccggtgcctcccagttcgagtccagtgctgccaaactcaagcggaaatattggtggaaaaactgcaaaatgatgattatgctgggcgctatctgcgccattattgttgtcgtaatcgtcatctacttttacctcagaatgtatcatcctttcccagttgtgcattgtcacccccacagctgtcccctgccctccgtctgttctttgaacacattaccccatcccccttccagcatacccgctcaggcatcaccttcacccattcctccattctctctgcgttctttcgcattgtgcccaagtacgctggagatgttgctcgttgcgcagtcaaagagcctgcctgaggaacagcagctagctccaccaccatgcctgctgttcttgtactctcaagtgccccctaagccccaaagggtcggcggacagggcaaaggtcaggggggtgaatggctgaggcggagcacacatgaagctgcccagacctgggaggagaagtccatcggagcacacggggacttttag

SEQ ID NO: 178571 - DNA, 1113 bp, Artificial Sequence
  derived and/or modified sequence
agtaagttccagcgcagctagaccgcggggtagtcggcgcgaggcggagcttggcagttccgtccacttcagccgcagcgtccctcaccgggtgtctcgccgcagcctccggagaggaacagaccctcactctctctgtcagaaaaatgtctgctccagctcagccacctgctgaagggacagaagggactgccccaggtgggggtccccctggccctcctcctaacatgaccagtaacagacgactacagcaaacccaggcacaagtggaggaggtggtggacatcatacgtgtgaacgtggacaaggtcctggagagggaccagaagctgtcagagctggatgaccgagctgatgccttgcaggcaggagcatcacaatttgagagcagtgctgccaagctaaagaggaagtattggtggaaaaactgcaagatgatgatcatgctgggagccatctgtgccatcatcgtggtagttattgtaatctacttttttacttgagaatgtaccaccccttccctgttgtccattgccatccacattcatgtcctctgccctctgtttgctctctcaacacacttccccacccaccgtcctccattccagcccaggcttctccatcacccattcctcctttttcgttgcgttcatttgcactctgtccctcaacactagaaatgctgctcgtggcacaatctaagtcattacccgaagagcaacagctggcgcctcctccctgcctgctttttctgtactctcaagttcccccaaagccccaaagagttggaggccaagggaaggggcagggaggggagtggctgaggcgaagtacccatgaagctgcccagacttgggaggagaagagtatcggtgcccatggtgacttctagaaaacctggccactggtaggagctagggaggggctgggaagatggcagctcactcagtactgcctggtcatgtggagctttccttcctggaccaggcctgaagagggtcctgggggtggaccaaagtccaacttggtttcagtgcagtacccttttcgaaagtaaaaacttgttttttgtagttatttctaatctgttcgtccaggattttccgtgtcttt

SEQ ID NO: 178572 - DNA, 1111 bp, Artificial Sequence
  derived and/or modified sequence
agtaagttccagcgcagctagaccgcggggtagtcggcgcgaggcggagcttggcagttccgtccacttcagccgcagcgtccctcaccgggtgtctcgccgcagcctccggagaggaacagaccctcactctctctgtcagaaaaatgtctgctccagctcagccacctgctgaagggacagaagggactgccccaggtgggggtccccctggccctcctcctaacatgaccagtaacagacgactacagcaaacccaggcacaagtggaggaggtggtggacatcatacgtgtgaacgtggacaaggtcctggagagggaccagaagctgtcagagctggatgaccgagctgatgccttgcaggcaggagcatcacaatttgagagcagtgctgccaagctaaagaggaagtattggtggaaaaactgcaagatgatgatcatgctgggagccatctgtgccatcatcgtggtagttattgtaatctacttttacttgagaatgtaccaccccttccctgttgtccattgccatccacattcatgtcctctgccctctgtttgctctctcaacacacttccccacccaccgtcctccattccagcccaggcttctccatcacccattcctcctttttcgttgcgttcatttgcactctgtccctcaacactagaaatgctgctcgtggcacaatctaagtcattacccgaagagcaacagctggcgcctcctccctgcctgctttttctgtactctcaagttcccccaaagccccaaagagttggaggccaagggaaggggcagggaggggagtggctgaggcgaagtacccatgaagctgcccagacttgggaggagaagagtatcggtgcccatggtgacttctagaaaacctggccactggtaggagctagggaggggctgggaagatggcagctcactcagtactgcctggtcatgtggagctttccttcctggaccaggcctgaagagggtcctgggggtggaccaaagtccaacttggtttcagtgcagtacccttttcgaaagtaaaaacttgttttttgtagttatttctaatctgttcgtccaggattttccgtgtcttt

SEQ ID NO: 178573 - protein, 116 aa, Artificial Sequence
  derived and/or modified sequence
MSATAATAPPAAPAGEGGPPAPPPNLTSNRRLQQTQAQVDEVVDIMRVNVDKVLERDQKLSELDDRADALQAGASQFETSAAKLKRKYWWKNLKMMIILGVICAIILIIIIVYFST

SEQ ID NO: 178574 - DNA, 351 bp, Artificial Sequence
  derived and/or modified sequence
atgagcgccaccgccgccaccgccccccccgccgcccccgccggcgagggcggcccccccgcccccccccccaacctgaccagcaacagaagactgcagcagacccaggcccaggtggacgaggtggtggacatcatgagagtgaacgtggacaaggtgctggagagagaccagaagctgagcgagctggacgacagagccgacgccctgcaggccggcgccagccagttcgagaccagcgccgccaagctgaagagaaagtactggtggaagaacctgaagatgatgatcatcctgggcgtgatctgcgccatcatcctgatcatcatcatcgtgtacttcagcacctag

SEQ ID NO: 178575 - DNA, 351 bp, Artificial Sequence
  derived and/or modified sequence
atgtcagccacagcagccaccgctccgcccgcagcccccgccggtgaaggaggcccaccagcccccccaccaaacttgaccagcaatcggaggctgcagcagactcaggctcaggtggacgaagtggttgatatcatgcgagtcaatgtggacaaggtgctggaacgagaccaaaagctgtcagagttggatgatcgcgctgatgctctgcaggccggggcttctcagttcgaaacgtcagcggctaagctgaagagaaagtactggtggaaaaaccttaagatgatgatcattctcggagtaatctgcgccattattttaataattattatcgtgtatttctcaacatag

SEQ ID NO: 178576 - DNA, 351 bp, Artificial Sequence
  derived and/or modified sequence
atgtctgccacagctgccacagcccctcctgctgccccagctggggagggcggccccccagcccccccacccaacctgaccagcaacagaaggctgcagcagacccaggcccaggtggatgaggtggtggacatcatgagggtgaatgtggacaaggtgctggagcgggaccagaagctgtctgagctggatgacagagcagatgccctgcaggccggggccagccagtttgagaccagcgctgccaagctgaagaggaagtactggtggaagaacctgaagatgatgatcatcctgggcgtcatctgtgccatcatcctgatcatcatcatcgtgtacttcagcacctag

SEQ ID NO: 178577 - DNA, 351 bp, Artificial Sequence
  derived and/or modified sequence
atgagcgccaccgccgccaccgccccccccgccgcccccgccggcgaaggcggcccacctgcccctccacctaatctgacatcaaatagacgactgcagcagacacaggcccaggtggatgaagtggtggatattatgcgggtgaatgttgacaaagtcctggaacgggatcagaaactgagtgagctcgacgaccgtgccgacgcgctgcaggccggtgcctcccaattcgaaactagcgctgccaagctgaagcgcaagtactggtggaagaatcttaaaatgatgatcattctgggggtcatctgtgctattatcctgataataataattgtgtacttctctacatag

SEQ ID NO: 178578 - DNA, 351 bp, Artificial Sequence
  derived and/or modified sequence
atgtccgcgacagcagccaccgctcccccagcagcacccgctggtgagggaggtccaccagcccctcctccaaatcttacaagcaaccgccgtttgcagcaaacccaggcgcaggttgacgaggtggttgacattatgcgcgtgaacgttgacaaggttctcgaaagagatcagaagctctctgagctggacgatagagccgacgcgttacaagctggggcttctcagtttgaaacctctgccgcaaagttaaagcgtaaatactggtggaaaaaccttaaaatgatgatcatactcggagtaatctgcgccatcatactgatcatcattatcgtctacttctccacttag

SEQ ID NO: 178579 - DNA, 2153 bp, Artificial Sequence
  derived and/or modified sequence
atctttccgtcccgggcagccagcgccagtcggagccagcgcgagccgccgccgccatcactgccgctgccaagtcctccacccgctgcccccgccatgtctgctaccgctgccacggccccccctgctgccccggctggggagggtggtccccctgcaccccctccaaacctcaccagtaacaggagactgcagcagacccaggcccaggtggatgaggtggtggacatcatgagggtgaacgtggacaaggtcctggagcgagaccagaagctgtcggagctggacgaccgtgcagatgcactccaggcgggggcctcccagtttgaaacaagcgcagccaagctcaagcgcaaatactggtggaaaaacctcaagatgatgatcatcttgggagtgatttgcgccatcatcctcatcatcatcatagtttacttcagcacttaaatccccgaggagtctgccctgcctagagaagggcctctcccccaaccctcagccgttcctccacctctcagccatatctttcagcccccactcccctggatccgtgtgtgtgtgtgtccgtgtgtgtgtccccctgtaaatagccagctgttatttatacatatataatattatatatatttggtctgtttgtagttttattactagatgatttttccggttgtccttaacaccccttcctgaggttcccttcacccctctctcttgccttccttccctttccctttcttcctgactagccccaagtcccttcatttgcatctgctatgcaatagtccctctcctttccttcttcttccctcagatttagctgatccttcctcccaccctggccttcctttcctctttcctcctcactctccccgtcatgctccctctgccccgccctcaaaaaaaaaaaaaaaaaaaaaaaaacaacagcacctgtccaggcttccttaggtacatcttctttgtatccattgggaggctctgagactggccccacttggtcctaagaatcccaaggtctttgggagcgtccagcatgttaattagcgtatcattacatactgctatccctttccatttctttttgttccatcactcttctctcaacctgtgtttctttttttactgaggagttagtccccattagttcttgtatcacattttcatttgcacgacattactcgcaggtggtggggagcctgggcttttggggaaccaggctgctctggtccccagcattgcctcctcctagcccctctagtccagtttgcctcccttaccctcattttccaaacctcttgtaccctcctctccctcccccagctggtatgtaagtgtcttgaagttcagtatgttatgatggaccaataattctgccacttcgggtttctccctacattcctgctccccagttttcatgtggggtactcaactgacattcccatggggtttccctcccatctgcctgatccacctcctcctcccaccaggagagttgggggttggccacaattgatctcttgtgagaggggtggctaccagtgtgtgtgtgggggtcatcactgccttggggaggagtggggcagggcagagaatccccccaattcctgcctgaaatctctggcctcacccctgctgggggttggactgaaaaccctcctccccaatttggggggtgttgccccatcactgcccagctcctctgactgccccccctgaatttagggtgggggtactagtcactgccaatgtgtgtatgggacttgctggaaaacggggatgcttgcccctctccaggactattgagcccagagagagctgtcctctcattgggtgaactgattgaggaagggtctattgtctttttaaatggcacaattttaagggtttgagggtacagtcccttaacctgccacgggagggggcccccaaactttcttccccccacacttctggttttctgtgtggagggggagcagggatatctaagctgtggtgtgaaagggtaggagagatgctggaggtgggggtgctgtgttttagaccccccatattatcccagtgtcccctgcccccctcttcccccaccccatgcccccaattctgtggcgcatccagattgtgaaaatgtacaataaatgtgtaatgagtaacca

SEQ ID NO: 178580 - protein, 261 aa, Artificial Sequence
  derived and/or modified sequence
MASQLQNRLRSALALVTGAGSGIGRAVSVRLAGEGATVAACDLDRAAAQETVRLLGGPGSKEGPPRGNHAAFQADVSEARAARCLLEQVQACFSRPPSVVVSCAGITQDEFLLHMSEDDWDKVIAVNLKGTFLVTQAAAQALVSNGCRGSIINISSIVGKVGNVGQTNYAASKAGVIGLTQTAARELGRHGIRCNSVLPGFIATPMTQKVPQKVVDKITEMIPMGHLGDPEDVADVVAFLASEDSGYITGTSVEVTGGLFM

SEQ ID NO: 178581 - DNA, 786 bp, Artificial Sequence
  derived and/or modified sequence
atggcaagtcagctccagaatagacttagatccgccttggcactggtcaccggcgccggctcaggcataggcagggccgtgtcagtccgcctggcgggagagggcgccaccgtggcagcttgcgaccttgaccgcgccgcagctcaggagactgttaggcttctgggcggccctggttctaaggaaggtccgccacggggaaatcatgcggccttccaggccgatgtcagcgaggcgcgcgccgccagatgcctgctggagcaggtgcaggcctgcttcagtcgccctccttcagttgtggtgtcatgcgccgggatcactcaggacgaattcctgctgcacatgtcagaagatgattgggataaagtgatcgcagtgaatttgaaaggaacttttctggttactcaagctgccgcccaggccctagtctctaacgggtgtagaggttcgattatcaacatctctagtattgtcgggaaggtgggcaacgtcggacagacgaactatgccgcgagcaaagccggcgtcatagggctgactcagacggccgcccgggaactcggaaggcatggtattcgatgtaacagtgtgctgccagggttcatcgcaacccccatgactcagaaggtgccgcaaaaagtggtggacaaaatcactgagatgattcctatgggacatctgggcgaccctgaagacgtggcggatgttgtcgcttttttggcctcagaggacagcggttatataacaggtacctctgtagaagtgacagggggacttttcatgtag

SEQ ID NO: 178582 - DNA, 786 bp, Artificial Sequence
  derived and/or modified sequence
atggctagccagttgcaaaatcgcttgcggagtgcattagcccttgtaaccggggcagggtccgggattggccgtgcggtgtccgtgagattggccggagaaggtgcaactgtggccgcttgtgatctggatagagccgccgcccaggagaccgtgagactcctggggggtcctggcagcaaggagggaccaccccgggggaaccatgcggctttccaggcagatgtgtctgaggcccgagctgctcgatgtctactggagcaggtccaggcttgtttctccagaccaccctcagtcgttgtgtcttgcgctggcatcactcaagacgagtttctgctccacatgagcgaggacgattgggacaaagtcattgctgtcaatctcaaggggacattcctggtcacccaagccgctgcccaagcattggtgtctaacggctgcaggggctcaatcatcaacatatcaagtatagtgggaaaagtggggaatgtcgggcagacaaactacgccgcatctaaagcaggcgtcattggtctcacacagacagctgccagggagttaggcagacatggcatcagatgtaactccgtgcttcccggattcattgctactccaatgacacaaaaggtcccccaaaaggtggtcgataagattacggagatgataccaatgggtcatcttggggacccagaggacgtggctgatgtggtggcttttctcgctagtgaggactctggttacatcaccggcacctcggtggaggttactggtggtctctttatgtag

SEQ ID NO: 178583 - DNA, 786 bp, Artificial Sequence
  derived and/or modified sequence
atggcctcgcagctgcagaatcgacttcgttccgcacttgcccttgtgaccggcgccggcagtggaattggccgggctgtgagcgtccgcctggcaggggaaggagctacggtcgccgcctgtgacctggatcgcgcagccgcccaggagaccgtgaggctcctagggggtcccggatccaaagagggcccacccagaggtaatcatgccgcgttccaagccgacgtttctgaagctcgcgcagcacggtgtctgctagagcaagtgcaggcctgtttttcccgccctccatctgttgtggtgagctgtgccggtatcacacaggatgagttcctcctgcatatgtctgaagacgattgggataaggttatcgcggtcaatctgaaaggtaccttcctggtaacccaagcagcagcccaggctctggtgtccaacgggtgtcgcgggagcataatcaacattagttcaatcgtgggcaaggttggcaatgttggccagactaactatgcggccagcaaagccggagtcatcggtcttacccagacagctgctcgggagttgggccgccatggtatccgatgtaactccgtgctgcccggattcatcgccacaccaatgacccaaaaggtacctcagaaggttgttgataagataaccgagatgatccctatgggccacctaggcgaccccgaggacgtcgccgatgttgtggcctttctcgcttctgaagactcagggtatataaccgggacttctgtggaagtgactggaggactattcatgtag

SEQ ID NO: 178584 - DNA, 786 bp, Artificial Sequence
  derived and/or modified sequence
atggccagccagttacagaatcgactgcgaagcgccctggcactcgtcacaggcgccggatccggtattgggagggccgtgtccgtacgcttagccggggaaggcgccacagtggccgcgtgtgacttggaccgggccgccgcacaagagacagtgagactcctggggggccctggaagtaaggagggccccccaaggggcaaccacgctgcctttcaagcagacgtctcggaggcccgcgcggcgagatgcttgcttgaacaggttcaggcctgtttttcccgcccacccagcgtagtcgtgtcttgcgccggcattacccaggatgaatttctcctccacatgagtgaggacgactgggataaggttattgctgtgaacctgaaaggaactttcctggttacccaggccgcggctcaagcacttgtgtctaatggctgcagaggtagcattattaatatttcatcgatcgtggggaaggtgggaaacgtggggcaaactaattacgctgcatcaaaggctggagtcatcggcctgacccagaccgctgcccgggagctggggagacacgggatcaggtgcaacagcgtgctgccagggttcattgctactcccatgacccagaaggttcctcagaaggtcgtcgacaagattacggagatgatcccaatgggccacctgggcgatcccgaggacgttgccgacgtggtagcctttctggcctccgaggatagcggatacatcactggcacctctgtggaagttaccggtggactgttcatgtag

SEQ ID NO: 178585 - DNA, 786 bp, Artificial Sequence
  derived and/or modified sequence
atggccagccagctccagaatagactgaggagcgctctcgcgttggtcactggcgcaggcagcgggattgggagggccgtgagtgtccgccttgcaggtgaaggagcgaccgtcgctgcctgcgatctcgatcgggctgccgcgcaggaaaccgtgcggctcctgggaggccctggttccaaagaagggccgccccgtgggaatcatgccgcctttcaagctgacgtgtcagaggctcgcgcagctaggtgcttgctcgaacaggtgcaggcctgtttttctcggccaccttctgtagtcgtttcctgcgcaggcattacacaggacgagttccttctgcatatgtcagaggacgattgggataaggtaattgcagtcaacttaaaaggcacctttctggtgacccaggccgccgcgcaagcccttgtgagtaacggctgccgaggctcaattattaatatttcttccatcgtcggcaaggtcgggaatgtcgggcagactaactacgctgcttcaaaggcgggggtcattggcttaacccagacagcagcccgggagttaggaagacacggtattagatgcaattcggtgctacccggcttcatagccacaccaatgacccagaaggttccacagaaggtcgtggacaagatcactgagatgatcccaatgggtcacctgggggaccctgaggatgtcgcagatgtagtggcatttcttgcatccgaagactcagggtatattactgggacttccgtggaagttacaggaggcttgttcatgtag

SEQ ID NO: 178586 - DNA, 786 bp, Artificial Sequence
  derived and/or modified sequence
atggcgagtcagctgcagaatcggctgcgctctgccctggccctggtgactggagctggttccgggattggcagggctgtgtctgtgcgtctggccggggaaggcgcaactgtcgccgcgtgtgatttggacagagccgcagctcaggaaacagtgcgcctattgggaggacccggttccaaggaggggcctccaagagggaatcatgcagccttccaggctgatgtaagcgaagcacgggcagcccggtgcttactagagcaggtgcaggcctgcttctcacggcctccctctgttgtggtgtcttgcgccgggatcacccaagacgaattcctgttacatatgtctgaggacgattgggacaaggttatcgctgtcaacttgaagggaacatttcttgtgacacaggcggctgcacaggctttggtgagtaatgggtgccggggttctataatcaacattagctccatcgtgggcaaagtaggaaacgtcggtcagaccaactatgctgcgtcaaaagctggtgtgattggcctgacgcagaccgcagcccgagagttgggccgccacgggatccgatgcaactcagtgctgcccggattcatcgcgacaccgatgacacaaaaagttccacaaaaggttgttgacaaaattacagaaatgattccaatgggacatctgggggacccagaagacgtcgccgatgtagtcgcattcctagcctcagaggatagcggctatatcacaggcacatccgtggaagtgactggcggactgtttatgtag

SEQ ID NO: 178587 - DNA, 990 bp, Artificial Sequence
  derived and/or modified sequence
gggattcccacccacccacagcccgccatggcgtctcagctccagaaccgactccgctccgcactggccttggtcacaggtgcggggagcggcatcggccgagcggtcagtgtacgcctggccggagagggggccaccgtagctgcctgcgacctggaccgggcagcggcacaggagacggtgcggctgctgggcgggccagggagcaaggaggggccgccccgagggaaccatgctgccttccaggctgacgtgtctgaggccagggccgccaggtgcctgctggaacaagtgcaggcctgcttttctcgcccaccatctgtcgttgtgtcctgtgcgggcatcacccaggatgagtttctgctgcacatgtctgaggatgactgggacaaagtcatagctgtcaacctcaagggcaccttcctagtcactcaggctgcagcacaagccctggtgtccaatggttgtcgtggttccatcatcaacatcagtagcatcgtaggaaaggtggggaacgtggggcagacaaactatgcagcatccaaggctggagtgattgggctgacccagaccgcagcccgggagcttggacgacatgggatccgctgtaactctgtcctcccagggttcattgcaacacccatgacacagaaagtgccacagaaagtggtggacaagattactgaaatgatcccgatgggacacttgggggaccctgaggatgtggcagatgtggtcgcattcttggcatctgaagatagtggatacatcacagggacctcagtggaagtcactggaggtcttttcatgtaactgcctcaaggaccctggactctgctcacccccccaccactctgcctggcctcctgctgatgaggactctaagttcccaggatacaaaaggggtggcagtgtatggttcaggaatgctgaatatgggaagcaggggtgcttgtgaccctaataaattccaagtcctcttccctgcca

SEQ ID NO: 178588 - DNA, 786 bp, Artificial Sequence
  derived and/or modified sequence
atggccagccagctgcagaaccggctgcggagcgccctggccctggtgactggagctggcagcggcatcggccgggctgtgtctgtgcggctggccggggagggcgccaccgtggccgcctgtgacctggacagagctgctgcccaggagaccgtgcggctgctgggcggccctggcagcaaggagggccccccccggggcaaccacgccgccttccaggctgatgtgtctgaggcccgggccgcccgctgcctgctggagcaggtgcaggcctgcttcagccggccccccagcgtggtggtgtcctgtgccggcatcacccaggatgagttcctgctgcacatgtctgaagatgactgggacaaggtgattgctgtgaacctgaagggcaccttcctggtgacccaggccgccgcccaggccctggtgtccaatggctgccggggcagcatcatcaacatcagcagcatcgtgggcaaggtgggcaatgtgggccagaccaactatgctgccagcaaggccggcgtgattggcctgacccagacagctgcccgggagctgggccgccacggcatccgctgcaacagcgtgctgcccggcttcatcgccacccccatgacccagaaggtgccccagaaggtggtggacaagatcacagagatgatccccatgggccacctgggggaccctgaagatgtggctgatgtggtggccttcctggcctctgaagattctggctacatcaccggcacctctgtggaggtgactggaggcctcttcatgtag

SEQ ID NO: 178589 - DNA, 786 bp, Artificial Sequence
  derived and/or modified sequence
atggccagccagctgcagaaccggctgcggagcgccctggccctggtgaccggtgctggttctggcattggaagagcagtgtctgtacgcttggccggtgaaggggccacagtggccgcctgtgatctcgatagggcagcagcccaggagacagtccggctcctcgggggaccaggcagcaaggagggccctccacgcggcaaccacgccgcgttccaggcggatgtgtcagaggccagggcggcccgatgcctgctagagcaggtgcaggcgtgcttttccagacccccatctgtggtagtttcctgcgcagggattacacaagatgaattcctgctccacatgtctgaggatgattgggataaagtgatcgccgtaaacctgaagggaacatttctggtgactcaggccgctgctcaggccttagtcagcaacggctgccgcggctcaatcattaacataagctccatcgtcggaaaggtaggcaatgtgggacagacgaattacgcagcgtctaaagctggcgttattgggctgactcagaccgcagcacgagaactcggccgccacggcatcagatgcaattccgtgctccctggattcattgctactccaatgactcagaaggtcccacagaaagtggtggataagatcaccgagatgattcccatgggacatctgggtgaccccgaggatgtagctgatgtggtggcgtttcttgctagcgaggactcaggttacataactggcacttcagtcgaggttaccgggggtctattcatgtag

SEQ ID NO: 178590 - DNA, 786 bp, Artificial Sequence
  derived and/or modified sequence
atggccagccagctgcagaaccggctgcggagcgccctggccctggtcacgggtgctggcagcggaattggccgagctgtatcagtgcgcttagccggagagggggctactgttgcagcatgtgacctcgacagagcagccgcccaagaaaccgtgaggcttctcggaggaccgggctccaaggagggcccaccgaggggtaaccacgcagcctttcaggccgatgtgtcagaagcacgtgcggctcgctgcctgctggagcaggtgcaggcgtgtttttcccgcccaccctctgtagtggtgtcctgcgcgggcatcacacaagacgaatttctcctgcacatgagtgaagacgattgggataaggtgatagcagtgaaccttaagggtacattcctggttactcaagccgctgctcaagccctcgtcagcaatggctgcagagggtcgataatcaatatttcctccatcgtgggcaaggtcggaaacgtggggcagacaaattatgcagcctctaaggcaggagtgatagggcttacacaaactgccgccagagaattgggcaggcacggcattcgatgcaactccgtgctccccggattcatagccactcctatgacgcagaaagttcctcagaaggtggtcgataagattacagagatgatccccatgggccaccttggagacccagaggacgtggccgatgtcgtggccttcttggctagtgaagattcaggctacattacagggacctcagtggaggtgacaggagggctctttatgtag

SEQ ID NO: 178591 - DNA, 786 bp, Artificial Sequence
  derived and/or modified sequence
atggccagccagctgcagaaccggctgcggagcgccctggccctggtgacaggcgctggttctgggatcggtcgggccgtttctgtgaggctcgccggcgagggcgccactgttgcagcctgcgacctggacagggccgcagcacaagaaacagtcaggctccttggcggacccggctcaaaagagggccctccacgcggcaatcacgccgcctttcaggccgacgtgtccgaagcgcgagccgccagatgtcttcttgagcaggtacaggcgtgtttctcaaggccgcccagtgtggttgtgtcctgtgctggaatcacacaggacgaatttctactgcatatgagcgaggatgattgggacaaagttatcgccgtgaacttgaagggcacctttctcgtgacccaagcagcagcccaggcactggtttctaatgggtgtcgtggctccattataaatatttctagtatagtgggtaaggtgggcaatgttggtcaaacaaactacgcggcatctaaggccggagtgatagggttaacccaaaccgctgctcgcgaactcggcaggcacggtatcagatgtaatagtgtgttgcccggcttcatagccacccccatgactcaaaaagtgcctcagaaagtggtggacaagataacagaaatgatcccaatgggccacttgggtgatcccgaagacgtagccgatgttgtggcgttcctggcatcagaagactctggatatataactggcacttccgttgaggtcaccggaggcctctttatgtag

SEQ ID NO: 178592 - DNA, 786 bp, Artificial Sequence
  derived and/or modified sequence
atggccagccagctgcagaaccggctgcggagcgccctggccctggtcacaggtgccgggtccggaatcggacgagcagtgtctgtccgtctggcgggtgagggtgccaccgtagccgcttgcgatctggaccgcgccgcggcacaggagactgtgagattgttaggtggtccaggaagtaaggaagggccgcctagggggaaccacgccgcattccaagccgacgtctcagaggccagagctgctcggtgtctacttgagcaggttcaagcttgtttctcacgccccccctccgtggtggtgtcatgcgccggcattacccaggacgagttcctcctgcacatgtctgaagacgactgggacaaagtcatcgcagtgaacttgaagggcacattcctggtcacccaggccgctgctcaagcactggtatcaaacgggtgtcgtgggagcatcataaatatctcttcaatcgttggaaaagtaggtaatgtgggccaaaccaactatgctgccagcaaggcgggagtaattgggctgacacagaccgcagctcgcgaactcgggcgacacggtatacgatgcaacagcgttctgcccggctttattgccacccctatgacccagaaggtgcctcagaaggtagtggataagattaccgagatgattccaatgggccacctgggcgacccagaggatgttgctgacgtggtagcgttcctcgcaagtgaggactctggatatatcacaggtacgagcgtcgaggttacagggggcctgtttatgtag

SEQ ID NO: 178593 - DNA, 786 bp, Artificial Sequence
  derived and/or modified sequence
atggccagccagctgcagaaccggctgcggagcgccctggccctggtcaccggtgcgggtagcgggataggtcgcgcggtgagcgttcggctagctggagagggtgctaccgtggctgcctgcgaccttgatagagccgcggcgcaggagaccgtgagactgctcgggggccccggtagcaaagagggtccgccacgtggcaaccatgccgcctttcaggccgatgtgagcgaggcaagggctgcccgctgcctgctggagcaagtacaggcttgcttcagccgccctccttccgtcgtggttagttgtgcaggtattacgcaggacgaatttctgctgcacatgtccgaagacgactgggacaaggtgattgctgttaacctgaaaggaactttcctcgtcactcaggccgctgcacaggctcttgtatctaacggatgccgcgggtccatcatcaacatttcctccattgtcgggaaagtggggaatgtgggtcagaccaactatgctgccagtaaagccggcgtgatcggcctcactcagaccgctgcacgggaattgggccgccatgggatccgctgtaattcagtcttacccgggtttattgccacacctatgacccaaaaggtgcctcagaaggtcgtggataaaatcaccgaaatgatcccaatgggccacctcggagacccggaagacgtcgccgatgttgtggcatttttggcaagcgaggattcaggttacatcactggcacgtccgtcgaagtgactggaggccttttcatgtag

SEQ ID NO: 178594 - DNA, 786 bp, Artificial Sequence
  derived and/or modified sequence
atggccagccagctgcagaaccggctgcggagcgccctggccctggtgacaggcgcaggctccggcatcggccgtgcagtgagcgtacgccttgcgggggaaggcgcaacagtagcggcatgcgacctggaccgggccgccgctcaggagaccgtgaggcttttgggaggacctggcagcaaggagggtccacctcgcgggaaccatgctgctttccaggccgacgtgtcggaggcccgcgccgcacgatgcctgttggagcaagtgcaggcctgcttctcccgtcccccttcagttgtcgtgtcctgtgctggcattacacaggacgaattcctcctccacatgtccgaagatgactgggacaaggtgatcgcagtgaacctaaaaggcaccttcctcgtgacccaggccgccgcccaagcacttgtttcgaacgggtgcagggggagcatcattaatatctctagcattgtgggaaaagtcggaaatgttggccagacaaactacgccgcatccaaagcaggagtgattggcctgacacagacagctgccagagagttgggacggcatgggatacgctgtaactccgttcttccggggtttatcgctaccccaatgacccagaaagtgccccaaaaagtggtcgataagattactgagatgatcccgatgggccatctgggggaccctgaggacgtcgcagacgtagtggcatttctggcatcagaggattctggctacattaccggaacctctgtggaagtcaccggggggctgtttatgtag

SEQ ID NO: 178595 - DNA, 786 bp, Artificial Sequence
  derived and/or modified sequence
atggccagccaactgcagaacagattgcgcagcgctttggcattagtcacgggggcagggtcgggaataggacgcgctgtcagcgttagattagctggggaaggagctaccgtcgcagcctgtgatcttgatagggcagctgctcaagagaccgtgaggctcctgggtggtcccggaagcaaagaaggacccccacgaggcaaccacgcagcttttcaggccgatgtctctgaggcccgagccgctagatgcctgctggagcaggtgcaagcctgcttcagccggcctccaagtgtggtggtgagctgtgctgggatcacacaagacgaatttctgctgcatatgagcgaggacgattgggataaggtgatcgccgttaacttgaagggcacctttcttgtgacgcaggccgctgcccaggccttggtttccaacggctgtaggggttctataatcaatattagcagcatagtcggcaaggtcgggaacgtaggccagacaaactatgctgcctccaaagctggtgtgatcggcttgacccagaccgcagctcgggagcttgggcgtcacggaattcggtgcaatagcgtcctccccggtttcatcgcaactccgatgactcagaaagttccacagaaggtagtggacaagataaccgaaatgatccctatggggcatctgggggaccctgaagatgttgctgacgtcgtggcctttttagcaagcgaagattccggatacatcacaggaacaagcgtagaggttacaggcggattgttcatgtag

SEQ ID NO: 178596 - DNA, 786 bp, Artificial Sequence
  derived and/or modified sequence
atggcatctcaattacagaataggcttcgctctgccttggccttggttaccggagcaggatctggcatcgggagagccgtttcagttaggcttgcgggtgagggagctactgtcgccgcatgcgatctggaccgagccgctgcccaggaaaccgtcaggctcctaggtgggccagggtccaaggaggggccaccaagaggtaatcatgccgcttttcaggcagacgtttcagaggcccgtgcggcaaggtgtcttttagaacaggtgcaggcctgtttttcccgacctccatcggtggtggtctcttgcgcgggtatcactcaggatgaatttctgctgcatatgagtgaagacgattgggacaaagtcattgccgtgaacctgaagggcaccttccttgtgactcaggcagccgcacaggcactcgtctcaaatggatgccggggaagcattataaatatttcaagcattgtggggaaggtgggcaacgtaggccagacgaattacgccgcaagcaaagctggcgtgatcggcctcacccagactgccgctcgggagctgggcaggcatggtatccggtgcaattccgtactgcctggcttcattgccacccctatgacccaaaaagtgccacaaaaggttgttgataaaattaccgaaatgatcccaatgggacatttgggcgacccagaagacgtggctgacgtggtggcctttttagcctcggaggactccggttacatcaccggaaccagtgtcgaggtcactggtggattgttcatgtag

SEQ ID NO: 178597 - DNA, 786 bp, Artificial Sequence
  derived and/or modified sequence
atggcgagtcagctgcaaaaccgccttaggagtgccctggcattggttacaggagccggaagtggaattgggcgtgcagtttccgtccgcctggccggagaaggtgccactgttgctgcctgcgacctcgatagagcagctgcacaggagacggtccggttgctcggcggtcccggttctaaagagggcccacctcggggaaaccatgccgctttccaggcagacgtgtcggaagcacgggctgcccgatgccttctggagcaagtacaggcatgctttagtcggccaccctccgtggtggtaagctgtgcgggtattacacaggacgagtttctcctgcatatgagcgaggacgactgggacaaagtcatcgccgtcaatctaaagggcacttttttagttacgcaggccgcagcccaggctctggtgtctaacggctgtaggggttccattatcaacattagctctatcgtaggcaaggtgggcaacgtcgggcagaccaattacgccgcttccaaggcaggtgtcattggcctcacgcagacagcagctcgtgagctcggtcgccatgggatccgatgcaacagcgttctacccggattcattgccacaccaatgacccaaaaagtgcctcagaaggtagtggacaaaattacagaaatgatccctatgggtcacttgggggatccagaggacgtggcggatgtcgttgccttcctcgcctcagaggactccggatacataactggtaccagcgtggaggtgaccggcggactctttatgtag

SEQ ID NO: 178598 - DNA, 786 bp, Artificial Sequence
  derived and/or modified sequence
atggcctcacagctgcagaatcgcctaaggagcgctctcgccttggtcaccggagcaggcagcgggatcggtagagctgtgtccgtgcggctcgccggtgagggcgctacagtggccgcttgtgacctagacagggccgcagctcaggagaccgtgcgcttattaggaggtccaggttctaaggagggacctcctaggggtaatcatgctgcctttcaggccgacgtttctgaggctcgggctgccagatgcctacttgagcaagtgcaggcttgtttctcgagaccgcctagtgtcgtagtgagctgcgccggaattacccaggatgagtttctgttgcatatgtcagaagacgactgggacaaggtgattgctgtgaatctgaagggtacttttctggtgacgcaggccgctgcccaagccctggtgtctaacgggtgcagaggcagcattataaacatctcttctatcgtcggcaaagtcggaaacgttgggcagactaattatgctgcttccaaggccggagttatcggcctgacccagactgctgcaagagaactgggcaggcacgggatccgctgcaatagcgtcctacccggattcatagcaactccgatgacacagaaagtgccccagaaggtcgttgacaagataaccgaaatgattccgatgggccatctgggcgatcccgaagatgtggccgacgttgtcgcatttctggcctcagaagatagcggatatatcaccggcacgagcgtggaagttaccggtggtcttttcatgtag

SEQ ID NO: 178599 - DNA, 786 bp, Artificial Sequence
  derived and/or modified sequence
atggccagtcaacttcaaaaccggcttcgatccgctctcgcccttgtgacaggagcaggttcaggcattggtcgggcagtaagtgtgagattggccggagaaggtgccaccgtggccgcttgcgatcttgatagagcggctgcacaagagacggtccgactcctcggaggtccaggttccaaggagggtccccctcgtggaaatcatgctgcgtttcaggcagatgtttccgaggctagagccgctaggtgtttactggagcaagttcaggcatgcttcagtaggcccccatctgtggttgtaagttgtgctggcatcacacaagacgagttcctgttacacatgtccgaagacgattgggacaaggtgattgccgtcaacttgaaggggacattcctagttacacaagctgccgcacaggccctggtctctaatggctgcaggggttctattatcaacatcagctccatcgttggaaaggttggcaatgtaggccagacaaactatgccgctagcaaggcgggtgtgattggtctgacccagacagcggcaagggagctgggacggcacggcatccgctgcaatagtgtactcccagggttcattgcaactcctatgacacagaaggtcccccaaaaagtcgtggacaagattaccgagatgatcccaatgggccaccttggggaccccgaagatgtcgccgacgtcgtcgcctttctcgccagtgaagattcaggttacatcacgggaacctccgtggaagtgacaggcggactttttatgtag

SEQ ID NO: 178600 - DNA, 786 bp, Artificial Sequence
  derived and/or modified sequence
atggcttcccaattgcaaaaccgcctgcgttctgcactggcactggtgaccggagccggaagtggcatcggacgtgctgtcagtgtgcgtctcgccggagaaggcgcaacagtcgcagcatgtgaccttgatagggccgctgctcaggagaccgtgagactgctcggcggacccggatccaaagaaggcccacccagagggaaccacgcagctttccaagccgatgtctccgaagcacgagccgctcggtgtctgctggagcaagtacaggcttgcttctcacgcccaccctcagtggtggtgtcatgtgccggaattacacaggatgagtttttgttgcacatgtcagaagacgactgggataaagtcattgctgtgaatcttaaaggaacgttcctcgtgacacaggcggctgcacaggcgctggtgtcaaatggatgccggggttctattatcaatatttcctctatcgtgggcaaggtggggaatgtgggacagacgaattacgctgcttcaaaagccggagtgatcggcctgacccagaccgccgctagagaattgggcagacatgggatcaggtgcaatagtgtgttgcctggctttattgccacccctatgacccaaaaggtgccacagaaggtggtcgataagattacggaaatgatccccatgggacacctgggcgaccccgaagatgtagctgacgttgtggcattcctggccagtgaggactccgggtacatcaccggaacgtctgtagaagtgactggcggtctctttatgtag

SEQ ID NO: 178601 - DNA, 786 bp, Artificial Sequence
  derived and/or modified sequence
atggccagccagctgcagaacagactgagaagcgccctggccctggtgaccggcgccggcagcggcatcggcagagccgtgagcgtgagactggccggcgagggcgccaccgtggccgcctgcgacctggacagagccgccgcccaggagaccgtgagactgctgggcggccccggcagcaaggagggcccccccagaggcaaccacgccgccttccaggccgacgtgagcgaggccagagccgccagatgcctgctggagcaggtgcaggcctgcttcagcagaccccccagcgtggtggtgagctgcgccggcatcacccaggacgagttcctgctgcacatgagcgaggacgactgggacaaggtgatcgccgtgaacctgaagggcaccttcctggtgacccaggccgccgcccaggccctggtgagcaacggctgcagaggcagcatcatcaacatcagcagcatcgtgggcaaggtgggcaacgtgggccagaccaactacgccgccagcaaggccggcgtgatcggcctgacccagaccgccgccagagagctgggcagacacggcatcagatgcaacagcgtgctgcccggcttcatcgccacccccatgacccagaaggtgccccagaaggtggtggacaagatcaccgagatgatccccatgggccacctgggcgaccccgaggacgtggccgacgtggtggccttcctggccagcgaggacagcggctacatcaccggcaccagcgtggaggtgaccggcggcctgttcatgtag

SEQ ID NO: 178602 - protein, 157 aa, Artificial Sequence
  derived and/or modified sequence
MQLTVKALQGRECSLQVPEDELVSTLKQLVSEKLNVPVRQQRLLFKGKALADGKRLSDYSIGPNSKLNLVVKPLEKVLLEEGEAQRLADSPPPQVWQLISKVLARHFSAADASRVLEQLQRDYERSLSRLTLDDIERLASRFLHPEVTETMEKGFSK

SEQ ID NO: 178603 - DNA, 474 bp, Artificial Sequence
  derived and/or modified sequence
atgcagctgaccgtgaaggccctgcagggcagagagtgcagcctgcaggtgcccgaggacgagctggtgagcaccctgaagcagctggtgagcgagaagctgaacgtgcccgtgagacagcagagactgctgttcaagggcaaggccctggccgacggcaagagactgagcgactacagcatcggccccaacagcaagctgaacctggtggtgaagcccctggagaaggtgctgctggaggagggcgaggcccagagactggccgacagcccccccccccaggtgtggcagctgatcagcaaggtgctggccagacacttcagcgccgccgacgccagcagagtgctggagcagctgcagagagactacgagagaagcctgagcagactgaccctggacgacatcgagagactggccagcagattcctgcaccccgaggtgaccgagaccatggagaagggcttcagcaagtag

SEQ ID NO: 178604 - DNA, 474 bp, Artificial Sequence
  derived and/or modified sequence
atgcagctgaccgtgaaagctctgcagggtcgggagtgtagcctccaggttccagaggacgagcttgtgtctacgcttaaacaactagtgtccgagaagcttaatgtaccagtgcggcagcagcgactgttgttcaagggaaaggcactggcagatgggaaacgcctaagcgattacagcatcgggccaaatagtaaactcaacctcgttgttaagcctctggagaaagttctactggaagagggtgaggcacaacggttagcagattctcctccaccacaggtgtggcagctgatttcaaaagtgctagcacgccacttctctgcagccgatgcttcacgcgtgttagagcagctgcagagggactacgagcgtagcttgagccgcctcactttggacgacattgagaggctggccagtcgctttctgcatcccgaggtgacagagacaatggaaaaggggttttctaagtag

SEQ ID NO: 178605 - DNA, 474 bp, Artificial Sequence
  derived and/or modified sequence
atgcagctgactgtgaaggccctgcagggccgggagtgcagcctgcaggtgcctgaagatgagctggtgtccaccctgaagcagctggtgtctgagaagctgaatgtgcctgtgcggcagcagaggctgctcttcaagggcaaggccctggctgatggcaagaggctgagtgactacagcatcggccccaacagcaagctgaacctggtggtgaagcccctggagaaggtgctgctggaggagggggaggcccagaggctggccgacagccccccaccccaggtgtggcagctgatcagcaaggtgctggcccggcacttctctgctgctgatgccagccgggtgctggagcagctgcagagggactatgaaagaagcctgagccggctgaccctggatgacatcgagcggctggccagccgcttcctgcaccctgaggtgacagagaccatggagaagggcttcagcaagtag

SEQ ID NO: 178606 - DNA, 474 bp, Artificial Sequence
  derived and/or modified sequence
atgcagctgaccgtgaaggccctgcagggccgggagtgcagcctgcaggtaccagaagatgaacttgtctctactctgaagcaattggtgagcgaaaagctgaatgttcccgttcgccagcagagacttttgttcaagggcaaagccttagccgacggcaaacgcctgtctgactactctatcggcccaaattcaaagctgaacctggtcgtcaagcccctggagaaggtgctgctagaagagggcgaggctcagcgcttggcagattcccctccgcctcaggtttggcagttaatttccaaagtcctggctaggcacttcagcgctgcagacgcgagtcgtgtcctcgagcagctccaaagagactatgagcggtcgctgtcgagactgaccttagacgatatcgaacggctggctagtagattcctgcatcccgaggtaaccgagacaatggagaaggggttttcaaagtag

SEQ ID NO: 178607 - DNA, 474 bp, Artificial Sequence
  derived and/or modified sequence
atgcagctgacagtgaaggctctgcaggggcgagagtgctccttacaggtaccagaagatgaactggtgtccacactcaagcagctcgttagcgagaaattgaacgtgcccgtcagacagcagaggctgctgtttaagggcaaggccctcgccgatggcaaacgactgtcagattactcaatcggccctaatagcaaactgaacctggtggttaagcccttagaaaaggtactactggaggagggcgaggcccagcggctggccgacagcccaccccctcaggtctggcagctgataagtaaagtgcttgctcgacacttttctgctgccgacgccagtagagtgcttgaacagctccaacgtgactacgaacgatctctatcacggctcacactggacgacattgagagactagccagtcggttcctgcaccccgaagtcacggagactatggaaaaaggattcagcaagtag

SEQ ID NO: 178608 - DNA, 2382 bp, Artificial Sequence
  derived and/or modified sequence
ggttccagcgcgcgcccggggcggcggcgcgcggcggggggtggttggggtgcgcgccggcccgagtggacgccgtcgcgaccgccatgcagctgacggtgaaggcgctgcagggccgcgagtgcagcctgcaggtgccagaggacgagctggtgtccacgctgaagcagctggtctccgagaagctgaacgtcccagtgcgccagcagcggctgctgttcaagggcaaggccctggcagatgggaaacgactctcggattatagcatcgggcccaactccaagctcaacctagtggtcaaacccctggagaaggtgctactagaagaaggcgaggcccagaggctggccgactccccacccccgcaggtctggcagctgatctccaaagtcttggcccgccacttcagtgcggcagatgccagcagggtcctggaacagctacagagggattacgagaggtccctgagtcgcctgacgctggacgacatcgaacggttggccagccgcttcctgcaccctgaagtgactgagacaatggagaagggcttctccaaatagaattctcggagcatggggaggtgcccaacgccaggctaccgctgcatgtcgcactaagtgtgttctcctgttgcagttgggctcatcatcgtcatagctggcatgtacctggctctggccaggtgctaggcactcctcacagcttgacctgggtttgcttccacaccctcagaagaggagagccggcacagcagaggcaccggcgatgaagtggcacagccccagtcggaatccagcggcttctgaaagtgccttggtgtgagaaggaggaaggggccgcttggagagctgggctctcgcatgtcatgtttagcccactgagaatataccctcaggtgactccctcccgatcctgaaagggaaagcagctgtcacctgacttctggcgggtccaacatagccctcagcttacctctgcaggaggccgagtgacagccagccctggaaccccccgacccccgcagctgctgcagccagtgtgccagtgtgcgttcgacaaatggaaaagcagattggggccagggagtcagcaaggcaccccagctctgtgatgtgactttgggcgagtctcagtgccacttggtccccagccatggactctatacagtgagggccactcaccgacctgagtcagtgtcctctgtctcacagggcccctctcccttctgttcagtaaacaaactgaagccaaaaatgaagccgtggccaagcgtgacccagagatggggtgtcctggcccttagtgacacagctcctctctggggcaccctatctgcttgtctcgtccaggaagcgttagggctgatgggtgactcagcaaggcagtgtcagagctgggactgggcgtaggcctttgtcctcatccccagcactggcctccctgtggaagatgaacatatcccagccacctgtgtacaggggctcactttgtgtgctccttgttgcctgagaagaaaccttggggtgccagggtgggggcagaagcatgggctgggttccggttcatcctcctccaccctgccgtgtgtgtgggcacaagaggacatctaaccacctgctccttggaggaggcccccaggggtggtagaggctggaaggaagccacatcaggaggacgccactccggcccttcacccttgccaagtgagctgctcacagtgtggtcagggctgcgcgtgctggaggccctcctgcctgggccttgtggggcaaatattgggtccccaggctggaaagatggacagaggcccaatgggtgaaggctttgaagagcacacagaagcccctggccccccacgagagctggagagccatgtatatggcttcaaagccacctacggcagggacacactcgtgagcatgtgtggcctgcagttcaggtgatacatttaccagtgttcttgtttgtgtggtgccaggaaattgattttggaaaaagtgaaataacattaaaggtgaatgtgaggcttctacttttatccaaaaggagctatattagctaggctgtttctgatatccaatcattggtttaacaataaaggcaatttgtttaatcagttaacggaaatttcttggcttatgaaagtgaaaagtccagtggtattggcattggcagcaggtgagcaatttcacccagtgtcttctgcctccctctgcgttggtatctgctacatcccaggccaccacctccgaggatgaaaagatggctgcctgcagcttccacggaatccctccctcactgccagagcagcatcttctctgtgtaccacctctgctgtctcagatgcccccagcaaataaacactcttctcgttggtcagaa

SEQ ID NO: 178609 - protein, 680 aa, Artificial Sequence
  derived and/or modified sequence
MESSSSSNSYFSVGPTSPSAVVLLYSKELKKWDEFEDILEERRHVSDLKFAMKCYTPLVYKGITPCKPIDIKCSVLNSEEIHYVIKQLSKESLQSVDVLREEVSEILDEMSHKLRLGAIRFCAFTLSKVFKQIFSKVCVNEEGIQKLQRAIQEHPVVLLPSHRSYIDFLMLSFLLYNYDLPVPVIAAGMDFLGMKMVGELLRMSGAFFMRRTFGGNKLYWAVFSEYVKTMLRNGYAPVEFFLEGTRSRSAKTLTPKFGLLNIVMEPFFKREVFDTYLVPISISYDKILEETLYVYELLGVPKPKESTTGLLKARKILSENFGSIHVYFGDPVSLRSLAAGRMSRSSYNLVPRYIPQKQSEDMHAFVTEVAYKMELLQIENMVLSPWTLIVAVLLQNRPSMDFDALVEKTLWLKGLTQAFGGFLIWPDNKPAEEVVPASILLHSNIASLVKDQVILKVDSGDSEVVDGLMLQHITLLMCSAYRNQLLNIFVRPSLVAVALQMTPGFRKEDVYSCFRFLRDVFADEFIFLPGNTLKDFEEGCYLLCKSEAIQVTTKDILVTEKGNTVLEFLVGLFKPFVESYQIICKYLLSEEEDHFSEEQYLAAVRKFTSQLLDQGTSQCYDVLSSDVQKNALAACVRLGVVEKKKINNNCIFNVNEPATTKLEEMLGCKTPIGKPATAKL

SEQ ID NO: 178610 - protein, 587 aa, Artificial Sequence
  derived and/or modified sequence
MESSSSSNSYFSVGPTSPSAVVLLYSKELKKWDEFEDILEERRHVSDLKFAMKCYTPLVYKGITPCKPIDIKCSVLNSEEIHYVIKQLSKESLQSVDVLREEVSEILDEMSHKLRLGAIRFCAFTLSKVFKQIFSKLQRAIQEHPVVLLPSHRSYIDFLMLSFLLYNYDLPVPVIAAGMDFLGMKMVGELLRMSGAFFMRRTFGGNKLYWAVFSEYVKTMLRNGYAPVEFFLEGTRSRSAKTLTPKFGLLNIVMEPFFKREVFDTYLVPISISYDKILEETLYVYELLGVPKPKESTTGLLKARKILSENFGSIHVYFGDPVSLRSLAAGRMSRSSYNLVPRYIPQKQSEDMHAFVTEVAYKMELLQIENMVLSPWTLIVAVLLQNRPSMDFDALVEKTLWLKGLTQAFGGFLIWPDNKPAEEVVPASILLHSNIASLVKDQVILKVDSGDSEVVDGLMLQHITLLMCSAYRNQLLNIFVRPSLVAVALQMTPGFRKEDVYSCFRFLRDVFADEFIFLPGNTLKDFEEGCYLLCKSEAIQVTTKDILVTEKGNTVLEFLVGLFKPFVESYQIICKYLLSEEEDHFSE

SEQ ID NO: 178611 - DNA, 2043 bp, Artificial Sequence
  derived and/or modified sequence
atggagagttcttcctcatctaactcctacttctcagttggcccgaccagcccgtctgccgtggtgctgttgtatagcaaggaactgaaaaaatgggacgaatttgaagacattctggaggagcggagacatgtgtccgacttaaagttcgctatgaaatgttacacccctttagtatacaaaggaattaccccttgtaagccaatcgacattaagtgcagcgtgcttaactctgaggagatccattatgtgatcaaacagctgagcaaagaaagccttcagagtgtggatgtgttaagagaggaggtttctgaaatactggatgaaatgagccataaactgcgccttggagcaatccgcttctgcgcgttcacgttaagcaaggtgtttaaacagatctttagtaaagtctgcgtcaacgaggagggaatccagaagttacagcgcgccattcaggagcatcccgtggtgcttctgccttctcatcgctcctacatagacttcttgatgctcagctttctgctgtacaattatgacctgcctgtgccagtgatagccgcggggatggatttcctcggcatgaagatggttggtgagctcctacgtatgagtggagcattctttatgaggcggaccttcggaggcaacaagctctactgggccgtgttctccgagtatgtgaagacaatgttgaggaacgggtatgcacccgttgagttctttttggaaggcacacggtccagaagcgccaaaacactcacccctaagttcggccttttgaacatcgtcatggagccgttctttaaacgcgaggtctttgatacgtacctggtgcccatctcaatcagctacgataagattttggaggagaccctctatgtctatgaattgctcggtgtgccgaagccaaaagagagtaccactggactgctgaaggccagaaagattttgtcggaaaatttcgggagcatacatgtctactttggggacccggtgtctctgcggagcctcgctgcaggtcgtatgtctagaagctcttacaacctggtgcccagatacatcccccagaaacagtccgaggatatgcatgccttcgttacagaagtggcgtacaagatggagctcctgcagattgagaatatggtcctttctccctggaccctgatcgttgcagtgctactgcagaaccggcccagcatggattttgacgccctggtggagaagactctgtggctcaaaggcctcacgcaggcgtttggtgggttcctgatttggcccgataacaagcctgctgaggaagttgtgcctgcatccattcttctccattcaaacatcgccagtctggtcaaagatcaggtgattctaaaggtcgatagtggcgactcagaagtcgtggacgggctgatgctacagcacattactctcctcatgtgcagtgcttaccggaaccaactgctgaatattttcgtgcggcccagcttggtggccgtggccttacagatgacacccggttttcggaaagaggatgtttatagctgttttcgcttcctgcgcgacgtgttcgcagacgagtttatattcttaccaggtaacacacttaaggattttgaagaaggctgctacctcttgtgcaaatccgaggctatacaggttactaccaaggatatcttggttacagagaagggcaacacagtcctcgaattccttgtgggcctctttaagccatttgtcgagtcctaccaaatcatttgtaaatatttgctgtccgaggaggaagaccacttttccgaggagcagtacctcgccgccgtcaggaaattcacttcgcaactgcttgatcagggaacgtcacagtgctatgatgtgctctcctcagacgtccagaagaatgcacttgcagcttgcgtgcggttaggcgtggtggagaagaagaaaattaacaacaattgtatattcaacgtgaacgagccagctacaacaaagctggaggaaatgctgggctgcaagactcccattggaaagcctgctacagcgaagttgtag

SEQ ID NO: 178612 - DNA, 1764 bp, Artificial Sequence
  derived and/or modified sequence
atggagtcctcctccagctcgaacagctacttctctgtcgggccaacttctcccagcgcagtggtgctgctctacagcaaagaactgaagaaatgggacgagttcgaggacattctggaggagcggcgacacgtctctgacctcaaatttgccatgaagtgttatacaccactcgtgtataaaggtatcacaccctgcaagcccatcgacataaagtgctctgtcttgaattccgaggaaatccattatgtgataaagcagctgtctaaggaaagcctgcagagcgtggatgtccttcgcgaggaggtgagcgaaatcctggatgaaatgtcacataaattgcggttgggagcaattcgcttctgtgcatttacactctccaaagtgttcaagcagatcttttcaaaactacagcgcgcaattcaggaacaccctgtagtcttacttccatctcatagaagctatattgacttcctgatgctctccttcttgctgtataactacgatctgcccgtaccggtaattgcagctggcatggactttcttggcatgaagatggtaggagagcttctgcgtatgagtggagcgtttttcatgcgaagaacttttggcggcaacaagttgtattgggctgtcttctctgagtacgttaaaaccatgctgagaaacggctatgcgcccgttgagtttttcctggagggaactagatctagatctgctaaaacgttgaccccaaagttcggcttgctcaacatagtgatggaaccattcttcaaaagagaagtcttcgatacgtacctcgtccccattagcatcagctatgataagattctggaagagaccctctatgtctatgaactgcttggtgtgccaaagccaaaagagtcaaccaccggtctgctgaaagccaggaagatcttgtcagaaaatttcgggtccatacacgtgtatttcggcgaccccgtgtctctgcgctccttagcagctggcagaatgtcaagatcatcctacaacctcgttccaaggtatataccccaaaaacagagcgaggacatgcatgcttttgtgactgaggttgcgtacaaaatggaactcctgcagattgagaacatggtcctgtccccctggaccctgatcgtggctgttctgcttcagaacaggccgtcaatggacttcgacgcattggtcgagaaaaccctgtggttgaagggactcacacaggccttcgggggtttcctcatctggccagataacaaacccgctgaggaagtagttcctgcttccatcttgctgcacagcaacatcgctagccttgttaaagaccaggtgatcctcaaagtcgacagtggcgactccgaagtcgttgacggcctgatgttacagcatatcaccctcttgatgtgtagcgcttatcgcaatcaacttctcaatatctttgtgcggccaagtctggtcgctgtggctttgcagatgacacccggcttcaggaaagaggacgtgtacagttgctttaggtttctgcgagacgtgtttgctgacgagtttatctttttacccggaaacactctgaaagattttgaggaagggtgctatttgctttgcaaatccgaggccatacaggtgaccaccaaagatatattggtgacagaaaaggggaatacagtacttgaattcctcgtgggccttttcaaaccctttgtggagtcttaccagatcatttgcaaatacctattatccgaagaagaagatcatttctccgagtag

SEQ ID NO: 178613 - DNA, 2643 bp, Artificial Sequence
  derived and/or modified sequence
ttccgtcctggctgagatggcggcgcccgggatcctgtgtagcggctgcagagggtgccgccgccctaggcgaagtagggccgtcctgagcgaaagaaccgcccccagcaggagcaccaccacggcttagcaaagaatcccagaccccgcccgggaaggcagccgcaccatggagtcttccagttcatctaactcttatttctccgttggcccaaccagtcccagcgctgtcgtgctcctctactcgaaggagctcaaaaagtgggatgagtttgaagatattttagaagagaggaggcatgtcagtgacttgaaatttgcaatgaaatgctacacacctcttgtctataagggaattactccatgtaaaccaattgatattaaatgtagtgttctcaattctgaggagattcattatgtcattaaacagctttccaaggaatcccttcaatctgtggatgtcctccgagaggaagtgagtgagatcttagatgaaatgagtcacaaactgcgtcttggagccattcggttttgtgccttcaccctgagcaaagtatttaaacaaattttctcgaaggtgtgtgtaaatgaagaaggtattcagaaactacaaagagccatccaggagcatcctgttgttctgctgcctagtcatcgaagttacattgacttcctcatgttgtcttttcttctatacaattatgatttgcctgtgccagttatagcagcaggaatggacttcctgggaatgaaaatggttggtgagctgctacgaatgtcgggtgcctttttcatgcggcgtacctttggtggcaataaactctactgggctgtattctctgaatatgtaaaaactatgttacggaatggttatgctcctgttgaatttttcctcgaagggacaagaagccgctctgccaagacattgactcctaaatttggtcttctgaatattgtgatggagccattttttaaaagagaagtttttgatacctaccttgtcccaattagtatcagttatgataagatcttggaagaaactctttatgtgtatgagcttctaggggttcctaaaccaaaagagtctacaactgggttgctgaaagccagaaagattctctctgaaaattttggaagcatccatgtgtactttggagatcctgtgtcacttcgatctttggcagctgggaggatgagtcggagctcatataacttggttccaagatacattcctcagaaacagtctgaggacatgcatgcctttgtcactgaagttgcctacaaaatggagcttctgcaaattgaaaacatggttttgagcccctggaccctaatagttgctgttctgcttcagaaccggccatccatggactttgatgctctggtggaaaagactttatggctaaaaggcttaacccaggcatttggagggtttctcatttggcctgataataaacctgctgaagaagttgtcccggccagcattcttctgcattccaacattgccagccttgtcaaagaccaggtgattctgaaagtggactccggagactcggaagtggtcgatgggcttatgctccagcacatcactctcctcatgtgctcagcttataggaaccagctgctcaacatttttgtgcgcccatccttagtagcagtagcattgcagatgacaccagggttcaggaaagaggatgtctacagttgctttcgcttcctacgtgatgtttttgcagatgagttcatcttccttccaggaaacacactaaaggactttgaagaaggctgttacctgctttgtaaaagtgaagccatacaagtgactacgaaagacatcctagttacagagaaaggaaatactgtgttagaatttttagtaggactctttaaaccttttgtggaaagctatcagataatttgcaagtaccttttgagtgaagaagaggaccacttcagtgaggaacagtacttggctgcagtcagaaaattcacaagtcagcttctcgatcaaggtacctctcaatgttatgatgtattatcttctgatgtgcagaaaaacgccttagcagcctgtgtgaggctcggagtagtggagaagaagaagataaataataactgtatatttaatgtgaatgaacctgccacaaccaaattagaagaaatgcttggttgtaagacaccaataggaaaaccagccactgcaaaactttaataatcaacaaatagttatggaaaattcggtcacgtaattactctcatcgaaggactcattacaacaaacagggaagtaaaggaagagacacatcctctcatactccctgagactctgagaacagtggacgcagagggaagagatgatcattggaagcaatcagtttactcttccccaccacagtggttaaaaggcgtttgtatctgacactatgtgtgtgttttaaaataaacttttggaaacatgtttggaaaagcaaagctcagctcatttcactaacacttttcagcttactatatgtattaaacttttatgttgacttttgaattaaagtatgacaacactgaaagctctggatattaaaagaaaatgaaaagggcatatctacgttacttgtagcttgctttaattaaagttgcctcaaacaagta

SEQ ID NO: 178614 - DNA, 1924 bp, Artificial Sequence
  derived and/or modified sequence
cctggctgagatggcggcgcccgggatcctgtgtagcggctgcagagggtgccgccgccctaggcgaagtagggccgtcctgagcgaaagaaccgcccccagcaggagcaccaccacggcttagcaaagaatcccagaccccgcccgggaaggcagccgcaccatggagtcttccagttcatctaactcttatttctccgttggcccaaccagtcccagcgctgtcgtgctcctctactcgaaggagctcaaaaagtgggatgagtttgaagatattttagaagagaggaggcatgtcagtgacttgaaatttgcaatgaaatgctacacacctcttgtctataagggaattactccatgtaaaccaattgatattaaatgtagtgttctcaattctgaggagattcattatgtcattaaacagctttccaaggaatcccttcaatctgtggatgtcctccgagaggaagtgagtgagatcttagatgaaatgagtcacaaactgcgtcttggagccattcggttttgtgccttcaccctgagcaaagtatttaaacaaattttctcgaagctacaaagagccatccaggagcatcctgttgttctgctgcctagtcatcgaagttacattgacttcctcatgttgtcttttcttctatacaattatgatttgcctgtgccagttatagcagcaggaatggacttcctgggaatgaaaatggttggtgagctgctacgaatgtcgggtgcctttttcatgcggcgtacctttggtggcaataaactctactgggctgtattctctgaatatgtaaaaactatgttacggaatggttatgctcctgttgaatttttcctcgaagggacaagaagccgctctgccaagacattgactcctaaatttggtcttctgaatattgtgatggagccattttttaaaagagaagtttttgatacctaccttgtcccaattagtatcagttatgataagatcttggaagaaactctttatgtgtatgagcttctaggggttcctaaaccaaaagagtctacaactgggttgctgaaagccagaaagattctctctgaaaattttggaagcatccatgtgtactttggagatcctgtgtcacttcgatctttggcagctgggaggatgagtcggagctcatataacttggttccaagatacattcctcagaaacagtctgaggacatgcatgcctttgtcactgaagttgcctacaaaatggagcttctgcaaattgaaaacatggttttgagcccctggaccctaatagttgctgttctgcttcagaaccggccatccatggactttgatgctctggtggaaaagactttatggctaaaaggcttaacccaggcatttggagggtttctcatttggcctgataataaacctgctgaagaagttgtcccggccagcattcttctgcattccaacattgccagccttgtcaaagaccaggtgattctgaaagtggactccggagactcggaagtggtcgatgggcttatgctccagcacatcactctcctcatgtgctcagcttataggaaccagctgctcaacatttttgtgcgcccatccttagtagcagtagcattgcagatgacaccagggttcaggaaagaggatgtctacagttgctttcgcttcctacgtgatgtttttgcagatgagttcatcttccttccaggaaacacactaaaggactttgaagaaggctgttacctgctttgtaaaagtgaagccatacaagtgactacgaaagacatcctagttacagagaaaggaaatactgtgttagaatttttagtaggactctttaaaccttttgtggaaagctatcagataatttgcaagtaccttttgagtgaagaagaggaccacttcagtgag

SEQ ID NO: 178615 - DNA, 2043 bp, Artificial Sequence
  derived and/or modified sequence
atggagagcagcagcagcagcaacagctacttctctgtgggccccaccagccccagcgctgtggtgctgctgtacagcaaggagctgaagaagtgggatgaatttgaggacatcctggaggagcggcggcacgtgtctgacctgaagtttgccatgaagtgctacacccccctggtgtacaagggcatcaccccctgcaagcccatcgacatcaagtgcagcgtgctgaacagcgaggagatccactacgtgatcaagcagctgagcaaggagagcctgcagagcgtggatgtgctgcgggaggaggtgtctgagatcctggatgagatgagccacaagctgcggctgggcgccatccgcttctgtgccttcaccctgagcaaggtgttcaagcagatcttcagcaaggtgtgtgtgaatgaggagggcatccagaagctgcagagggccatccaggagcaccctgtggtgctgctgcccagccacaggagctacatcgacttcctgatgctgtccttcctgctgtacaactatgacctgcctgtgcctgtgattgctgctggcatggacttcctgggcatgaagatggtgggggagctgctgaggatgtctggggccttcttcatgaggaggacctttggaggcaacaagctgtactgggccgtgttttctgaatatgtgaagaccatgctgagaaatggctacgcccctgtggagttcttcctggagggcaccaggagccgcagcgccaagaccctgacccccaagtttggcctgctgaacatcgtgatggagcccttcttcaagcgggaggtgtttgacacctacctggtgcccatcagcatctcctatgacaagatcctggaggagaccctgtatgtgtatgagctgctgggcgtgcccaagcccaaggagagcaccaccggcctgctgaaggccaggaagatcctgtctgaaaattttggcagcatccacgtgtactttggagaccctgtgtccctgcggagcctggccgccggccgcatgagccgcagcagctacaacctggtgccccgctacatcccccagaagcagagcgaggacatgcacgcctttgtgacagaggtggcctacaagatggagctgctgcagatcgagaacatggtgctgagcccctggaccctgattgtggccgtgctgctgcagaaccggcccagcatggactttgatgccctggtggagaagaccctgtggctgaagggcctgacccaggcctttggaggcttcctgatctggccagacaacaagccagctgaggaggtggtgcctgccagcatcctgctgcacagcaacatcgccagcctggtgaaggaccaggtgatcctgaaggtggacagcggggacagcgaggtggtggatggcctgatgctgcagcacatcaccctgctgatgtgcagcgcctacagaaaccagctgctgaacatctttgtgcggcccagcctggtggccgtggccctgcagatgaccccaggcttcaggaaggaggatgtgtacagctgcttccgcttcctgagagatgtgtttgctgatgagttcatcttcctgcccggcaacaccctgaaggactttgaggagggctgctacctgctgtgcaagtctgaggccatccaggtgaccaccaaggacatcctggtgacagagaagggcaacacagtgctggagttcctggtgggcctcttcaagccctttgtggagagctaccagatcatctgcaagtacctgctgtctgaggaggaggaccacttcagcgaggagcagtacctggccgctgtgaggaagttcaccagccagctgctggaccagggcaccagccagtgctatgatgtgctgagcagtgatgtgcagaagaatgccctggccgcctgtgtgcggctgggcgtggtggagaagaagaagatcaacaacaactgcatcttcaacgtgaatgaaccagccaccaccaagctggaggagatgctgggctgcaagacccccatcggcaagccagccacagccaagctgtag

SEQ ID NO: 178616 - DNA, 1764 bp, Artificial Sequence
  derived and/or modified sequence
atggagagcagcagcagcagcaacagctacttctctgtgggccccaccagccccagcgctgtggtgctgctgtacagcaaggagctgaagaagtgggatgaatttgaggacatcctggaggagcggcggcacgtgtctgacctgaagtttgccatgaagtgctacacccccctggtgtacaagggcatcaccccctgcaagcccatcgacatcaagtgcagcgtgctgaacagcgaggagatccactacgtgatcaagcagctgagcaaggagagcctgcagagcgtggatgtgctgcgggaggaggtgtctgagatcctggatgagatgagccacaagctgcggctgggcgccatccgcttctgtgccttcaccctgagcaaggtgttcaagcagatcttcagcaagctgcagagggccatccaggagcaccctgtggtgctgctgcccagccacaggagctacatcgacttcctgatgctgtccttcctgctgtacaactatgacctgcctgtgcctgtgattgctgctggcatggacttcctgggcatgaagatggtgggggagctgctgaggatgtctggggccttcttcatgaggaggacctttggaggcaacaagctgtactgggccgtgttttctgaatatgtgaagaccatgctgagaaatggctacgcccctgtggagttcttcctggagggcaccaggagccgcagcgccaagaccctgacccccaagtttggcctgctgaacatcgtgatggagcccttcttcaagcgggaggtgtttgacacctacctggtgcccatcagcatctcctatgacaagatcctggaggagaccctgtatgtgtatgagctgctgggcgtgcccaagcccaaggagagcaccaccggcctgctgaaggccaggaagatcctgtctgaaaattttggcagcatccacgtgtactttggagaccctgtgtccctgcggagcctggccgccggccgcatgagccgcagcagctacaacctggtgccccgctacatcccccagaagcagagcgaggacatgcacgcctttgtgacagaggtggcctacaagatggagctgctgcagatcgagaacatggtgctgagcccctggaccctgattgtggccgtgctgctgcagaaccggcccagcatggactttgatgccctggtggagaagaccctgtggctgaagggcctgacccaggcctttggaggcttcctgatctggccagacaacaagccagctgaggaggtggtgcctgccagcatcctgctgcacagcaacatcgccagcctggtgaaggaccaggtgatcctgaaggtggacagcggggacagcgaggtggtggatggcctgatgctgcagcacatcaccctgctgatgtgcagcgcctacagaaaccagctgctgaacatctttgtgcggcccagcctggtggccgtggccctgcagatgaccccaggcttcaggaaggaggatgtgtacagctgcttccgcttcctgagagatgtgtttgctgatgagttcatcttcctgcccggcaacaccctgaaggactttgaggagggctgctacctgctgtgcaagtctgaggccatccaggtgaccaccaaggacatcctggtgacagagaagggcaacacagtgctggagttcctggtgggcctcttcaagccctttgtggagagctaccagatcatctgcaagtacctgctgtctgaggaggaggaccacttcagcgagtag

SEQ ID NO: 178617 - DNA, 2043 bp, Artificial Sequence
  derived and/or modified sequence
atggagagcagcagcagcagcaacagctacttcagcgtgggccccacttctccctccgcagttgtccttctctactccaaagagctgaagaaatgggacgaattcgaggacattctcgaggagcgtcgccacgtgagtgatctgaaattcgccatgaaatgctacacacctctagtctataagggtatcaccccatgtaaaccgatcgatatcaagtgctctgtcctgaactctgaagagattcactacgtgatcaagcaattgagtaaggaatctctgcaatccgtagacgtccttagggaggaggtgtcagaaatactcgatgagatgagccataaacttcgtttgggagctattcgcttctgtgcgttcacactctctaaggttttcaaacagatttttagtaaagtgtgcgtgaacgaagaaggtatccaaaaactgcaacgggcaatccaggagcacccggtggtcctgttgccctcccaccggagttatatagatttcctgatgttaagttttctcctgtacaactatgacctccccgtgccagttatcgcagctgggatggatttcctgggcatgaaaatggtaggggaactgctcagaatgagtggcgccttttttatgcgtaggacttttggcggaaataaattgtactgggcggtttttagtgagtacgtgaagacaatgctgaggaacgggtacgctcccgtggaattttttttggaaggtacacggagtagatcagctaagactctgaccccgaagtttgggttactgaatatagttatggaacctttcttcaagagggaggtgtttgacacatacctggttccaattagcatctcctacgacaaaatccttgaggagaccctttatgtgtatgagcttctcggcgtgcctaagcctaaggagagcaccactggtctgctgaaggctcgcaaaatactgtcagagaatttcgggtccattcacgtgtattttggggacccggtttctctgaggtccttagcagccggcaggatgagcaggagcagttacaatctggtcccacgatacattccccagaagcagtctgaggacatgcacgcctttgtcacagaggtcgcctacaaaatggagctcttacagatcgaaaacatggttctcagcccctggacactcatcgttgccgttctgctgcaaaataggcccagcatggacttcgacgcgctagtcgagaagacgctgtggcttaaaggccttactcaggcgttcggagggttcttaatctggccagacaataagcccgcggaagaggtggtgcctgcttccatacttctgcactccaatatcgcatcacttgtcaaggaccaggtgatccttaaagtggacagtggtgattctgaggtggttgatgggctcatgctgcagcacattactttgttgatgtgttcagcctataggaaccagctgttgaatatcttcgtcaggcccagtctcgtggccgtcgcacttcagatgacaccgggtttccgaaaggaggacgtatattcatgcttcagattcctgagagacgtatttgctgacgagttcatctttctgcctgggaacaccctcaaggactttgaggagggatgctacctactctgtaagagtgaagccatccaggtaaccacaaaagatatcctggtaaccgaaaaaggtaatacagtgctcgaattcctcgtgggcttgtttaaaccctttgtcgagtcgtaccagattatatgtaagtacctgctgtccgaggaagaagatcacttctctgaagagcaatacctcgcggccgtgagaaaatttaccagtcagcttctggatcagggcactagccagtgttatgacgtcctgagcagtgatgtgcagaagaatgcacttgccgcgtgcgtaagactgggcgtcgttgaaaagaaaaagatcaacaacaattgtatttttaacgttaacgagcccgccaccacgaaattagaagaaatgttaggatgtaaaaccccaatagggaagccggccacagctaagctgtag

SEQ ID NO: 178618 - DNA, 1764 bp, Artificial Sequence
  derived and/or modified sequence
atggagagcagcagcagcagcaacagctacttcagcgtgggccccacatcaccgtccgcggtcgtccttttatacagtaaggaactgaagaaatgggacgaatttgaggatattctggaagaacgcaggcatgttagtgatctgaagtttgctatgaagtgttacacaccactggtgtataagggtatcacaccctgtaagcctatcgacattaagtgttccgtcctgaattccgaggaaatccactatgttattaaacagctatcaaaagaatccctgcagtcagttgatgttctccgcgaggaggtgagcgaaatccttgatgagatgtctcacaaactccgtctcggtgcaatacgtttttgcgccttcaccttaagtaaggtgttcaagcagatattcagtaagctgcagcgcgctattcaggagcaccctgtagtcctacttccttctcatcggagctatatcgatttcttgatgctgtcgtttctcctgtacaactatgatctccccgtcccggttatagcagctggaatggatttcctgggcatgaagatggtcggtgagctcctgcgtatgagcggcgcctttttcatgcgccggacatttggcggcaataagttgtactgggctgttttcagtgagtacgtcaagactatgctaagaaacggatacgcccctgtggaattctttctggaggggacccgaagtcgtagcgcaaagacattgaccccaaaattcggactgctcaacatagtcatggaaccttttttcaagcgagaagtgttcgacacctaccttgtgcctattagcatcagttatgataagatcctagaggaaacactctatgtgtacgaattactcggggtgccgaaacccaaagagtcaactaccggtctgcttaaagcccgaaaaattctgtccgaaaacttcggatccattcatgtatattttggcgatcctgtgtctttacgctcattagctgcaggccgcatgagtcggtcgtcatataatctggtacctcgatacattcctcagaaacaaagcgaggacatgcatgcattcgtcaccgaagtggcctacaaaatggagctcctgcagattgagaatatggtgcttagtccgtggactctcattgtggcagttctgctccaaaataggcccagtatggacttcgatgcgctcgtggaaaagaccctgtggctaaaaggactgacacaagcctttggtgggtttctgatctggcctgacaacaagccagcggaggaggtcgtcccagccagcattctcctacactcaaatattgcttccctagtgaaggatcaggtgatcctgaaggtagattctggcgattctgaggttgtagatggccttatgttgcagcacattaccctattaatgtgctctgcctataggaaccaattacttaacatttttgtgcgcccttctctggtcgctgtggcactgcagatgacccccggatttagaaaagaggacgtgtactcttgcttcaggttcctccgcgacgtgttcgcagatgagttcattttcctcccaggtaacacgctcaaagatttcgaagagggctgctacctcctgtgcaaatcagaagcaatccaggtaactacgaaagatatcctagtaacagagaagggcaacacagtgctggaatttctggtgggcttgttcaaaccattcgttgagtcttatcagatcatttgtaagtatcttctgtcggaggaagaagaccacttttctgaatag

SEQ ID NO: 178619 - DNA, 2043 bp, Artificial Sequence
  derived and/or modified sequence
atggagagcagtagcagtagcaactcctacttttcagtgggccctactagcccttctgccgtggttctcctgtattccaaggagctgaaaaagtgggacgagtttgaggatatcttggaagaacggagacacgtgagtgatctgaaatttgctatgaagtgctacacaccccttgtgtataagggaattacaccctgtaagcctatagatatcaagtgtagtgtcctgaacagcgaagaaattcattacgtaatcaagcaactatctaaagagtctctccaatctgttgatgtgcttagagaggaggtgtccgaaattctcgatgagatgtcccacaagttgcgcctgggagccattaggttttgcgcctttacattgagtaaagtgttcaaacagattttcagtaaggtgtgtgtgaacgaagaggggattcaaaaactccagcgagccatccaggaacaccccgtggtgttgctgccctcacaccggagctacatcgatttcttaatgctgtccttcctgctttataactatgacctgcctgtacccgtcatcgccgctggcatggacttccttggcatgaaaatggtgggtgagctactgcgcatgagcggcgctttcttcatgaggcgaacctttggtggcaataagctctattgggctgtgttttccgagtatgtgaagacaatgctccggaatggctatgctcccgtcgagttctttctcgagggtacaagatctcgttcagccaagacccttacacccaaatttggccttctgaatatcgtgatggaaccttttttcaagcgagaggtctttgatacatatctcgtgccaatctcgatttcctatgataaaattctcgaagaaactttgtacgtctatgagctgttgggagtgcccaaacctaaagagagcacaaccggtctgctcaaagctaggaaaatactctctgagaattttggctctattcatgtgtattttggtgacccagtatcccttcgtagtcttgctgcaggcaggatgtctagatctagctataatctggtgcctagatatatccctcagaaacagtcggaggatatgcacgcctttgtgacagaggtcgcctacaagatggagctcttgcagatcgaaaatatggtgctttccccgtggactctgatcgtagcagttcttctccagaataggccttcaatggactttgacgcattggtcgaaaagacactttggctaaaaggcctcactcaggccttcggtggcttcctgatttggccagacaataaacccgctgaagaggtggtgcccgcaagcattctgctccactccaacatcgctagcctggtgaaagatcaagtgattctcaaagtggatagcggcgattcagaagtcgtggatgggttgatgctgcagcacatcacgttgctgatgtgctcagcgtatcgaaatcagctcctcaacatctttgtccgcccatctcttgtggccgtggctttacaaatgactccaggctttagaaaagaagacgtgtacagctgttttcgcttcctgcgtgacgtgttcgctgacgaattcatttttctacctggcaacaccctcaaggacttcgaggaaggctgctacttgttatgtaaaagtgaggctattcaggtcactaccaaggatatcttggtgaccgaaaaaggaaatactgtgctcgagtttctggtcgggctgttcaagccattcgtggagagctaccagataatttgcaagtatcttctgtcggaggaagaagatcatttcagcgaggagcagtatctagctgctgtgcgcaagtttacttcccagctgttggaccagggtacaagtcagtgttacgacgtgctgtcctcagatgtccaaaaaaatgctctggcagcgtgtgtgaggctgggagttgtcgagaagaagaagattaataataattgcatcttcaatgtgaacgaacccgcaaccaccaaacttgaagaaatgcttggctgtaagacacccattggaaaaccagcgacagccaagctttag

SEQ ID NO: 178620 - DNA, 1764 bp, Artificial Sequence
  derived and/or modified sequence
atggagagttcctccagcagtaattcttacttcagtgtgggcccaacttctccatccgcagtggtgcttctgtattccaaggaattgaagaaatgggacgaattcgaagatattctggaggagagaaggcacgtaagcgacctgaaattcgcgatgaaatgctacacccccctggtttataaagggataactccctgcaagcccatcgacatcaaatgctctgtgctgaacagcgaagagatccactacgtgatcaaacagttgtctaaggagtccttacaatctgttgatgtgctccgcgaagaggtctccgagattctggatgagatgtcccataaactccgcctgggcgcaattagattctgcgcctttaccctgtccaaggtgttcaagcagatattctccaagctgcagagggctatccaggaacatccagtggtgttgctgcctagtcaccgcagctatatagacttcctcatgctcagctttcttctctacaactatgatttgcctgttcccgttatagcagcgggaatggattttttgggaatgaagatggttggggagttgcttagaatgtcaggggcatttttcatgcggcgaacattcggcggaaacaagctctactgggctgtgtttagtgaatatgtgaaaacaatgctgaggaatggatacgccccagtcgaattttttctggagggtaccaggtctcgttccgctaaaaccctgacccctaaattcggcctgttgaacattgtgatggagccattttttaaacgtgaagtgttcgacacttatctggtgcccattagtataagctacgacaaaattctggaagaaaccttatatgtttacgagttgttgggtgttcccaaaccaaaggaatctacaaccggcctcttaaaggctaggaagatactgtctgaaaatttcgggagtattcacgtgtactttggcgatccagtgagccttaggagccttgctgcaggacgaatgtcgaggagctcatataacttggtgcctcggtacatcccgcagaagcagtcggaagacatgcacgcattcgtgactgaggtggcctataagatggagttattgcaaatcgaaaatatggttttatcaccctggaccctgatagtagctgttttgcttcagaacagaccttccatggattttgatgcactggtcgagaaaaccttatggctgaagggtttgacccaggccttcgggggattcttaatatggccagataataagccagcagaggaagtcgtgccggcatcaatcctgctgcacagtaatattgcttcacttgtgaaggaccaagtgatcctaaaagttgactcgggggactctgaggtcgtggatggcctgatgctgcagcatatcactctgctgatgtgttcagcctaccgcaatcaactcctcaatattttcgtaagaccttccttagtggccgtggctctgcagatgacacccggatttcggaaggaagatgtctactcatgttttcgattcctgagggacgttttcgccgatgaattcatttttttacccggaaatactctcaaggatttcgaagaaggctgttatctgctttgcaagtctgaagccattcaggttactactaaagatatactcgttactgaaaaaggaaacacggtgctggagtttcttgtgggcctctttaagccattcgtcgaatcataccagatcatctgcaagtacctgttgtcagaagaggaggaccacttttccgagtag

SEQ ID NO: 178621 - DNA, 2043 bp, Artificial Sequence
  derived and/or modified sequence
atggagagcagcagcagcagcaacagctacttcagcgtgggccccaccagccccagcgccgtggtgctgctgtacagcaaggagctgaagaagtgggacgagttcgaggacatcctggaggagagaagacacgtgagcgacctgaagttcgccatgaagtgctacacccccctggtgtacaagggcatcaccccctgcaagcccatcgacatcaagtgcagcgtgctgaacagcgaggagatccactacgtgatcaagcagctgagcaaggagagcctgcagagcgtggacgtgctgagagaggaggtgagcgagatcctggacgagatgagccacaagctgagactgggcgccatcagattctgcgccttcaccctgagcaaggtgttcaagcagatcttcagcaaggtgtgcgtgaacgaggagggcatccagaagctgcagagagccatccaggagcaccccgtggtgctgctgcccagccacagaagctacatcgacttcctgatgctgagcttcctgctgtacaactacgacctgcccgtgcccgtgatcgccgccggcatggacttcctgggcatgaagatggtgggcgagctgctgagaatgagcggcgccttcttcatgagaagaaccttcggcggcaacaagctgtactgggccgtgttcagcgagtacgtgaagaccatgctgagaaacggctacgcccccgtggagttcttcctggagggcaccagaagcagaagcgccaagaccctgacccccaagttcggcctgctgaacatcgtgatggagcccttcttcaagagagaggtgttcgacacctacctggtgcccatcagcatcagctacgacaagatcctggaggagaccctgtacgtgtacgagctgctgggcgtgcccaagcccaaggagagcaccaccggcctgctgaaggccagaaagatcctgagcgagaacttcggcagcatccacgtgtacttcggcgaccccgtgagcctgagaagcctggccgccggcagaatgagcagaagcagctacaacctggtgcccagatacatcccccagaagcagagcgaggacatgcacgccttcgtgaccgaggtggcctacaagatggagctgctgcagatcgagaacatggtgctgagcccctggaccctgatcgtggccgtgctgctgcagaacagacccagcatggacttcgacgccctggtggagaagaccctgtggctgaagggcctgacccaggccttcggcggcttcctgatctggcccgacaacaagcccgccgaggaggtggtgcccgccagcatcctgctgcacagcaacatcgccagcctggtgaaggaccaggtgatcctgaaggtggacagcggcgacagcgaggtggtggacggcctgatgctgcagcacatcaccctgctgatgtgcagcgcctacagaaaccagctgctgaacatcttcgtgagacccagcctggtggccgtggccctgcagatgacccccggcttcagaaaggaggacgtgtacagctgcttcagattcctgagagacgtgttcgccgacgagttcatcttcctgcccggcaacaccctgaaggacttcgaggagggctgctacctgctgtgcaagagcgaggccatccaggtgaccaccaaggacatcctggtgaccgagaagggcaacaccgtgctggagttcctggtgggcctgttcaagcccttcgtggagagctaccagatcatctgcaagtacctgctgagcgaggaggaggaccacttcagcgaggagcagtacctggccgccgtgagaaagttcaccagccagctgctggaccagggcaccagccagtgctacgacgtgctgagcagcgacgtgcagaagaacgccctggccgcctgcgtgagactgggcgtggtggagaagaagaagatcaacaacaactgcatcttcaacgtgaacgagcccgccaccaccaagctggaggagatgctgggctgcaagacccccatcggcaagcccgccaccgccaagctgtag

SEQ ID NO: 178622 - DNA, 1764 bp, Artificial Sequence
  derived and/or modified sequence
atggagagcagcagcagcagcaacagctacttcagcgtgggccccaccagccccagcgccgtggtgctgctgtacagcaaggagctgaagaagtgggacgagttcgaggacatcctggaggagagaagacacgtgagcgacctgaagttcgccatgaagtgctacacccccctggtgtacaagggcatcaccccctgcaagcccatcgacatcaagtgcagcgtgctgaacagcgaggagatccactacgtgatcaagcagctgagcaaggagagcctgcagagcgtggacgtgctgagagaggaggtgagcgagatcctggacgagatgagccacaagctgagactgggcgccatcagattctgcgccttcaccctgagcaaggtgttcaagcagatcttcagcaagctgcagagagccatccaggagcaccccgtggtgctgctgcccagccacagaagctacatcgacttcctgatgctgagcttcctgctgtacaactacgacctgcccgtgcccgtgatcgccgccggcatggacttcctgggcatgaagatggtgggcgagctgctgagaatgagcggcgccttcttcatgagaagaaccttcggcggcaacaagctgtactgggccgtgttcagcgagtacgtgaagaccatgctgagaaacggctacgcccccgtggagttcttcctggagggcaccagaagcagaagcgccaagaccctgacccccaagttcggcctgctgaacatcgtgatggagcccttcttcaagagagaggtgttcgacacctacctggtgcccatcagcatcagctacgacaagatcctggaggagaccctgtacgtgtacgagctgctgggcgtgcccaagcccaaggagagcaccaccggcctgctgaaggccagaaagatcctgagcgagaacttcggcagcatccacgtgtacttcggcgaccccgtgagcctgagaagcctggccgccggcagaatgagcagaagcagctacaacctggtgcccagatacatcccccagaagcagagcgaggacatgcacgccttcgtgaccgaggtggcctacaagatggagctgctgcagatcgagaacatggtgctgagcccctggaccctgatcgtggccgtgctgctgcagaacagacccagcatggacttcgacgccctggtggagaagaccctgtggctgaagggcctgacccaggccttcggcggcttcctgatctggcccgacaacaagcccgccgaggaggtggtgcccgccagcatcctgctgcacagcaacatcgccagcctggtgaaggaccaggtgatcctgaaggtggacagcggcgacagcgaggtggtggacggcctgatgctgcagcacatcaccctgctgatgtgcagcgcctacagaaaccagctgctgaacatcttcgtgagacccagcctggtggccgtggccctgcagatgacccccggcttcagaaaggaggacgtgtacagctgcttcagattcctgagagacgtgttcgccgacgagttcatcttcctgcccggcaacaccctgaaggacttcgaggagggctgctacctgctgtgcaagagcgaggccatccaggtgaccaccaaggacatcctggtgaccgagaagggcaacaccgtgctggagttcctggtgggcctgttcaagcccttcgtggagagctaccagatcatctgcaagtacctgctgagcgaggaggaggaccacttcagcgagtag

SEQ ID NO: 178623 - protein, 351 aa, Artificial Sequence
  derived and/or modified sequence
MPGSAAKGSELSERIESFVETLKRGGGPRSSEEMARETLGLLRQIITDHRWSNAGELMELIRREGRRMTAAQPSETTVGNMVRRVLKIIREEYGRLHGRSDESDQQESLHKLLTSGGLNEDFSFHYAQLQSNIIEAINELLVELEGTMENIAAQALEHIHSNEVIMTIGFSRTVEAFLKEAARKRKFHVIVAECAPFCQGHEMAVNLSKAGIETTVMTDAAIFAVMSRVNKVIIGTKTILANGALRAVTGTHTLALAAKHHSTPLIVCAPMFKLSPQFPNEEDSFHKFVAPEEVLPFTEGDILEKVSVHCPVFDYVPPELITLFISNIGGNAPSYIYRLMSELYHPDDHVL

SEQ ID NO: 178624 - DNA, 1537 bp, Artificial Sequence
  derived and/or modified sequence
cgcccgccccggaagtgcaaactgtgtggtctggcaggtgtggattccgccggtgaaggctgaaggcagctaccttaaagatgccgggatccgcagcgaagggctcggagttgtcagagaggatcgagagcttcgtggagaccctgaagcggggtggtgggccgcgcagctccgaggaaatggctcgggagaccctagggttgctgcgccagatcatcacggaccaccgctggagcaacgcgggggagctgatggagctgatccgcagagagggcaggaggatgacggccgctcagccctccgagaccaccgtgggcaacatggtgcggagagtgctcaagattatccgggaggagtatggcagactccatggacgcagcgacgagagtgatcagcaggagtccctgcacaaactgttgacatccggaggcctaaacgaggatttcagcttccattatgcccaactccagtccaacatcattgaggcgattaatgagctgctagtggagctggaagggacaatggagaacattgcagcccaggctctggagcacattcactccaatgaggtgatcatgaccattggcttctcccgaacagtagaggccttcctcaaagaggctgcccgaaagaggaaattccatgtcattgtagcagagtgtgctcctttctgccagggtcatgaaatggctgtgaatttgtccaaagcaggtattgagacaactgtcatgactgatgctgccatttttgccgttatgtcaagagtcaacaaggtgatcattggcacgaagaccatcctggccaatggggccctgagagctgtgacaggaactcacactctggcactggcagcaaaacaccattccaccccactcatcgtctgtgcacctatgttcaaactttctccacagttccccaatgaagaagactcatttcataagtttgtggctcctgaagaagtcctgccattcacagaaggggacattctggagaaggtcagcgtgcattgccctgtgtttgactacgttcccccagagctcattaccctctttatctccaacattggtgggaatgcaccttcctacatctaccgcctgatgagtgaactctaccatcctgatgatcatgttttatgaccgaccacacgtgtcctaagcagattgcttaggcagatacagaatgaagaggagacttgagtgttgctgctgaagcacatccttgcaatgtgggagtgcacaggagtccacctaaaaaaaaaatccttgatactgttgcctgcctttttagtcaccccgtaacaagggcacacatccaggactgtgtcttgcctttcagatcttaacagagcagcagggcttaacttgttgattttggagcctcttagtgacctggttgcgtctgtgtcaggaacttaaactttctggttcagtagtgtgttaaacataacactgaataccttactgggatacagatttttgctcagaaatggctatgacactttttctaggctctaccaataaaagccacttgaaggttc

SEQ ID NO: 178625 - DNA, 1056 bp, Artificial Sequence
  derived and/or modified sequence
atgcctgggtccgccgctaaaggctccgagttaagcgagaggatcgagagcttcgtggagaccctaaaaagagggggcgggccgcgaagctcagaggagatggccagagagaccctcggactgctacggcaaattattacggaccacaggtggtctaatgctggagagttaatggagctgatccgcagggagggtagacgcatgacagctgcacaaccatctgagaccaccgtgggcaatatggtcagacgagtcttgaagatcatccgtgaggagtacggtcggttacatggccggtcggacgagtctgatcagcaagagtcccttcacaagctgctcacctcaggtgggcttaatgaagacttctcctttcactatgcgcagctacagtctaacatcattgaagccattaatgagctgctcgtcgaactcgaagggaccatggaaaatattgctgcccaggcccttgaacacatccactctaatgaagtgatcatgactatcgggttttctaggacagttgaggcattcctgaaggaggcagcacgcaaaaggaagttccacgtgatcgtcgccgaatgcgctcccttctgccagggccacgagatggcagttaacctctcaaaggccggcatcgagacaactgtgatgaccgacgcagcgatctttgcagtcatgtcccgcgtgaacaaggttatcattggaaccaaaacaatattagcgaacggagcgctgcgggccgtgaccgggacgcatactctcgcattagccgcgaagcaccattctacccccctaatagtgtgcgcaccaatgttcaagctgtcccctcaatttccaaacgaggaggatagtttccataagtttgttgctccggaagaagtgcttccgttcacagagggggatatcctagaaaaggtgagcgttcactgcccggtattcgactatgtcccgccagaactgatcactctcttcattagtaatattgggggcaatgccccaagttatatatacaggctcatgtccgaactctatcatccagacgaccatgttctgtag

SEQ ID NO: 178626 - DNA, 1056 bp, Artificial Sequence
  derived and/or modified sequence
atgcctggcagcgctgccaagggcagcgagctgtctgaaagaattgagagctttgtggagaccctgaagagaggaggcggccccaggagcagcgaggagatggcccgggagaccctgggcctgctgcggcagatcatcacagaccaccgctggagcaatgctggggagctgatggagctgatccggcgggagggccgcaggatgacagctgcccagcccagcgagaccaccgtgggcaacatggtgagaagagtgctgaagatcatccgggaggagtatggccgcctgcacggccgcagtgatgaaagtgaccagcaggagagcctgcacaagctgctgaccagcggcggcctgaatgaagacttctccttccactacgcccagctgcagagcaacatcatcgaggccatcaatgagctgctggtggagctggagggcaccatggagaacattgctgcccaggccctggagcacatccacagcaatgaggtgatcatgaccatcggcttcagcaggacagtggaggccttcctgaaggaggccgccaggaagaggaagttccacgtgattgtggctgaatgtgcccccttctgccagggccacgagatggctgtgaacctgagcaaggccggcatcgagaccaccgtgatgacagatgctgccatctttgctgtgatgagccgggtgaacaaggtgatcatcggcaccaagaccatcctggccaacggggccctgcgggctgtgacaggcacccacaccctggccctggccgccaagcaccacagcacccccctcatcgtgtgtgcccccatgttcaagctgagcccccagttccccaatgaggaggacagcttccacaagtttgtggcccctgaggaggtgctgcccttcacagaaggagacatcctggagaaggtgtctgtgcactgccctgtgtttgattatgtgcccccagagctgatcaccctcttcatcagcaacatcggcggcaatgcccccagctacatctaccgcctgatgtctgagctgtaccacccagatgaccacgtgctgtag

SEQ ID NO: 178627 - DNA, 1056 bp, Artificial Sequence
  derived and/or modified sequence
atgcccggcagcgccgccaagggcagcgagctgagcgagcggatcgaatcatttgtggagaccttgaaacggggagggggacctagatcctctgaggagatggcccgggagaccctcggattgctgcggcagatcattaccgatcataggtggtccaacgccggagagctgatggagcttatcagaagggagggacgacggatgacagctgcacaacccagcgagacaactgtgggaaacatggtgaggcgggtcctcaaaattatacgcgaggaatatggacgtctgcatggaaggtccgatgaaagcgatcagcaagagagtttacacaagttgttaacaagtggcggccttaatgaagacttctcctttcattatgcccaactgcagagcaacattattgaggccattaatgagctgctggtagaactcgaagggaccatggaaaatattgctgcgcaggcccttgagcacatacactcaaacgaggtcatcatgaccattggtttttctagaacagtggaagccttccttaaggaggccgcccgcaagcgcaagttccacgtgatcgtggctgaatgcgctccattctgccaaggccacgaaatggcagttaatttatccaaggctgggatagaaacgactgtgatgacagatgcagccattttcgcagtcatgagcagggttaacaaggtcatcatcggtaccaaaacaattcttgctaatggagcactcagggcggtgaccggcacacatacattggcactggccgctaagcatcatagtaccccactgatcgtgtgtgctcccatgtttaagctgtcaccgcagtttcctaatgaggaggattccttccacaaattcgtggcccctgaggaagttctcccttttacagaaggggatattttggaaaaggtgtctgttcactgccccgtgtttgattacgtgcccccagaattaataaccctattcatctcaaatattggagggaatgcgcccagttacatatacaggcttatgtctgagctgtaccatcccgacgaccatgtcctgtag

SEQ ID NO: 178628 - DNA, 1056 bp, Artificial Sequence
  derived and/or modified sequence
atgcccggatctgcggcaaaaggctcagaactgtccgagcgaatagagtcgtttgtagagaccctgaaacgaggtgggggaccccgttcaagcgaggaaatggcccgtgagaccctcggtctgctgaggcagatcatcactgatcataggtggagcaatgcgggagagctgatggagttgatacgcagagagggaaggagaatgaccgccgctcagccctcggagacaaccgtgggcaacatggtcaggcgggtgctcaagatcatacgggaagaatacggaaggctgcatggacgctctgacgaaagcgatcagcaggagtcactacacaagctgctaacgtcgggagggctgaacgaagactttagctttcactatgctcaattgcaaagcaatattatcgaggccatcaatgagcttctggtcgagctggaggggactatggaaaacattgccgcacaggccttggagcatatccactccaatgaagtcatcatgactattgggttttctagaacagtggaggcattcctaaaggaagctgccaggaaacgcaagtttcatgtaatcgtggccgaatgtgcccctttctgccaggggcacgagatggcagttaatttgtctaaggcaggcatcgagacgacagtgatgaccgacgccgcaatttttgcagtaatgagtcgtgtgaacaaggtcatcatcgggactaagactatactggccaacggagctttgcgagccgtgacagggacccacacgctcgctcttgccgcaaagcaccactcaacaccactgatagtctgtgctcctatgttcaagctatctccccagttccccaatgaggaagatagttttcataagtttgtagctcccgaggaggtcttgccattcactgagggagacattctggaaaaagtcagcgtgcactgtccagttttcgattatgtcccccctgaattgatcactctctttatttccaacataggaggaaatgcaccatcctacatctacaggctgatgagcgagctctaccatccagacgatcatgtactgtag

SEQ ID NO: 178629 - DNA, 1056 bp, Artificial Sequence
  derived and/or modified sequence
atgcccggcagcgccgccaagggcagcgagctgagcgagagaatcgagagcttcgtggagaccctgaagagaggcggcggccccagaagcagcgaggagatggccagagagaccctgggcctgctgagacagatcatcaccgaccacagatggagcaacgccggcgagctgatggagctgatcagaagagagggcagaagaatgaccgccgcccagcccagcgagaccaccgtgggcaacatggtgagaagagtgctgaagatcatcagagaggagtacggcagactgcacggcagaagcgacgagagcgaccagcaggagagcctgcacaagctgctgaccagcggcggcctgaacgaggacttcagcttccactacgcccagctgcagagcaacatcatcgaggccatcaacgagctgctggtggagctggagggcaccatggagaacatcgccgcccaggccctggagcacatccacagcaacgaggtgatcatgaccatcggcttcagcagaaccgtggaggccttcctgaaggaggccgccagaaagagaaagttccacgtgatcgtggccgagtgcgcccccttctgccagggccacgagatggccgtgaacctgagcaaggccggcatcgagaccaccgtgatgaccgacgccgccatcttcgccgtgatgagcagagtgaacaaggtgatcatcggcaccaagaccatcctggccaacggcgccctgagagccgtgaccggcacccacaccctggccctggccgccaagcaccacagcacccccctgatcgtgtgcgcccccatgttcaagctgagcccccagttccccaacgaggaggacagcttccacaagttcgtggcccccgaggaggtgctgcccttcaccgagggcgacatcctggagaaggtgagcgtgcactgccccgtgttcgactacgtgccccccgagctgatcaccctgttcatcagcaacatcggcggcaacgcccccagctacatctacagactgatgagcgagctgtaccaccccgacgaccacgtgctgtag

SEQ ID NO: 178630 - protein, 676 aa, Artificial Sequence
  derived and/or modified sequence
MDKYDDLGLEASKFIEDLNMYEASKDGLFRVDKGAGNNPEFEETRRVFATKMAKIHLQQQQQQLLQEETLPRGSRGPVNGGGRLGPQARWEVVGSKLTVDGAAKPPLAASTGAPGAVTTLAAGQPPYPPQEQRSRPYLHGTRHGSQDCGSRESLATSEMSAFHQPGPCEDPSCLTHGDYYDNLSLASPKWGDKPGVSPSIGLSVGSGWPSSPGSDPPLPKPCGDHPLNHRQLSLSSSRSSEGSLGGQNSGIGGRSSEKPTGLWSTASSQRVSPGLPSPNLENGAPAVGPVQPRTPSVSAPLALSCPRQGGLPRSNSGLGGEVSGVMSKPNVDPQPWFQDGPKSYLSSSAPSSSPAGLDGSQQGAVPGLGPKPGCTDLGTGPKLSPTSLVHPVMSTLPELSCKEGPLGWSSDGSLGSVLLDSPSSPRVRLPCQPLVPGPELRPSAAELKLEALTQRLEREMDAHPKADYFGACVKCSKGVFGAGQACQAMGNLYHDTCFTCAACSRKLRGKAFYFVNGKVFCEEDFLYSGFQQSADRCFLCGHLIMDMILQALGKSYHPGCFRCVICNECLDGVPFTVDSENKIYCVRDYHKVLAPKCAACGLPILPPEGSDETIRVVSMDRDYHVECYHCEDCGLELNDEDGHRCYPLEDHLFCHSCHVKRLEKRPSSTALHQHHF

SEQ ID NO: 178631 - DNA, 558 bp, Artificial Sequence
  derived and/or modified sequence
atgcatgggctctgcatggtgcctagcccccacgggcaccccggcatctccggtacctgttgcgcccccggacaggcccctgaccgacacccacttagcctctgcgcaccaacacctggacggaaaagacagcatcacctagtagcgtggcagccttgccccgcaccttcatgtctatggccacattggacacaacctccgagccgtgaagcctttgggtgcagggcaggcgcaggccgcgcccatccagtcgccggcgggacccaggagccctggcttcatctgtgttcaagacgcacatgtgggcagctgacacttcaacaggggtcggggccaaaatcactgacgcatcgggttctgagccccgaccgagccgtggattcatttccgtttcatcccggcacgtgttggcaggaactgcccggtccacatcccggggccgccacacctgcaccccccgcgactcccgggcacgagaaagtgcaaaattcatctggccctagtcacaacttcttggagctgagggactctttcttatctacaaacggagttaggtag

SEQ ID NO: 178632 - DNA, 2031 bp, Artificial Sequence
  derived and/or modified sequence
atggataaatatgacgatctgggtctagaagcctccaaatttattgaggacttgaatatgtacgaggcatctaaagacggacttttccgcgttgataagggcgcaggaaataacccagagtttgaggaaacacgccgggttttcgccacgaaaatggccaaaattcacctccagcagcagcagcagcaactcctgcaggaagagacattaccaagggggagtcggggccctgtgaatggaggaggcagacttgggccccaagctaggtgggaggtggttggctcgaaactgacagtggatggcgccgccaaaccacctcttgctgcttctacgggagcacctggtgcagttactacactcgccgctggccagcctccctatccaccgcaagagcaaagatctagaccttacctacacggcaccaggcacggcagtcaggactgcggatccagggagtcactggccacctccgaaatgtctgcattccaccagcccggcccatgtgaggacccatcgtgcctcacccatggagattactatgataatctcagtttagcatcccccaagtggggggacaaacccggggttagcccctccattggtctgtcagtgggctccggctggccttccagccctggcagcgacccccctctgcccaaaccatgcggcgaccaccccctcaaccataggcagctgagtctcagctcctctcgcagtagcgaggggtccttgggtggccagaattcaggaattggtggacgaagttcagagaaacccacagggctgtggtccactgctagctcacagagggtgtctcccgggttgccttctcccaacctggaaaatggagctccagctgtgggccctgtgcagcctcgtactccctctgtgtcagcccccctggccctcagttgtccgcgacagggcggtctaccccgctccaattccggcctgggaggcgaggtgagcggggtgatgtcgaaacctaatgtggatccccaaccatggtttcaggacggcccgaaaagctacctcagctcgtcggcaccaagtagcagcccagccgggctggacggaagtcaacaaggcgccgtgccggggttgggccctaagcctggctgtactgacctgggtacaggacctaagttgtccccgacttccctggtccatccggttatgagcacactaccagaactgtcctgtaaggaaggtccattgggctggagctctgacggctcactcggtagcgttctcctcgacagtccatcctcccctagagtgaggctcccctgtcaacccctagttcctggccctgagcttcgcccttcggccgcggaattgaaattggaagccctgactcaacgcctggagcgcgagatggacgctcatcccaaggccgactacttcggggcatgtgtcaagtgctccaagggcgtgtttggagctgggcaggcttgccaagctatggggaacctataccatgacacctgctttacctgcgccgcgtgttcccgcaagctgagaggtaaggcattctacttcgtcaatggaaaagtcttttgcgaggaagactttttgtacagtggcttccagcagagcgccgatcgatgtttcctctgtggtcacctgataatggatatgattttacaggccctgggaaagtcttaccatcctggctgtttccgttgcgttatctgtaatgaatgtttagatggagtgccctttactgtggactctgaaaataagatctattgcgtaagggattatcataaagtcctggcgcccaaatgtgcggcttgtggccttcccattctgcccccagaaggctcagatgaaaccattcgggtcgtgtcaatggaccgcgactaccacgttgaatgctatcattgcgaagattgcggcctggaactgaatgacgaggacggccacaggtgttaccctctcgaggatcacctgttttgccacagctgtcatgtaaagagactcgaaaagaggcctagctccacagccctacaccagcatcatttctag

SEQ ID NO: 178633 - DNA, 2031 bp, Artificial Sequence
  derived and/or modified sequence
atggacaagtatgatgacctgggcctggaggccagcaagttcatcgaggacctgaacatgtatgaggccagcaaggatggcctcttccgggtggacaagggagctggcaacaaccctgagtttgaggagaccaggagagtgtttgccaccaagatggccaagatccacctgcagcagcagcagcagcagctgctgcaggaggagaccctgccccggggcagccggggccctgtgaatggaggcggccgcctgggcccccaggcccgctgggaggtggtgggcagcaagctgactgtggatggagctgccaagccacccctggccgccagcactggagcccctggagctgtgaccaccctggccgccggccagcccccctacccaccccaggagcagaggagccggccctacctgcacggcaccaggcatggcagccaggactgtggcagccgggagagcctggccaccagcgagatgtctgccttccaccagcccggcccctgtgaggaccccagctgcctgacccacggggactactatgacaacctgagcctggccagccccaagtggggagacaagccaggagtgagccccagcatcggcctgtctgtgggcagcggctggcccagcagccctggcagtgacccccccctgcccaagccctgtggggaccaccccctgaaccaccggcagctgagcctgagcagcagccgcagcagcgagggcagcctgggcggccagaacagcggcattggaggccgcagcagcgagaagcccaccggcctgtggagcacagccagcagccagagggtgtccccaggcctgcccagccccaacctggagaatggagccccagctgtgggccctgtgcagcccaggacccccagcgtgtctgcccccctggccctgagctgcccccggcagggcggcctgcccaggagcaacagcggcctgggcggggaggtgtctggagtgatgagcaagcccaacgtggacccccagccctggttccaggacggccccaagagctacctgagcagcagcgcccccagcagcagccctgctggcctggatggcagccagcagggcgctgtgcccggcctgggccccaagccaggctgcacagacctgggcaccggccccaagctgagccccaccagcctggtgcaccctgtgatgagcaccctgcctgagctgagctgcaaggagggccccctgggctggagcagtgatggcagcctgggctctgtgctgctggacagccccagcagcccccgggtgcggctgccctgccagcccctggtgcccggccctgagctgcggcccagcgctgctgagctgaagctggaggccctgacccagaggctggagcgggagatggatgcccaccccaaggctgactactttggagcctgtgtgaagtgcagcaaaggagtgtttggagctggccaggcctgccaggccatgggcaacctgtaccatgacacctgcttcacctgtgccgcctgcagcaggaagctgcggggcaaggccttctactttgtgaatggcaaggtgttctgtgaggaggacttcctgtacagcggcttccagcagagcgctgaccgctgcttcctgtgtggccacctgatcatggacatgatcctgcaggccctgggcaagagctaccaccctggctgcttccgctgtgtgatctgcaatgaatgtctggatggagtgcccttcaccgtggacagcgagaacaagatctactgtgtgcgggactaccacaaggtgctggcccccaagtgtgccgcctgtggcctgcccatcctgcccccagagggcagtgatgagaccatccgggtggtgtccatggaccgggactaccacgtggagtgctaccactgtgaggactgtggcctggagctgaatgatgaagatggccaccgctgctaccccctggaggaccacctgttctgccacagctgccacgtgaagaggctggagaagaggcccagcagcacagccctgcaccagcaccacttctag

SEQ ID NO: 178634 - DNA, 11331 bp, Artificial Sequence
  derived and/or modified sequence
gcccggacacctgtctgcagcatggataagtatgacgacctgggcctggaggccagtaaattcatcgaggacctgaacatgtatgaggcctctaaggatgggctcttccgagtggacaagggtgcaggcaacaaccccgagtttgaggaaactcgcagggtgttcgccaccaagatggccaaaatccacctccagcagcagcagcagcagctcctgcaggaggagactctgcccagggggagtagaggccctgtcaatggagggggccgcctgggcccacaggcccgttgggaagttgtgggcagcaagctgactgtggatggtgctgccaagcctcctcttgctgcctcgacaggggcacctggggcagtcaccaccctcgctgctgggcagcccccgtacccaccgcaggagcagagatccaggccatacctgcatggcacgaggcatggcagccaggactgtggttccagggagagcctggcgacttctgagatgtctgctttccaccagccaggcccctgtgaggatccttcctgcctcactcatggagactattatgacaacctctccttggcaagcccaaagtggggtgacaaaccaggagtgtcccccagcatcggcctgagtgtagggagtgggtggcctagctccccggggagtgacccaccactgcccaaaccctgcggggaccatcccctaaatcaccgacagctctccctgagctccagcaggtcttctgagggtagcctcggtggtcagaatagtggcattggtggccgcagcagcgagaagccaacaggcctttggtccactgcctcctcccagcgggtgagccctggcctgccttccccaaacttggagaacggagcaccagctgtggggcctgttcagcccaggaccccttctgtgtcagcacccttggccctgagctgccccaggcaaggaggtcttccaagatcaaactcggggctggggggtgaggtttcaggtgtgatgtccaaacccaatgtggacccccaaccctggttccaggatgggcccaaatcttacctttccagttctgccccgtcatcctcgccagctggtctggacggttcacagcagggtgcggtccctgggctggggccgaagcctggctgcacagaccttggcactggtcccaagctcagccccaccagtcttgtccatccagtgatgtccaccctgcctgagttatcttgtaaagagggtcccctgggctggtcttctgatggtagcctgggatctgtgctcctggacagccccagctcccctagggtaaggctgccctgccagcccctcgtcccaggtcctgagctgagaccctctgctgctgagttgaaattagaagccctcacccaacgtctggagcgagagatggatgctcacccgaaggctgattactttggagcctgtgtgaaatgcagcaaaggggtgtttggggctggccaggcctgtcaggccatggggaacctctaccatgacacatgcttcacctgtgcagcttgcagccggaagctgagaggaaaagccttttattttgtcaacggcaaagtgttttgtgaagaagacttcctgtactctggtttccagcagtcggctgacaggtgttttctttgtggacatctgatcatggacatgatcctgcaagccctggggaagtcctaccaccccggctgtttccgctgtgtcatctgtaatgagtgtttggatggggtgcccttcaccgtggactcagagaacaagatctactgtgtccgagattaccacaaggtgctggcccccaagtgtgcagcctgtgggcttcccatccttccacctgagggctcagatgagaccatccgtgtcgtgtccatggacagagactaccacgtggagtgttaccactgcgaggactgtggtctggagctcaatgatgaagatggccaccgctgttatccgctggaggaccacctgttctgtcactcctgccacgtgaagaggctggagaagagaccctcatctacagcccttcaccagcaccacttctagccagagccacttgcagacatcacggcaggggatgaggagccggggttgctgctgctgcttccggtggcccctggggtggaagtggggtaggggaagaggaggggcaggagggagagttcctgtgagcatgtggggggtgcctttcctttaaccagggaggtgaacactacctgcctcctgcgtgtattttccaagtgcttttctctgttgccacattttcctcaggttactcaggaaaatgctccagcatgtgcgagcacatgacctgaggttgcatcatagcaccaaaggaatcctcctgtcccctctgggaacatttcatgcttcagagggagaggtttttattgagcttgtttcacaatatccccttgaagggacagctcagctgccaatacattcaaccctttctcttccttcaggaaaatacctatacccaaatgttccctcccccgacatatatcatggcatgatttaaggcttcttttcacctgagagcttcagttcttctgcagaatggctgcaaatttaattgcattaaggcaagaaggaagctctaatgtgtgctttgtatcctaagataaatttgcttagaaaaccagagtcaagatttgaaataggtgaggcagggtttcctccttagacactgacagcattctctgtaccccttcaaatccttactctcctaaaggcagctgagtccgcgacagaaatttgccctatgtgagtaaaacatactttgggagaagaacttggtgcaggcaccaggatttttttttttgcccacgtgtttgcgctgtttttctctggagttctcaagagttggtgacttggaaggccgcttctgcaaggcaagtctcaggaacccatgcaggtacatcgcttgcacctgtttttagcttatttaatgacgggcttttgggaagagctgcccgcatactgagagacagcttcttataaacaaggagagtttttgtgtgtgcgagatctctaagccagcgtgggagggagcgcctcaggataagttattatattcatttcgttggtttctctcctgcccaattcttggcacaggcattatgtttgaagaaaccaggataaggtacactgcttttgtctgtttaatttttttagttgtttcccttcactttcagtcttccacacacaaaaaatacctcacagagcttcaccaaatcacagattcaggaggaatttggctttcacactggactcagataccttcttcagtgtgttggaaatcactggcttcacacaggcccaactccagctggtcagggcagagtgatcgtaactaaaggtcagtggggaatagatccgattcagtgcttttgccttatgcatttcagcatcctggctccccagggtggcaggagctgagggagggccacacactggcaagatttcaagaccactctctgcactgaagaggtaaaatttgcactgcaagtcacatccctgaggccagaggtcagtaccctttggtatttcgattagaagaagctgcaaaagaaaggcagcccattttaccattgccagccaggccggggacacaggagccggtgtgtgcactctgcctcctcaccttgcacccagagcaagaggactgggtgctgggctgcagaggccggtcagtggagcccctagcacgtgtgaactcaggcttttcattgggcccggctccacttctaggccatgttttgactcatttggtaaccattgcctgtaagcagcacagaattggtgccatggattatcttttccatgttgatggaattcattctgttggaatcctttggccagatgtcacttcagccagggtgtgcatcatcattggttctttttcacaggctgagcctcctgaaaacccatgaacgctggggctggggaagtgaaccctgaggtggggaccctctcttcccatcaaatcatccagctcagtgtggggcgtggcaggggggtaaatgaagccagccaatgtgttaacctgtctctgtcaacctaagaatgttggccttactgacacacctttgctccatgttcaagaccagaagtagctgggatttgtttgcaaattgggtaattagtttaaaaatctgtgattacatttttaaatgaaattttcaaagtggcctagattgaggtgattcagataggtttgcgaatataccattttatattgttgagaaagaacaaaaagggaatttccagatgtcctagaaatcctagcaacagatttctctggttgtcagtttccctggagaaggcgccagataggaatctccaatcagttgtttttctcttcgcttcaggcccttacacaaaagccatgaagagatgttcacctacccggtattttaaatgttctgtaaattattagccaaatagaactgtaatggggttgtatttatgggcgcctagaaagaaaacacaaggacttggtaggccaggaagaaaagattttaaaatttagaatgaatagcccttctgggttttctttttgacaattcttggacttgaggtaaaacaaggaggattgtggccggatttcagatcccaaagccagcctccatcttaggcctttgcctcattgtgccttttaggttttcttacccaccgtctcctgttttgtcttttttttcttttctcctacccctatcttgggacattcagaaactgcctgggtggtttgagaagagacaacccagtttgatctgcaatacaaggatccattcgtaatctctctctcactgatgttattcccccatctgccgtcttggttcatctcaccacagaagggcatttagtcctacccagccatcggctgcgtatgacagcaggatggcacttcccatttctctgtggttagtgctcgagtgaaaacctctttcagctgagtcctctgaggttctgctgttgagtcctgggtggctgatggaatgattgaggaggtctggtcaccctcaagcgccgtcatcgccttgtttccatgggcttctgtcacacaaaatgaagaacagaaatgttaggacttaagagaatgtttggaattcacacctctttgcagtcctttcaaggctgctgctctgtgctgtgtcccatgcatgtgaaagtagagctgtgatggctgctgggacgcttgcaaagatcatgtgtgagaattgagcacaagaccacaaattattactgcttgatgcgcttgttaaaactctatctgccaggaaaccaaattttcttttcttttctttttttttttgagacagggcctcactctgttgcccaggctggagtgcagtggcgcgatctcagctcactgcagcctccacctactgggctcaagtgatcctcccacctcagcctcccgagtagccgggaccacaggcgtgtatgactggctacgcctggctaatttttgtatttttaatagagacgagtttcaccatgttgcccaggatggtctggaactcctgggctcaagtgatctgcccacttccgcctcccaaagtgttgggattatggccattagccactgtacctggcacaatttttttttgtaccctcctttatgccaagaatcagtcctaatttctttactatgtgaagtaacttttaaaggtaatagaaaaggccaggcacagtggctcatgcctgtaatcccaggcgccgtggctcacgcctgtaatcccagcactttgagaggctgaggcgggtggatcacttaaggtcaggagttagagaccagcctgaccaacatggtgaaacactgtctctactaaaaatacaaaattagctgggtttggtggcgcacgcctgtaatcccagctacctgagaggttgaggcaggagaatcgcttgaacctgggaggcagaggttgcagtgagccgagatggtgccattgcactccgacctgggcaacagagcgaaacactgtctcaaaaaaaaaaaaaaaagtaacagaaaaaagagtgaaatatattagctatcttttattctgagccaaaacttgacagatgtgggaaatcttcatatagtgtatgaaaatttcattgtacagggaaattattttcctctgtgtcttttcttttactataaagtgattcagaattttactgttactataaaattatgcaaagtattgtgacaaaactgcatcaatttgttgactattaaagtgctccttgaacattatatttcctgggtcttttctgtgtgtggagtcagcaaactgttttttgctacctggactttgtcttcttttacagctctggattcttaaaagtaccacataggtagcaaacctgtgaagggtatgagattttaccctacttgcaggctaataaagtgagcacaccacatgggttcatggatcctggcagaagttatgagactcataggtcagagacaaaggacagtttattatagcaatagcagtggccagattatcagcatttacactggttccctgagccccaggccccaagaagagggccaggtgagacctgcacacgcagtgggctgcattacaagaggaacccccatgcttaggggaccctggtatttgataatgggcagtaagcctgcctgacttttgctccagagacagacactatctctgtcatccaagactgttcactagataaacatccttgaaaatataagtctggaacctggcaattggtgtctattcttaccagatgtataaaaatgtgagaggccttggagaatcatatcccaagaatcagcagtttcttttactggacctttaagattgagacttgtaaggtcctgatgcagtgacttgtaaggtcactttgtctctcttgtgaatgttactgttttttctcttctgaggttatgaccaaagaatcctcaaggcgagtgatccttcaggtttgagacagccacatgcaggaagacaggacttgtagagtgttggggccaagtgtgtggttagaatccttggggtggggaaagagtttgttctagactccagtgtagtccttgtggctaccaggtctgacgtgccaaggacacgggaaagctgggagtgaggatactcatagtcatagcaccttacaccagaataaaagttttttttttctttttaagtgatgagagaatggctagtctgattttgccaacatgggctgctatttgcttaagaccttgatggtataaggagtgaagatgcaatcagggtaaaaggcggtctggagttgtggtgtgctggcaaaccagccctctggggcaaaaaattaaaaagccttgatatggagtgtttgctgatacctatgatgtaaatattcccgccatggccactttccagctaccagcaaggcatcctggcaccagggattgggaggagatggcatagtcctaagagtcagccttgggcattgggccatgtgggactgggcagtggggtatctggtctggttctaagtgctgtgatgaagcagtagcagctgtaatagctggcatttcccgtgtgctcatcacatagcagatgttattccaaggactgtatgttctttatcatccctcatttgatagacaagacaactgagacacaaaagggtgaaataaacagtaagtactccatcccaggccatctcatccagagggtgctgtcttgaccactctactactctggttgatgggaggcagtaaattgtccatcagtatacttcttcatcaaagctacatagtcaaaaagccacaggaggctgtgaggagaagctcactgctgctctgttgaagtctgtattggtttcctatggccactcttaacaaattaccacaacctcagtggcttaaaacaacacaaatatatcattctgtcatcctggacacgagccaaaggttgtcggcagaagcgaattgcttccagaggtgctatagggtgctgcccattccttgccccttttccgcttctagaggctgcccattttccttggcttgtggctgcatcattctggctgcttctattgtcacacctcctctctgaccctccctgcctccttgtaaggacacttgggattacgcccatccagataatctagaataatctcccattttgtgattcttaataacatctgcaaagcctcttttaccttgcagaataagatattcacaggttctggtgaggaggacagggacatctctgaaggggagggaagcaggagatagggtctggaggcatggaattggcttcctaaggccaattcaggctgacttcctagaactaagtcaaaaggaaaaccccaactttccacgctcaagtaacaaaaggaccagaggctactccctttgcaacctccccacccccagccccttttctgcatggcaggtgaaaaattgaaagtatcgctaattgatcccctcccacaaccaatcagactggtcttaggccaagtcttcatttgcctaggagtataactttgtaacttcagcctctgattgggcgttttacacaaccagtcagatgtttgtatagggtggtgtaactttgtaactttgcttcagcctctgattggtcccctcccacaaccaatcaaactgatcatggacctctgcttcatttacatagggtgtacaccaagtaaccaatgggaaacctctagagggtatttaaatcccagaaaattctgtaaccgggttcttgagctgcttgggctgctcccaccctgtggagcgtactttcgtttttcaataaatctcttttgttgcttcattctttacttgctttgtgcgttttgtccatttctttatcaagacgccaagaacctggacaccctccaccggtaacaggaggagcattagtcagcctaccacagactccaacgaacgttttttgagaggaaatgaaagaatattcctaagttattgggtgccttttcttcaggaatccctgaaagtgggggtttgcaattttccctggattgaaaacagaaatgcttcctacacaaacatgattgagaccttgtactctaggtgtaaaaaaacagagtaggtcatactctgtgggttatggtcagagagatctggttagaagttcccaggtaggcgacagccctagatgtgtgacacttctaggagaatctctggctatgtggatacgtccaggtgtgtaaggcagcctcagggactgccaccacttggtcacatacatgtccctccaactaatcctagctctcaaggacaggtggttctgggccctgtgttgcccatgagacttggtccacggcaagcctgtgacggagtgaaagtgaggggacacccaatttgaaaactcggcaggaagccagactccatgacatacaaatagatcaaagtgaatcggctccgttgtttggggaaatacctgaggtttgttgtttcgtgccaagaagattaacaacacggacacacgtgggtgggttaaggagcagaaagtttaacaggcagaaaaaagagaacagctcccccatgcagagggaggaggactccgaatggatctccccattcctggcgggaagcagactgatatatagaggagggggtttgaagaggtggtatttgatttacatagagcccaagggattggtttgaccaggtgtgccatttacatagccctcgaagaaactggccattccaccttgatcttttattatgcagatagggttttttacttggccagagccttgacacctgcacacatggcaacaaacagaagggaggcgaaatcttccatattggatgcacctgtcttccaggtgcagctgccggcatttatctgtgcaagcttctagcttgcttatttatgcttgcagcttgacttttcaggctgctttctgttggaaaagaaatggttttgggggctgctttttattaaaagaaaagccttaccaaggactcctgtaccctatctgcctaaattttttttaactactatattaaaaggtctgtaagtgggagctggccctaaaagtaggttgtagagattatttggatgtgccaacaagcttcatctgcagcttggactgtctccattggaaggcctctggcagattttgtaaaaagttatataacaattttactataggaaaaacttggctacagatatgaatttatattacccatcattggctggttccttatcctgaacattggtttccttggaatctgattttggcttgtttggcctttaaaaaccccagaagaatggggtttctgccagattattttctggttttcagtctcactgaatgtcacaaaggccttggtttatggttcccaactggtaaagaaacgtcaaactttgcctctcttagttccttctacatgacaatgggtggcagttgctcatatggaagcatttcttttccccctaaagcctatgagacaggctgcaacttaaacccctattttattaaaggagaggaaatgtccaagagcccagagatagtgggtaaaagcatcataaggactagaaatggggtcttcttgttgctaattagtaggggtgaggggtaagtggcagatgtgactgccgtccatgcccagacagggaattgtccttgaacctactcatgcggtgtcttctggggtacagtgagtccacagggcaggacggccttggagtcaagagcccagactcacattctatctcaggcttcataactcaattgctccatgaccttaagccaatttagttccctcatctgtaaaaatggggataacaactgaatttacctcatgggattgtgtaatgcccaaccttgtttttactaaccctgtttttagactctccctcttcctttaatcacctagccttgtttccacctgaattgactctcccttagctaagacagccagacagactccatcttggctctttcactggcaccccttcctcaaggacttaacttgtgcaagctgactcccagcacatccaagaatgcaattaactgataagatactgtggcaagctatatccgcaattcccaggaattcgtctgattgataacgcccaaagccccgggtctatcaccttgtaatagtcttaaagcccctgcacctggaactgtttactttcctgtaaccatttatccttttaactttttgcctactttatttctgtaaaattgttttaactagacccccccctcccctttctaaaccaaagtataaaagaaaatctagccctttcctcagggctgagaaaattttgagtgttagccgtctctcggtcgctggctaataaaggactcttaattcgtctt

SEQ ID NO: 178635 - DNA, 2031 bp, Artificial Sequence
  derived and/or modified sequence
atggacaagtacgacgacctgggcctggaggccagcaagttcatcgaagatctgaatatgtatgaggccagcaaggatggcttgttccgggtagataagggagccgggaacaaccccgaatttgaggagaccaggcgggtctttgcaaccaaaatggctaaaatacacctgcaacagcagcagcaacagctgctccaggaggagacactaccccgcgggagccgcggcccggtcaacggcggtggaagattgggacctcaggcccgatgggaggttgtgggaagcaagctaacagtggacggagccgctaaacctccactcgctgcaagtactggcgcccctggtgccgtgaccacactggctgccggccagcccccatacccaccccaagaacagaggtcccgaccctatttgcacgggacaaggcacggcagtcaggattgcggttcccgggagtctctcgccacatccgaaatgtctgccttccaccagcctgggccctgtgaggacccctcatgcctgacacacggggattattatgataacctcagcctagcatccccaaagtggggagataagcccggagtcagccccagcatcggcctgtccgtagggagtggctggccatcctctcctggttccgatccccccctgccaaagccatgtggagatcaccctctgaaccacaggcagctgtccttgagctcctcccgcagcagtgagggatctctgggaggacagaactccggaatcggagggcgtagttcggagaagcctaccggcctatggtccacagctagctcgcagagagtctcaccaggactgcctagccccaatctggagaatggggccccagctgtgggccccgtgcagccccgtactcccagtgtctccgcgccattggctctgtcatgtccgcgacaaggaggattgccacgctcaaacagtggtcttggtggagaggtatcgggggtgatgtccaagccgaatgtagaccctcaaccgtggttccaggacggccctaagtcctacctcagttcaagcgcccctagcagcagtcccgcgggcctggatggctcccagcagggagctgtacctggcctgggccccaagccaggatgcaccgatctaggcacaggacccaagcttagccctacttccctggttcacccagtcatgagtacactgcctgagctgagctgcaaggagggaccactgggctggtcctccgacggtagcttaggctccgttcttcttgattccccttcctcgcctcgcgtccggttgccatgtcaacccctggtgccaggtccggagctacgacctagcgcagccgaactgaagctggaggcactgacccaacgactcgagcgtgaaatggatgctcatcctaaggcagattactttggagcatgcgtaaaatgctctaaaggtgttttcggagcaggccaggcatgtcaggccatggggaatctataccatgatacctgctttacctgtgctgcctgtagtcgaaaactcagaggaaaggctttctacttcgtcaacggcaaggtgttctgcgaagaagacttcttgtacagtggatttcagcagtccgcagatagatgcttcttgtgtgggcacctcattatggacatgattctacaggcccttggcaagagttaccatccagggtgctttcgctgcgtaatttgcaatgagtgtttagatggggtgccctttacggtggactctgaaaacaagatctactgtgtccgcgactatcacaaggtgctggcgcccaaatgcgccgcctgcgggctcccaatccttcctccagagggatccgatgaaactattcgagttgttagtatggacagggactatcatgtggagtgctatcattgtgaagattgtggcctggagctaaatgatgaagatggacatagatgttacccccttgaggaccacttgttttgccactcctgccatgtaaaacgacttgagaagcggccctcatcaaccgcgctccaccagcatcacttttag

SEQ ID NO: 178636 - DNA, 2031 bp, Artificial Sequence
  derived and/or modified sequence
atggacaaatatgacgacctgggtcttgaggcttctaagttcattgaagaccttaacatgtatgaagcaagcaaggacggactgttccgtgtcgataagggcgctggcaataatcccgagtttgaagaaactcgcagagtgttcgcaacaaagatggctaaaattcacctgcagcagcagcaacagcagcttctccaggaggaaactctgccaaggggatcccgcggtccagtcaatgggggaggacggctgggccctcaggcaaggtgggaggtggtaggatctaaactcactgtggatggagcggctaaacccccattggccgcatccaccggagcaccaggggcagtgaccacgcttgccgctggtcagccaccctatcccccacaagagcagcggtccagaccttacctgcacggaacccgacacgggtcccaagattgtggatcgagagaaagtctcgcgacaagcgagatgagcgctttccaccagccaggcccatgcgaggacccctcatgcctgacgcacggtgactattatgacaacctctccctagctagccctaagtggggcgacaagccgggagtctctccctcaatagggctatctgtagggtcaggatggccgagtagtcccggaagtgacccaccactcccaaaaccatgcggagatcacccactcaaccaccggcagttgagtctgagcagctctcgctctagcgagggaagcttaggtggccagaatagcggtatcggcggacgaagctcagaaaagcctacgggactttggagtaccgcaagtagtcaaagggtcagccccggattgccttcccccaatttagagaacggtgccccagccgttggacctgtgcaaccccgtactcctagtgtgagtgcaccactggccctcagttgtcctcgccagggaggacttccaagaagcaattccggattgggcggtgaagtctccggagtcatgtccaaacctaatgtggatccgcagccatggtttcaagacggccctaagtcttacctgagctcctctgctccttcgtcttctccagcgggattggatgggagtcagcagggagccgtgccgggtcttggtcctaaaccgggatgcactgatctgggtacgggccctaagctctcgcccacttcattggtacaccctgtaatgtcaaccctccccgaactgtcttgtaaggaaggccctctcggatggagcagtgacggcagcctgggcagcgtcctgctggacagtcccagctctccgagggtccgtctcccgtgtcagccattggttcccggaccggagctgcgaccatctgctgccgaacttaaactggaagccctgacacaaaggttggaaagagaaatggacgcgcaccctaaggccgactatttcggagcctgtgtcaagtgctccaagggggtcttcggggctggccaagcttgccaagccatgggcaacttataccatgacacatgtttcacatgcgccgcttgtagcaggaagcttcgaggaaaagctttctactttgtgaacggtaaggtgttctgcgaggaagattttctgtattccggttttcagcaaagcgcagatcggtgttttttatgtggccatctcattatggacatgatactacaggctctgggtaagtcttatcacccaggttgtttcaggtgcgttatctgcaacgaatgtcttgacggggtaccattcactgtcgattctgaaaataagatctactgtgtgagggactatcataaggtactggcccctaagtgcgccgcttgtgggcttcctattctccctccagagggcagcgatgaaaccatacgggtggtttccatggacagggattatcacgtggagtgttaccattgcgaggactgcgggctcgagctcaatgacgaggatgggcatagatgttatccccttgaagatcaccttttttgtcactcctgccacgttaagagactcgagaaaagacccagtagtactgccctgcaccagcaccacttctag

SEQ ID NO: 178637 - DNA, 2031 bp, Artificial Sequence
  derived and/or modified sequence
atggacaagtacgacgacctgggcctggaggccagcaagttcatcgaggacctgaacatgtacgaggccagcaaggacggcctgttcagagtggacaagggcgccggcaacaaccccgagttcgaggagaccagaagagtgttcgccaccaagatggccaagatccacctgcagcagcagcagcagcagctgctgcaggaggagaccctgcccagaggcagcagaggccccgtgaacggcggcggcagactgggcccccaggccagatgggaggtggtgggcagcaagctgaccgtggacggcgccgccaagccccccctggccgccagcaccggcgcccccggcgccgtgaccaccctggccgccggccagcccccctaccccccccaggagcagagaagcagaccctacctgcacggcaccagacacggcagccaggactgcggcagcagagagagcctggccaccagcgagatgagcgccttccaccagcccggcccctgcgaggaccccagctgcctgacccacggcgactactacgacaacctgagcctggccagccccaagtggggcgacaagcccggcgtgagccccagcatcggcctgagcgtgggcagcggctggcccagcagccccggcagcgacccccccctgcccaagccctgcggcgaccaccccctgaaccacagacagctgagcctgagcagcagcagaagcagcgagggcagcctgggcggccagaacagcggcatcggcggcagaagcagcgagaagcccaccggcctgtggagcaccgccagcagccagagagtgagccccggcctgcccagccccaacctggagaacggcgcccccgccgtgggccccgtgcagcccagaacccccagcgtgagcgcccccctggccctgagctgccccagacagggcggcctgcccagaagcaacagcggcctgggcggcgaggtgagcggcgtgatgagcaagcccaacgtggacccccagccctggttccaggacggccccaagagctacctgagcagcagcgcccccagcagcagccccgccggcctggacggcagccagcagggcgccgtgcccggcctgggccccaagcccggctgcaccgacctgggcaccggccccaagctgagccccaccagcctggtgcaccccgtgatgagcaccctgcccgagctgagctgcaaggagggccccctgggctggagcagcgacggcagcctgggcagcgtgctgctggacagccccagcagccccagagtgagactgccctgccagcccctggtgcccggccccgagctgagacccagcgccgccgagctgaagctggaggccctgacccagagactggagagagagatggacgcccaccccaaggccgactacttcggcgcctgcgtgaagtgcagcaagggcgtgttcggcgccggccaggcctgccaggccatgggcaacctgtaccacgacacctgcttcacctgcgccgcctgcagcagaaagctgagaggcaaggccttctacttcgtgaacggcaaggtgttctgcgaggaggacttcctgtacagcggcttccagcagagcgccgacagatgcttcctgtgcggccacctgatcatggacatgatcctgcaggccctgggcaagagctaccaccccggctgcttcagatgcgtgatctgcaacgagtgcctggacggcgtgcccttcaccgtggacagcgagaacaagatctactgcgtgagagactaccacaaggtgctggcccccaagtgcgccgcctgcggcctgcccatcctgccccccgagggcagcgacgagaccatcagagtggtgagcatggacagagactaccacgtggagtgctaccactgcgaggactgcggcctggagctgaacgacgaggacggccacagatgctaccccctggaggaccacctgttctgccacagctgccacgtgaagagactggagaagagacccagcagcaccgccctgcaccagcaccacttctag

SEQ ID NO: 178638 - protein, 157 aa, Artificial Sequence
  derived and/or modified sequence
MGRLTEAAAAGSGSRAAGWAGSPPTLLPLSPTSPRCAATMASSDEDGTNGGASEAGEDREAPGERRRLGVLATAWLTFYDIAMTAGRLILSPRLECIGAISAHCQPQPPEFKRFSCLGLRSSWDYKRGPPRPINFCIFGRDRVSPCWPGWSRTPDLK

SEQ ID NO: 178639 - protein, 288 aa, Artificial Sequence
  derived and/or modified sequence
MGRLTEAAAAGSGSRAAGWAGSPPTLLPLSPTSPRCAATMASSDEDGTNGGASEAGEDREAPGERRRLGVLATAWLTFYDIAMTAGWLVLAIAMVRFYMEKGTHRGLYKSIQKTLKFFQTFALLEIVHCLIGIVPTSVIVTGVQVSSRIFMVWLITHSIKPIQNEESVVLFLVAWTVTEITRYSFYTFSLLDHLPYFIKWARYNFFIILYPVGVAGELLTIYAALPHVKKTGMFSIRLPNKYNVSFDYYYFLLITMASYIPLFPQLYFHMLRQRRKVLHGEVIVEKDD

SEQ ID NO: 178640 - DNA, 867 bp, Artificial Sequence
  derived and/or modified sequence
atgggcaggctcacagaagccgcggctgccggaagtggcagcagggccgctggctgggcagggagtccccctactctcctgccactcagccctacatctccccggtgcgccgccactatggccagctcagacgaagacggcactaacggtggagcttcagaagctggggaagaccgcgaggcgccaggggagaggagaaggcttggagtactggccactgcttggttaacattttacgatatcgctatgactgctggctggctcgtgctggccattgccatggtgaggttctacatggaaaagggaacccatcgtgggttatataagtccattcagaagactctgaaattcttccaaaccttcgcgctgcttgaaatcgtacactgcctcataggaattgtgccaacatcagtcatcgtgaccggcgttcaggtttcttcacggatttttatggtgtggctgattactcactcaatcaagccgatccagaatgaggagtccgttgtactttttctagtggcctggaccgtcacagaaatcactaggtattcattttatactttctccttactggaccacctcccttatttcataaagtgggctcgctacaattttttcattatcctctaccccgtgggagtggctggagaactgcttaccatatacgcagctctgccccacgtgaagaagaccgggatgttttcaattaggcttcctaacaagtacaatgtgagttttgattattactacttccttttaatcacaatggcatcctacatacctcttttccctcagctctactttcacatgctgagacaacgccgcaaagttctgcacggcgaggtgattgtcgaaaaagatgattag

SEQ ID NO: 178641 - DNA, 867 bp, Artificial Sequence
  derived and/or modified sequence
atgggccgcctgacagaagctgctgctgctggcagcggcagcagagctgctggctgggccggcagcccccccaccctgctgcccctgagccccaccagcccccgctgtgccgccaccatggccagcagtgatgaagatggcaccaatggaggagccagcgaggccggagaagatcgggaggcccctggagagcggcggcggctgggcgtgctggccacagcctggctgaccttctatgacatcgccatgacagctggctggctggtgctggccatcgccatggtgcgcttctacatggagaagggcacccaccggggcctgtacaagagcatccagaagaccctgaagttcttccagacctttgccctgctggagatcgtgcactgcctgattggaattgtgcccacctctgtgattgtgactggagtgcaggtgagcagccgcatcttcatggtgtggctgatcacccacagcatcaagcccatccagaatgaggagagcgtggtgctcttcctggtggcctggacagtgacagagatcacccgctacagcttctacaccttcagcctgctggaccacctgccctacttcatcaagtgggcccgctacaacttcttcatcatcctgtaccctgtgggcgtggccggggagctgctgaccatctatgctgccctgccccacgtgaagaagacaggcatgttcagcatccggctgcccaacaagtacaacgtgtcctttgactactactacttcctgctgatcaccatggccagctacatccccctcttcccccagctgtacttccacatgctgcggcagaggaggaaggtgctgcatggagaggtgattgtggagaaggatgactag

SEQ ID NO: 178642 - DNA, 867 bp, Artificial Sequence
  derived and/or modified sequence
atgggccggctgaccgaggccgccgccgccggcagcggcagccgggcagcaggttgggcagggagccccccaaccctgcttcctttatcccctacgtcccctcggtgcgctgcaaccatggcctcttccgacgaagacggcaccaatgggggcgccagcgaagctggcgaggacagggaagcaccaggcgaacgcagaagactaggcgtgctggctacagcctggctgaccttctacgatatcgccatgactgccggctggcttgttctggcgatcgccatggtccggttctatatggagaaggggactcataggggactgtacaaatccattcagaaaaccctgaaattctttcagacattcgctctgctggaaatcgtgcactgtcttatcggcattgttcccacatcagtgatcgttacaggggtgcaggtttccagccgcatatttatggtttggctcatcactcactccatcaagcctatccagaatgaggagagcgtagtgcttttccttgtggcttggactgtcactgagattaccagatattccttctacaccttttctctgttggatcatctgccttactttatcaaatgggcccgctataatttttttatcattctgtatcccgtgggcgtggctggcgagttattgactatatacgccgcgctgccccatgttaagaaaactgggatgttttcaattcggctccctaacaaatacaatgtgagtttcgattactactactttttgctgatcaccatggcatcttatatcccactgttccctcagctgtacttccacatgctgcggcagaggcgaaaggtgttacacggcgaagtcattgtcgaaaaagatgactag

SEQ ID NO: 178643 - DNA, 867 bp, Artificial Sequence
  derived and/or modified sequence
atgggcagacttactgaggcagctgctgccggatccggaagccgggcagcgggatgggcgggatctccccctacacttcttcccctatcccctacgagtcctcgttgcgccgctaccatggcatcttcggatgaggacggtacaaacggtggcgcatctgaagcaggtgaagaccgggaggcacccggagaacgtcgcagactaggcgtgttggccacagcgtggctgaccttttacgatatcgcgatgacggccggatggttggtgctggcaatagcgatggtaagattctatatggagaaagggacacaccgcggtctgtataagtctattcagaaaacacttaagtttttccagacattcgccctcttggagatcgttcactgtctaattggaattgtgcccacaagcgttatcgtgaccggagtgcaggtgagctctcgtatcttcatggtgtggctaataacacactctattaaacctatccaaaatgaggagtcagtcgtcctctttctggttgcttggaccgttacagagattacgcgctattccttttatacattctctctcttggaccaccttccctacttcataaaatgggctaggtacaacttcttcattatattgtaccctgtgggcgtggcaggtgaactactaacaatctatgcagcactgcctcacgtgaagaaaaccggcatgtttagcatcagactcccgaataaatataacgttagtttcgattactactatttcttgctaattaccatggcctcttacataccgctcttcccccagctttattttcacatgttgaggcagaggaggaaagtgctccacggcgaggtcattgtagagaaagatgattag

SEQ ID NO: 178644 - DNA, 1310 bp, Artificial Sequence
  derived and/or modified sequence
ggtagagctggctgcgccgagccccctgcgcgctgcacatggggcgcctgacggaagcggcggcagcgggcagcggctctcgggctgcaggctgggcagggtcccctcccacgctcctgccgctgtctcccacgtcccccaggtgcgcggccaccatggcgtccagcgacgaggacggcaccaacggcggcgcctcggaggccggcgaggaccgggaggctcccggcgagcggaggcgcctgggggtcttggccaccgcctggctcaccttctacgacatcgccatgaccgcggggtggttggttctagctattgccatggtacgtttttatatggaaaaaggaacacacagaggtttatataaaagtattcagaagacacttaaatttttccagacatttgccttgcttgagatagttcactgtttaattggaattgtacctacttctgtgattgtgactggggtccaagtgagttcaagaatctttatggtgtggctcattactcacagtataaaaccaatccagaatgaagagagtgtggtgctttttctggtcgcgtggactgtgacagagatcactcgctattccttctacacattcagccttcttgaccacttgccatacttcattaaatgggccagatataatttttttatcatcttatatcctgttggagttgctggtgaacttcttacaatatacgctgccttgccgcatgtgaagaaaacaggaatgttttcaataagacttcctaacaaatacaatgtctcttttgactactattattttcttcttataaccatggcatcatatatacctttgtttccacaactctattttcatatgttacgtcaaagaagaaaggtgcttcatggagaggtgattgtagaaaaggatgattaaatgatctctgcaaacaaggtgctttttccagaataaccaagattacctgagtccaagttttaataacaagaataaacaactttgtgaaatatcatggattgtatggtttcttaaaatataacttgagacacgtggtatttgccagtatttgtgttcctcttgtgccagatctattttttacaagaactgtgcaaatatcagtaacttttgggtaggtattgattattaggaaaataattaggtgtattatctgggggaaaaaaaaacttttgctaagttttttttgaaacatgctcaaagctttttaaatcaatatttagaaattagtttaacgatttactattatacctgctagtgatatttatgtgatatttataaatgaaaataaatgcaaaattataacaa

SEQ ID NO: 178645 - DNA, 867 bp, Artificial Sequence
  derived and/or modified sequence
atgggcagactgaccgaggccgccgccgccggcagcggcagcagagccgccggctgggccggcagcccccccaccctgctgcccctgagccccaccagccccagatgcgccgccaccatggccagcagcgacgaggacggcaccaacggcggcgccagcgaggccggcgaggacagagaggcccccggcgagagaagaagactgggcgtgctggccaccgcctggctgaccttctacgacatcgccatgaccgccggctggctggtgctggccatcgccatggtgagattctacatggagaagggcacccacagaggcctgtacaagagcatccagaagaccctgaagttcttccagaccttcgccctgctggagatcgtgcactgcctgatcggcatcgtgcccaccagcgtgatcgtgaccggcgtgcaggtgagcagcagaatcttcatggtgtggctgatcacccacagcatcaagcccatccagaacgaggagagcgtggtgctgttcctggtggcctggaccgtgaccgagatcaccagatacagcttctacaccttcagcctgctggaccacctgccctacttcatcaagtgggccagatacaacttcttcatcatcctgtaccccgtgggcgtggccggcgagctgctgaccatctacgccgccctgccccacgtgaagaagaccggcatgttcagcatcagactgcccaacaagtacaacgtgagcttcgactactactacttcctgctgatcaccatggccagctacatccccctgttcccccagctgtacttccacatgctgagacagagaagaaaggtgctgcacggcgaggtgatcgtggagaaggacgactag

SEQ ID NO: 178646 - protein, 1205 aa, Artificial Sequence
  derived and/or modified sequence
MVLLSLWLIAAALVEVRTSADGQAGNEEMVQIDLPIKRYREYELVTPVSTNLEGRYLSHTLSASHKKRSARDVSSNPEQLFFNITAFGKDFHLRLKPNTQLVAPGAVVEWHETSLVPGNITDPINNHQPGSATYRIRRTEPLQTNCAYVGDIVDIPGTSVAISNCDGLAGMIKSDNEEYFIEPLERGKQMEEEKGRIHVVYKRSAVEQAPIDMSKDFHYRESDLEGLDDLGTVYGNIHQQLNETMRRRRHAGENDYNIEVLLGVDDSVVRFHGKEHVQNYLLTLMNIVNEIYHDESLGVHINVVLVRMIMLGYAKSISLIERGNPSRSLENVCRWASQQQRSDLNHSEHHDHAIFLTRQDFGPAGMQGYAPVTGMCHPVRSCTLNHEDGFSSAFVVAHETGHVLGMEHDGQGNRCGDETAMGSVMAPLVQAAFHRYHWSRCSGQELKRYIHSYDCLLDDPFDHDWPKLPELPGINYSMDEQCRFDFGVGYKMCTAFRTFDPCKQLWCSHPDNPYFCKTKKGPPLDGTECAAGKWCYKGHCMWKNANQQKQDGNWGSWTKFGSCSRTCGTGVRFRTRQCNNPMPINGGQDCPGVNFEYQLCNTEECQKHFEDFRAQQCQQRNSHFEYQNTKHHWLPYEHPDPKKRCHLYCQSKETGDVAYMKQLVHDGTHCSYKDPYSICVRGECVKVGCDKEIGSNKVEDKCGVCGGDNSHCRTVKGTFTRTPRKLGYLKMFDIPPGARHVLIQEDEASPHILAIKNQATGHYILNGKGEEAKSRTFIDLGVEWDYNIEDDIESLHTDGPLHDPVIVLIIPQENDTRSSLTYKYIIHEDSVPTINSNNVIQEELDTFEWALKSWSQCSKPCGGGFQYTKYGCRRKSDNKMVHRSFCEANKKPKPIRRMCNIQECTHPLWVAEEWEHCTKTCGSSGYQLRTVRCLQPLLDGTNRSVHSKYCMGDRPESRRPCNRVPCPAQWKTGPWSECSVTCGEGTEVRQVLCRAGDHCDGEKPESVRACQLPPCNDEPCLGDKSIFCQMEVLARYCSIPGYNKLCCESCSKRSSTLPPPYLLEAAETHDDVISNPSDLPRSLVMPTSLVPYHSETPAKKMSLSSISSVGGPNAYAAFRPNSKPDGANLRQRSAQQAGSKTVRLVTVPSSPPTKRVHLSSASQMAAASFFAASDSIGASSQARTSKKDGKIIDNRRPTRSSTLER

SEQ ID NO: 178647 - DNA, 5822 bp, Artificial Sequence
  derived and/or modified sequence
gctttgcccagtagttggaaagtgaactcgactcgtgatggttctcctgtcactttggttgatagcagccgctctggtagaggttaggacttcagctgatggacaagctggtaatgaagaaatggtgcaaatagatttaccaataaagagatatagagagtatgagctggtgactccagtcagcacaaatctagaaggacgctatctctcccatactctttctgcgagtcacaaaaagaggtcagcgagggacgtgtcttccaaccctgagcagttgttctttaacatcacggcatttggaaaagattttcatctgcgactaaagcccaacactcaactagtagctcctggggctgttgtggagtggcatgagacatctctggtgcctgggaatataaccgatcccattaacaaccatcaaccaggaagtgctacgtatagaatccggagaacagagcctttgcagactaactgtgcttatgttggtgacatcgtggacattccaggaacctctgttgccatcagcaactgtgatggtctggctggaatgataaaaagtgataatgaagagtatttcattgaacccttggaaagaggtaaacagatggaggaagaaaaaggaaggattcatgttgtctacaagagatcagctgtagaacaggctcccatagacatgtccaaagacttccactacagagagtcggacctggaaggccttgatgatctaggtactgtttatggcaacatccaccagcagctgaatgaaacaatgagacgccgcagacacgcgggagaaaacgattacaatatcgaggtactgctgggagtggatgactctgtggtccgtttccatggcaaagagcacgtccaaaactacctcctgaccctaatgaacattgtgaatgaaatttaccatgatgagtccctcggagtgcatataaatgtggtcctggtgcgcatgataatgctgggatatgcaaagtccatcagcctcatagaaaggggaaacccatccagaagcttggagaatgtgtgtcgctgggcgtcccaacagcaaagatctgatctcaaccactctgaacaccatgaccatgcaatttttttaaccaggcaagactttggacctgctggaatgcaaggatatgctccagtcaccggcatgtgtcatccagtgagaagttgtaccctgaatcatgaggatggtttttcatctgcttttgtagtagcccatgaaacgggccatgtgttgggaatggagcatgatggacaaggcaacaggtgtggtgatgagactgctatgggaagtgtcatggctcccttggtacaagcagcattccatcgttaccactggtcccgatgcagtggtcaagaactgaaaagatatatccattcctatgactgtctccttgatgacccttttgatcatgattggcctaaactcccagaacttcctggaatcaattattctatggatgagcaatgtcgttttgattttggtgttggctataaaatgtgcaccgcgttccgaacctttgacccatgtaaacagctgtggtgtagccatcctgataatccctacttttgtaagactaaaaagggacctccacttgatgggactgaatgtgctgctggaaaatggtgctataagggtcattgcatgtggaagaatgctaatcagcaaaaacaagatggcaattgggggtcatggactaaatttggctcctgttctcggacatgtggaactggtgttcgtttcagaacacgccagtgcaataatcccatgcccatcaatggtggtcaggattgtcctggtgttaattttgagtaccagctttgtaacacagaagaatgccaaaaacactttgaggacttcagagcacagcagtgtcagcagcgaaactcccactttgaataccagaataccaaacaccactggttgccatatgaacatcctgaccccaagaaaagatgccacctttactgtcagtccaaggagactggagatgttgcttacatgaaacaactggtgcatgatggaacgcactgttcttacaaagatccatatagcatatgtgtgcgaggagagtgtgtgaaagtgggctgtgataaagaaattggttctaataaggttgaggataagtgtggtgtctgtggaggagataattcccactgccgaaccgtgaaggggacatttaccagaactcccaggaagcttgggtaccttaagatgtttgatataccccctggggctagacatgtgttaatccaagaagacgaggcttctcctcatattcttgctattaagaaccaggctacaggccattatattttaaatggcaaaggggaggaagccaagtcgcggaccttcatagatcttggtgtggagtgggattataacattgaagatgacattgaaagtcttcacaccgatggacctttacatgatcctgttattgttttgattatacctcaagaaaatgatacccgctctagcctgacatataagtacatcatccatgaagactctgtacctacaatcaacagcaacaatgtcatccaggaagaattagatacttttgagtgggctttgaagagctggtctcagtgttccaaaccctgtggtggaggtttccagtacactaaatatggatgccgtaggaaaagtgataataaaatggtccatcgcagcttctgtgaggccaacaaaaagccgaaacctattagacgaatgtgcaatattcaagagtgtacacatccactctgggtagcagaagaatgggaacactgcaccaaaacctgtggaagttctggctatcagcttcgcactgtacgctgccttcagccactccttgatggcaccaaccgctctgtgcacagcaaatactgcatgggtgaccgtcccgagagccgccggccctgtaacagagtgccctgccctgcacagtggaaaacaggaccctggagtgagtgttcagtgacctgcggtgaaggaacggaggtgaggcaggtcctctgcagggctggggaccactgtgatggtgaaaagcctgagtcggtcagagcctgtcaactgcctccttgtaatgatgaaccatgtttgggagacaagtccatattctgtcaaatggaagtgttggcacgatactgctccataccaggttataacaagttatgttgtgagtcctgcagcaagcgcagtagcaccctgccaccaccataccttctagaagctgctgaaactcatgatgatgtcatctctaaccctagtgacctccctagatctctagtgatgcctacatctttggttccttatcattcagagacccctgcaaagaagatgtctttgagtagcatctcttcagtgggaggtccaaatgcatatgctgctttcaggccaaacagtaaacctgatggtgctaatttacgccagaggagtgctcagcaagcaggaagtaagactgtgagactggtcaccgtaccatcctccccacccaccaagagggtccacctcagttcagcttcacaaatggctgctgcttccttctttgcagccagtgattcaataggtgcttcttctcaggcaagaacctcaaagaaagatggaaagatcattgacaacagacgtccgacaagatcatccaccttagaaagatgagaaagtgaaccaaaaaggctagaaaccagaggaaaacctggacaacctctctcttcccatggtgcatatgcttgtttaaagtggaaatctctatagatcgtcagctcattttatctgtaattggaagaacagaaagtgctggctcactttctagttgctttcatcctccttttgttctgcattgactcatttaccagaattcattggaagaaatcaccaaagattattacaaaagaaaaatatgttgctaagattgtgttggtcgctctctgaagcagaaaagggactggaaccaattgtgcatatcagctgactttttgtttgttttagaaaagttacagtaaaaattaaaaagagataccaatggtttacactttaacaagaaattttggatatggaacaaagaattcttagacttgtattcctatttatctatattagaaatattgtatgagcaaatttgcagctgttgtgtaaatactgtatattgcaaaaatcagtattattttaagagatgtgttctcaaatgattgtttactatattacatttctggatgttctaggtgcctgtcgttgagtattgccttgtttgacattctataggttaattttcaaagcagagtattacaaaagagaagttagaattacagctactgacaatataaagggttttgttgaatcaacaatgtgatacgtaaattatagaaaaagaaaagaaacacaaaagctatagatatacagatatcagcttacctattgccttctatacttataatttaaaggattggtgtcttagtacacttgtggtcacagggatcaacgaatagtaaataatgaactcgtgcaagacaaaactgaaaccctctttccaggacctcagtaggcaccgttgaggtgtcctttgtttttgtgtgtgtgtgttcttttttaattttcgcattgttgacagatacaaacagttatactcaatgtactgtaataatcgcaaaggaaaaagttttgggataacttatttgtatgttggtagctgagaaaaatatcatcagtctagaattgatatttgagtatagtagagctttggggctttgaaggcaggttcaagaaagcatatgtcgatggttgagatatttattttccatatggttcatgttcaaatgttcacaaccacaatgcatctgactgcaataatgtgctaataatttatgtcagtagtcaccttgctcacagcaaagccagaaatgctctctccagggagtagatgtaaagtacttgtacatagaattcagaactgaagatatttattaaaagttgattttttttcttgatagtatttttatgtactaaatatttacactaatatcaattacatattttggtaaactagagagacataattagagatgcatgctttgttctgtgcatagagacctttaagcaaactactacagccaactcaaaagctaaaactgaacaaatttgatgttatgcaaacatcttgcatttttagtagttgatattaagttgatgacttgtttcccttcaaggaaacattaaattgtatggactcagctagctgttcaatgaaattgtgaattagaaacatttttaaaagtttttgaaagagataagtgcatcatgaattacatgtacatgagaggagatagtgatatcagcataatgattttgaggtcagtacctgagctgtctaaaaatatattatacaaactaaaatgtagatgaattaacctctcaaagcacagaatgtgcaagaacttttgcattttaatcgttgtaaactaacagcttaaactattgactctatacctctaaagaattgctgctactttgtgcaagaactttgaaggtcaaattaggcaaattccagatagtaaaacaatccctaagccttaagtcttttttttttcctaaaaattcccatagaataaaattctctctagtttacttgtgtgtgcatacatctcatccacaggggaagataaagatggtcacacaaacagtttccataaagatgtacatattcattatacttctgacctttgggctttcttttctactaagctaaaaattcctttttatcaaagtgtacactactgatgctgtttgttgtactgagagcacgtaccaataaaaatgttaacaaaatata

SEQ ID NO: 178648 - DNA, 3618 bp, Artificial Sequence
  derived and/or modified sequence
atggtccttctgtcactgtggctcatcgcagcagcactggtggaggtgcgcacaagcgccgatgggcaggccgggaatgaagagatggtgcagatagacctgcccattaaaagataccgggaatatgagctagtgactcccgtgagcactaatctggagggccgctacttgagtcacaccctgagcgcctctcacaagaagcggtccgcaagagacgtctcgtctaaccccgagcaactgttttttaatatcaccgcctttggaaaggacttccacctccggcttaagcccaacactcagctggtcgctccaggcgccgtggtggagtggcacgagactagccttgtgccgggtaatatcacagatcctatcaataaccaccagccgggctccgccacctacagaatcagacgaaccgaaccactccaaactaattgcgcgtacgtaggcgacatcgtggacatccccggcacctccgtcgccatatccaactgtgacggccttgctggaatgataaagtcagacaatgaggagtactttattgaaccccttgagcgtggcaagcagatggaggaggaaaagggccggatacacgttgtgtacaagcggtcagcagtggagcaggccccaatcgacatgtctaaagacttccattacagggagtcagatttggaaggccttgacgatctgggcactgtctacggcaatatccaccagcagctaaatgaaacaatgcgcagaaggagacacgctggcgaaaatgactataacattgaggttcttctcggcgttgacgattccgtcgtccgatttcatggcaaggaacacgtgcagaactatttactgactcttatgaatatagtcaacgaaatctatcatgacgagtctttgggggtccacataaacgttgtactggtgaggatgattatgcttggatacgctaagtcaatttctctgattgagcgaggcaacccctcccgatcacttgagaacgtgtgccggtgggcatcccagcaacagcggtcagatctaaatcactctgagcatcatgaccacgccatcttcttgactcgccaggactttggacctgctgggatgcagggatacgccccagtcacggggatgtgtcatcctgttcgaagttgcacactcaaccacgaggacgggttcagctcagcctttgtggtagctcatgaaaccggacatgtgcttggcatggaacacgacgggcagggcaacagatgcggcgatgagacagctatgggtagtgtgatggcccccctagtgcaagccgcgtttcaccgatatcactggtctaggtgtagtggccaggagctcaaacgctacatccactcctacgattgcttgcttgatgacccattcgaccacgactggcccaaattaccggagctgcctggaattaactactccatggatgaacagtgtagatttgacttcggtgtggggtacaagatgtgcactgcattcagaacgtttgacccatgtaagcagctgtggtgtagtcacccagataacccttatttttgcaaaactaagaagggtccacccctggatggtacagagtgtgcagccggaaagtggtgttacaagggccattgtatgtggaagaatgcaaaccaacagaaacaagatggcaattggggctcgtggacaaagttcggatcttgttccaggacctgcggcaccggcgtgagatttagaactcggcaatgcaacaaccccatgccaataaacggcggccaggactgtccaggcgtcaacttcgagtatcagctgtgtaacactgaagaatgtcaaaagcatttcgaagacttcagagcccaacagtgccagcagcggaatagccacttcgagtatcagaacactaagcatcactggctgccctatgaacaccctgatccaaagaagcgatgccacctgtactgtcagagcaaagagacaggcgatgtggcctatatgaagcaacttgttcatgacggcactcactgtagttataaggatccttattctatatgcgttcggggagagtgcgtgaaggtaggatgtgataaggaaataggatctaacaaagtggaggataaatgcggtgtttgtggtggggataactctcactgcagaaccgttaaggggacttttacccggactccccgcaagcttgggtatctcaagatgttcgacatcccaccaggagcccggcatgtcctcattcaagaagatgaagcttctcctcacatcttagctatcaagaatcaggccaccggtcactatatcctgaatggcaagggcgaggaagccaaaagcagaacattcatcgacttgggggtggagtgggactacaatatcgaggatgatatagaatccctgcatacggatggccctctgcatgacccagtcatagtattgatcattccccaggagaatgataccagatcttctctgacgtataaatacataatccacgaggactctgttccaaccatcaactcaaacaacgtcatacaagaagagttagacacctttgagtgggccctgaaaagctggtcgcagtgcagcaaaccatgcggaggcggtttccagtatacaaagtatggttgccgccgaaagtcagacaacaagatggtgcatagatctttttgtgaagccaacaagaagcctaagcctattcggaggatgtgtaatattcaggagtgtactcaccctctttgggtagcggaggaatgggaacactgtacaaagacctgtggctcgagtggctaccagttgcgtacagtgagatgtctgcaaccactgctcgatggcacgaaccggtctgttcatagtaaatattgtatgggagatcgccctgaatctcgcaggccatgtaaccgcgtgccatgtcccgcacagtggaaaacaggaccatggagtgaatgtagcgtgacctgcggtgaagggacggaggtccgacaagtcctgtgccgggccggcgaccactgcgacggcgagaaacccgaatcagtccgggcttgccagttaccaccctgtaatgacgagccgtgtcttggcgacaagagcattttctgtcagatggaggtcctcgccagatactgctcaatccctgggtacaataaactgtgttgcgagtcttgctctaagcgttcctccaccttgcccccgccatacctcctggaggcggcagaaacacacgacgatgtgatctcaaacccctcagatctgcctcgctcccttgtcatgccaacaagcctggtgccctatcactcagagactcctgctaagaagatgagccttagcagcatttctagcgtgggcggacccaatgcctatgccgccttccgcccgaactcaaagcctgacggagccaatctgaggcagaggagcgcccagcaggccggcagcaagactgtgcgtctggtcaccgtgccctcctcacctcctaccaaaagagtgcatttatcaagtgcaagccagatggcagccgctagtttttttgccgcctctgactcgattggcgcctcaagccaggcccggacgtccaagaaggacgggaagataatcgataacaggcgcccaaccaggtcctctaccctagagcgctag

SEQ ID NO: 178649 - DNA, 3618 bp, Artificial Sequence
  derived and/or modified sequence
atggtgctgctgagcctgtggctgattgctgctgccctggtggaggtgaggaccagcgcagatggccaggccggaaatgaggagatggtgcagattgacctgcccatcaagcgctaccgggagtatgagctggtgacccctgtgtccaccaacctggagggccgctacctgagccacaccctgagcgccagccacaagaagaggtctgccagagatgtgagcagcaaccctgagcagctgttcttcaacatcacagccttcggcaaggacttccacctgcggctgaagcccaacacccagctggtggcccctggagctgtggtggagtggcatgagaccagcctggtgcccggcaacatcacagaccccatcaacaaccaccagcccggcagcgccacctaccgcatcagaagaacagagcccctgcagaccaactgtgcctacgtgggggacatcgtggacatccctggcacctctgtggccatcagcaactgtgatggcctggccggcatgatcaagagtgacaatgaggagtacttcatcgagcccctggagcggggcaagcagatggaggaggagaagggccgcatccacgtggtgtacaagaggtctgctgtggagcaggcccccatcgacatgagcaaggacttccactaccgggagagtgacctggagggcctggatgacctgggcaccgtgtatggcaacatccaccagcagctgaatgagaccatgagaagaagaagacatgctggagaaaatgactacaacatcgaggtgctgctgggcgtggatgattctgtggtgcgcttccacggcaaggagcacgtgcagaactacctgctgaccctgatgaacatcgtgaatgagatctaccatgatgagagcctgggcgtgcacatcaacgtggtgctggtgaggatgatcatgctgggctacgccaagagcatcagcctcatcgagcggggcaaccccagccgcagcctggagaatgtgtgccgctgggccagccagcagcagaggagtgacctgaaccacagcgagcaccacgaccacgccatcttcctgacccggcaggactttggacctgctggcatgcagggctacgcccctgtgacaggcatgtgccaccctgtgcgcagctgcaccctgaaccatgaagatggcttcagcagcgcctttgtggtggcccacgagaccggccacgtgctgggcatggagcatgatggccagggcaacagatgtggagatgaaacagccatgggctctgtgatggcccccctggtgcaggccgccttccaccgctaccactggagccgctgcagcggccaggagctgaagcgctacatccacagctatgactgcctgctggatgacccctttgaccatgactggcccaagctgcctgagctgcccggcatcaactacagcatggatgagcagtgccgctttgattttggagtgggctacaagatgtgcacagccttccgcacctttgacccctgcaagcagctgtggtgcagccacccagacaacccctacttctgcaagaccaagaagggcccccccctggatggaacagaatgtgccgccggcaagtggtgctacaagggccactgcatgtggaagaatgccaaccagcagaagcaggacggcaactggggctcctggaccaagtttggcagctgcagcaggacctgtggcactggagtgcgcttccgcacccggcagtgcaacaaccccatgcccatcaatggaggccaggactgccctggggtgaactttgagtaccagctgtgcaacacagaggagtgccagaagcactttgaggacttccgggcccagcagtgccagcagaggaacagccactttgagtaccagaacaccaagcaccactggctgccctatgagcacccagaccccaagaagcgctgccacctgtactgccagagcaaggagactggagatgtggcctacatgaagcagctggtgcatgatggcacccactgcagctacaaggacccctacagcatctgtgtgagaggagaatgtgtgaaggtgggctgtgacaaggagatcggcagcaacaaggtggaggacaagtgtggggtgtgtggcggggacaacagccactgcaggacagtgaagggcaccttcaccaggacccccaggaagctgggctacctgaagatgtttgacatccccccaggggcccggcacgtgctgatccaggaggatgaggccagcccccacatcctggccatcaagaaccaggccaccggccactacatcctgaatggcaagggggaggaggccaagagcaggaccttcatcgacctgggcgtggagtgggactacaacattgaagatgacatcgagagcctgcacacagatggccccctgcatgaccccgtcatcgtgctgatcatcccccaggagaatgacaccaggagcagcctgacctacaagtacatcatccacgaggacagcgtgcccaccatcaacagcaacaacgtcatccaggaggagctggacacctttgagtgggccctgaagtcctggagccagtgcagcaagccctgtggcggcggcttccagtacaccaagtatggctgcaggaggaagagtgacaacaagatggtgcacaggagcttctgtgaggccaacaagaagcccaagcccatccggaggatgtgcaacatccaggagtgcacccaccccctgtgggtggccgaggagtgggagcactgcaccaagacctgtggcagcagcggctaccagctgaggacagtgcgctgcctgcagcccctgctggatggcaccaacagatctgtgcacagcaagtactgcatgggagacaggcctgagagccggcggccctgcaacagagtgccctgcccagcccagtggaagacaggcccctggagcgaatgttctgtgacctgtggggagggcacagaggtgcggcaggtgctgtgcagagctggggaccactgtgatggagagaagccagagagcgtgcgggcctgccagctgcccccctgcaatgatgagccctgcctgggggacaagagcatcttctgccagatggaggtgctggcccgctactgcagcatccctggctacaacaagctgtgctgtgagagctgcagcaagaggagcagcaccctgcccccaccctacctgctggaggccgctgagacccatgatgatgtgatcagcaaccccagcgacctgcccaggagcctggtgatgcccaccagcctggtgccctaccacagcgagaccccagccaagaagatgagcctgagcagcatcagctctgtgggcggccccaatgcctatgctgccttccggcccaacagcaagccagatggagccaacctgcggcagaggtctgcccagcaggccggcagcaagacagtgcggctggtgacagtgcccagcagcccccccaccaagagggtgcacctgagcagcgccagccagatggccgccgccagcttctttgctgccagtgacagcatcggggccagcagccaggcccggaccagcaagaaggatggcaagatcatcgacaacagaagacccaccaggagcagcaccctggagaggtag

SEQ ID NO: 178650 - DNA, 3618 bp, Artificial Sequence
  derived and/or modified sequence
atggtgctgctgagcctgtggctgatcgccgccgccctggtggaggttagaacttccgccgatggacaggcgggcaacgaggaaatggtacagatcgatctgccaatcaaaagatacagggagtatgagcttgttacccctgtgagcacaaatctggagggaaggtacctgtcacataccctgagcgcctcccacaaaaaaaggtcagccagagacgtgagctccaacccagaacagctcttcttcaatattaccgccttcggcaaagacttccacttgcgactaaagccaaatacacagctagtcgcccccggggcagttgtcgagtggcatgagacaagcctagtgccaggaaatatcaccgaccctatcaataatcatcagcctggttcggccacgtaccgaatcaggaggaccgaacctctccagaccaactgtgcctacgtgggagatatcgtggacatacctggaacaagcgttgcgataagcaactgcgacggactggccgggatgatcaagagtgataacgaggagtatttcattgaacccttggagcggggcaagcagatggaagaggagaaggggcggattcacgtggtatataagcgctccgccgttgagcaggctcctattgacatgtctaaagactttcactacagagaatcagacttggagggtctggatgacctgggcaccgtatacgggaacatccatcaacagttaaatgagacaatgcgcagacgtagacatgctggcgaaaacgattataatattgaagtgctgcttggagtggacgattctgtggttcgctttcacggcaaagaacacgtgcagaactacctactaactttgatgaacatcgttaacgagatctatcacgacgaaagcctaggcgtgcacatcaatgttgttctggttagaatgatcatgctcgggtatgctaagagtattagtctcattgaacgcgggaatccatctaggagcttggagaacgtctgccgttgggcttcccaacagcaacgctcagacttgaaccactcagaacaccacgaccatgcgatcttcctgactcgccaggacttcggccctgcagggatgcaaggttatgccccagtgactggcatgtgccaccccgtccgttcatgtaccctcaatcacgaagacggattctcaagcgcctttgtagtcgcacatgaaaccggtcatgtcctaggaatggagcacgacggccagggtaaccgctgcggagatgagaccgccatgggtagcgtaatggcccccctggtgcaggcagcctttcataggtaccattggagcaggtgcagcggacaggaattaaagcgatatatccactcttatgactgcctgttggatgatccattcgatcatgactggccgaaactccctgaacttcccggtataaactacagcatggatgagcagtgtaggttcgacttcggtgtagggtacaaaatgtgtacagcatttaggactttcgacccatgcaaacaactgtggtgctcgcatcccgataatccttacttctgtaagactaagaaggggcctccactggatggaacggagtgcgctgcggggaaatggtgctacaaaggccattgtatgtggaaaaatgccaatcaacaaaaacaggatggaaattggggctcctggacaaagttcgggtcatgttcgaggacctgtggaaccggcgtgaggtttcggacacggcaatgcaacaatccgatgcccatcaacgggggccaggattgtcccggagtaaattttgagtaccagctttgcaatacagaggagtgccaaaaacatttcgaagactttagggcacagcagtgccaacagaggaactcccacttcgagtaccagaatactaaacaccactggttgccttacgaacaccctgaccccaagaaacgatgtcacctgtattgccagagcaaggagaccggcgacgttgcctacatgaaacagttggtacacgacggcactcactgcagctacaaggatccctatagcatctgtgtcagaggggaatgcgtgaaggtaggatgcgacaaagaaataggctctaacaaagtggaggataagtgcggcgtgtgcggaggagacaattcccactgccggacggtgaaaggaacttttacacgaactcctagaaaattggggtacctgaaaatgttcgatatcccccctggtgctcggcatgtgctgatccaggaggacgaagcttcccctcacatacttgccataaagaaccaggcaaccgggcattacattctgaacgggaagggagaagaagccaaatcccgcacctttattgacttgggagtggagtgggattacaatatcgaagacgacatcgaatccctgcataccgatggcccgctccatgaccccgtaatcgtgctgatcatccctcaggagaacgacaccagatctagtctgacctacaagtatatcatacacgaggacagtgtgcccactatcaattctaataacgtaatccaggaagagctggacacctttgagtgggccctcaaaagttggagtcagtgcagtaaaccatgtggcggtggctttcagtataccaaatacgggtgccggcgcaaatccgataataagatggtccatcgctctttttgtgaggctaataagaagcccaagcctattcgacgcatgtgtaacatccaagagtgcactcacccactctgggtggctgaggaatgggagcactgcacaaagacttgtggcagctcaggatatcagttgcgcactgtgagatgtttgcaaccactgcttgacggcaccaacaggagcgttcactctaaatattgtatgggagaccgccccgaaagccgtaggccttgcaatagagtcccatgccctgctcagtggaaaactggtccctggtccgagtgcagtgtaacctgcggagaaggtaccgaggtgcgccaggtcctatgccgggcaggcgatcattgtgatggcgaaaagcctgaatctgttagggcctgccagttacccccttgcaacgacgaaccctgcctaggggacaagagcatcttctgccagatggaggtgttggcccgatactgctccattcccggatacaacaaactctgctgtgagtcgtgctcaaagcggtcctccacattaccccctccatacctcctggaagccgccgaaacgcatgatgacgtcatctcgaatccttctgatctcccccgcagtctagttatgcctacctccttagtaccataccatagtgagacaccggcgaagaaaatgtccctgagttccatatcttctgttgggggtccaaacgcatacgcggcattcaggccgaactcaaaacccgacggggcgaacctgcggcagcggagcgctcaacaggctgggtccaagacagtgcgcttagtgacagtgcccagctcacctcctactaagagggtccacctcagcagcgcttcacagatggctgctgcaagtttctttgccgctagcgacagtataggggcctcaagtcaagccagaacctcaaagaaagacggtaaaatcatcgacaacaggcgccccacccgcagctccacacttgagcgatag

SEQ ID NO: 178651 - DNA, 3618 bp, Artificial Sequence
  derived and/or modified sequence
atggtgttgctctcattatggctgatcgccgcagccctggtggaggtgaggacaagtgccgacggacaggccggtaatgaggagatggtgcagattgatctgcccatcaagcggtatagagaatatgagctcgtcactccggtctccactaatctggaaggacggtacctgagccacaccctctccgcctcccacaagaaacggtctgctagggacgtctcttctaacccagaacagctgttcttcaacattactgcctttggtaaagacttccacttgagactgaagcctaacacccagctagtggctccgggagcagttgttgaatggcatgaaacgtccctcgtgcccggtaacatcacagatccgatcaataaccatcaacccggatctgctacatacagaatccgcaggacagagccacttcagaccaattgtgcctacgtaggcgatattgtggatattccaggaacatcagttgcaattagcaactgtgatggcctggcagggatgatcaagtcggacaacgaagagtactttatcgaacctttggagaggggcaaacaaatggaagaagagaaggggagaatccacgttgtgtacaaacgatcagctgtggaacaagcccctatcgatatgagtaaggattttcactatagagaatccgatctggaagggctggacgacctcggtacagtgtacgggaatattcaccagcaactgaacgagaccatgcgaaggagacggcacgctggagagaacgactacaatattgaagtcttgcttggcgttgacgacagtgtggtgcgtttccacggtaaggaacatgtgcagaactacctcctcactctgatgaacattgtgaacgagatatatcacgacgaaagtctcggggtgcacatcaatgtagtattggtgaggatgattatgcttggctacgcaaaaagtattagcctgattgagcgcggaaacccgtcccgttcgctggagaatgtgtgtaggtgggccagccaacagcagagatcagatcttaaccacagtgaacatcacgaccacgccattttcttgactagacaggattttgggcctgctggcatgcaaggatatgctccagtcaccggtatgtgtcaccccgttagatcgtgtaccctcaatcacgaggacgggttttcctccgccttcgtggtcgcccatgagaccggtcacgttctaggcatggagcacgacggacagggtaatagatgcggagatgaaaccgctatgggctctgtgatggccccactcgtccaggccgctttccatagataccactggtccagatgcagcgggcaggagcttaaacgctatatccatagttatgactgtctcttggacgatcccttcgaccacgattggccaaagcttcccgagttacctggcattaactattctatggacgaacaatgccggttcgactttggcgtgggatacaaaatgtgtaccgcctttaggaccttcgacccatgcaagcagttgtggtgctcacaccctgacaacccttacttttgtaagaccaagaaaggcccaccactggatgggaccgagtgcgctgccggtaagtggtgttacaaaggacactgtatgtggaagaatgccaaccaacagaagcaagacggcaattggggctcatggaccaagttcggatcttgtagtaggacgtgcggaacaggggttcgattccgcacaagacagtgtaataatcccatgcccatcaacggtggtcaggattgtcccggagtgaacttcgagtaccagctttgcaacacagaggaatgtcagaagcactttgaggacttccgggctcagcagtgtcagcaacggaacagtcatttcgagtaccagaacaccaaacaccactggctgccttatgagcaccccgacccgaagaaacggtgccatctttactgccaatccaaggaaacaggggacgtggcctatatgaagcaactggtacatgatgggacccactgctcttataaggacccgtactctatctgcgtcagaggggaatgcgtgaaagtggggtgcgataaggaaatcgggagcaacaaggtggaagataagtgcggagtctgcgggggagacaactctcactgccggactgttaaggggaccttcacaaggacacctagaaaactgggatacctgaagatgttcgacatcccacctggagcgcgacatgttcttattcaggaggatgaagcttctccacatatcctagccatcaaaaaccaagcaaccggccactacatcttgaatggaaaaggagaggaggccaagagtagaacttttatcgatcttggtgtagaatgggactacaacatcgaggatgacattgagtccctgcacacagatggaccacttcacgaccccgttattgtgctaatcatcccccaagagaacgacacaagatccagtcttacctacaagtatatcattcatgaggatagtgtgccaaccattaacagcaataatgtgattcaagaggaactagacacatttgagtgggccctgaagtcatggagccagtgttccaagccatgcgggggagggttccagtatacgaaatatgggtgtcggaggaagtccgacaataaaatggtgcaccgatcattctgcgaagccaataagaagccgaagccaataaggcgtatgtgtaacatccaggagtgcactcaccctctgtgggtcgctgaagaatgggaacactgcactaagacatgcgggtctagcggttatcagctccggacagtaaggtgcttgcagccactgctggacggcacaaatcgcagcgtacattccaagtactgtatgggtgaccgcccagaatcccggagaccatgcaatcgagtgccctgtcctgcccagtggaaaacgggcccatggtcagaatgcagcgtgacctgcggagagggcaccgaggtccggcaggtcctgtgccgggctggagaccattgcgacggcgaaaaacccgaatcagtgcgggcttgccagctgcctccctgcaatgatgaaccctgtctgggtgacaagtcaatattttgtcaaatggaggtcctggcgaggtactgtagcattcctggttataacaaattgtgttgcgaatcctgctcaaaaagatctagtacactaccacccccatatctccttgaggccgctgaaacacatgacgacgttatcagcaatccttcagatctaccccgatctttagtgatgcctaccagtctggtaccctaccattctgagaccccggctaagaagatgagtctgtcatctatttcgtctgtgggtgggccaaacgcctatgctgcctttagacctaatagtaaaccagacggcgcaaacctgcggcaaagatcagcccagcaggccggatcaaaaaccgtgcgactggtcacagttccttcaagccctcctaccaaacgagtgcacttgtcctccgcaagccagatggccgcagcaagcttttttgcagcctccgactcaataggtgctagctcacaggccaggacgagcaagaaggacggaaaaattatagataatcggaggcccactcgctcctctacgttggagagatag

SEQ ID NO: 178652 - DNA, 3618 bp, Artificial Sequence
  derived and/or modified sequence
atggtgctgctgagcctgtggctgatcgccgccgccctggtggaggtgagaaccagcgccgacggccaggccggcaacgaggagatggtgcagatcgacctgcccatcaagagatacagagagtacgagctggtgacccccgtgagcaccaacctggagggcagatacctgagccacaccctgagcgccagccacaagaagagaagcgccagagacgtgagcagcaaccccgagcagctgttcttcaacatcaccgccttcggcaaggacttccacctgagactgaagcccaacacccagctggtggcccccggcgccgtggtggagtggcacgagaccagcctggtgcccggcaacatcaccgaccccatcaacaaccaccagcccggcagcgccacctacagaatcagaagaaccgagcccctgcagaccaactgcgcctacgtgggcgacatcgtggacatccccggcaccagcgtggccatcagcaactgcgacggcctggccggcatgatcaagagcgacaacgaggagtacttcatcgagcccctggagagaggcaagcagatggaggaggagaagggcagaatccacgtggtgtacaagagaagcgccgtggagcaggcccccatcgacatgagcaaggacttccactacagagagagcgacctggagggcctggacgacctgggcaccgtgtacggcaacatccaccagcagctgaacgagaccatgagaagaagaagacacgccggcgagaacgactacaacatcgaggtgctgctgggcgtggacgacagcgtggtgagattccacggcaaggagcacgtgcagaactacctgctgaccctgatgaacatcgtgaacgagatctaccacgacgagagcctgggcgtgcacatcaacgtggtgctggtgagaatgatcatgctgggctacgccaagagcatcagcctgatcgagagaggcaaccccagcagaagcctggagaacgtgtgcagatgggccagccagcagcagagaagcgacctgaaccacagcgagcaccacgaccacgccatcttcctgaccagacaggacttcggccccgccggcatgcagggctacgcccccgtgaccggcatgtgccaccccgtgagaagctgcaccctgaaccacgaggacggcttcagcagcgccttcgtggtggcccacgagaccggccacgtgctgggcatggagcacgacggccagggcaacagatgcggcgacgagaccgccatgggcagcgtgatggcccccctggtgcaggccgccttccacagataccactggagcagatgcagcggccaggagctgaagagatacatccacagctacgactgcctgctggacgaccccttcgaccacgactggcccaagctgcccgagctgcccggcatcaactacagcatggacgagcagtgcagattcgacttcggcgtgggctacaagatgtgcaccgccttcagaaccttcgacccctgcaagcagctgtggtgcagccaccccgacaacccctacttctgcaagaccaagaagggcccccccctggacggcaccgagtgcgccgccggcaagtggtgctacaagggccactgcatgtggaagaacgccaaccagcagaagcaggacggcaactggggcagctggaccaagttcggcagctgcagcagaacctgcggcaccggcgtgagattcagaaccagacagtgcaacaaccccatgcccatcaacggcggccaggactgccccggcgtgaacttcgagtaccagctgtgcaacaccgaggagtgccagaagcacttcgaggacttcagagcccagcagtgccagcagagaaacagccacttcgagtaccagaacaccaagcaccactggctgccctacgagcaccccgaccccaagaagagatgccacctgtactgccagagcaaggagaccggcgacgtggcctacatgaagcagctggtgcacgacggcacccactgcagctacaaggacccctacagcatctgcgtgagaggcgagtgcgtgaaggtgggctgcgacaaggagatcggcagcaacaaggtggaggacaagtgcggcgtgtgcggcggcgacaacagccactgcagaaccgtgaagggcaccttcaccagaacccccagaaagctgggctacctgaagatgttcgacatcccccccggcgccagacacgtgctgatccaggaggacgaggccagcccccacatcctggccatcaagaaccaggccaccggccactacatcctgaacggcaagggcgaggaggccaagagcagaaccttcatcgacctgggcgtggagtgggactacaacatcgaggacgacatcgagagcctgcacaccgacggccccctgcacgaccccgtgatcgtgctgatcatcccccaggagaacgacaccagaagcagcctgacctacaagtacatcatccacgaggacagcgtgcccaccatcaacagcaacaacgtgatccaggaggagctggacaccttcgagtgggccctgaagagctggagccagtgcagcaagccctgcggcggcggcttccagtacaccaagtacggctgcagaagaaagagcgacaacaagatggtgcacagaagcttctgcgaggccaacaagaagcccaagcccatcagaagaatgtgcaacatccaggagtgcacccaccccctgtgggtggccgaggagtgggagcactgcaccaagacctgcggcagcagcggctaccagctgagaaccgtgagatgcctgcagcccctgctggacggcaccaacagaagcgtgcacagcaagtactgcatgggcgacagacccgagagcagaagaccctgcaacagagtgccctgccccgcccagtggaagaccggcccctggagcgagtgcagcgtgacctgcggcgagggcaccgaggtgagacaggtgctgtgcagagccggcgaccactgcgacggcgagaagcccgagagcgtgagagcctgccagctgcccccctgcaacgacgagccctgcctgggcgacaagagcatcttctgccagatggaggtgctggccagatactgcagcatccccggctacaacaagctgtgctgcgagagctgcagcaagagaagcagcaccctgccccccccctacctgctggaggccgccgagacccacgacgacgtgatcagcaaccccagcgacctgcccagaagcctggtgatgcccaccagcctggtgccctaccacagcgagacccccgccaagaagatgagcctgagcagcatcagcagcgtgggcggccccaacgcctacgccgccttcagacccaacagcaagcccgacggcgccaacctgagacagagaagcgcccagcaggccggcagcaagaccgtgagactggtgaccgtgcccagcagcccccccaccaagagagtgcacctgagcagcgccagccagatggccgccgccagcttcttcgccgccagcgacagcatcggcgccagcagccaggccagaaccagcaagaaggacggcaagatcatcgacaacagaagacccaccagaagcagcaccctggagagatag

SEQ ID NO: 178653 - protein, 1211 aa, Artificial Sequence
  derived and/or modified sequence
MDPPAGAARRLLCPALLLLLLLLPPPLLPPPPPPANARLAAAADPPGGPLGHGAERILAVPVRTDAQGRLVSHVVSAATSRAGVRARRAAPVRTPSFPGGNEEEPGSHLFYNVTVFGRDLHLRLRPNARLVAPGATMEWQGEKGTTRVEPLLGSCLYVGDVAGLAEASSVALSNCDGLAGLIRMEEEEFFIEPLEKGLAAQEAEQGRVHVVYRRPPTSPPLGGPQALDTGASLDSLDSLSRALGVLEEHANSSRRRARRHAADDDYNIEVLLGVDDSVVQFHGKEHVQKYLLTLMNIVNEIYHDESLGAHINVVLVRIILLSYGKSMSLIEIGNPSQSLENVCRWAYLQQKPDTGHDEYHDHAIFLTRQDFGPSGMQGYAPVTGMCHPVRSCTLNHEDGFSSAFVVAHETGHVLGMEHDGQGNRCGDEVRLGSIMAPLVQAAFHRFHWSRCSQQELSRYLHSYDCLLDDPFAHDWPALPQLPGLHYSMNEQCRFDFGLGYMMCTAFRTFDPCKQLWCSHPDNPYFCKTKKGPPLDGTMCAPGKHCFKGHCIWLTPDILKRDGSWGAWSPFGSCSRTCGTGVKFRTRQCDNPHPANGGRTCSGLAYDFQLCSRQDCPDSLADFREEQCRQWDLYFEHGDAQHHWLPHEHRDAKERCHLYCESRETGEVVSMKRMVHDGTRCSYKDAFSLCVRGDCRKVGCDGVIGSSKQEDKCGVCGGDNSHCKVVKGTFTRSPKKHGYIKMFEIPAGARHLLIQEVDATSHHLAVKNLETGKFILNEENDVDASSKTFIAMGVEWEYRDEDGRETLQTMGPLHGTITVLVIPVGDTRVSLTYKYMIHEDSLNVDDNNVLEEDSVVYEWALKKWSPCSKPCGGGSQFTKYGCRRRLDHKMVHRGFCAALSKPKAIRRACNPQECSQPVWVTGEWEPCSQTCGRTGMQVRSVRCIQPLHDNTTRSVHAKHCNDARPESRRACSRELCPGRWRAGPWSQCSVTCGNGTQERPVLCRTADDSFGICQEERPETARTCRLGPCPRNISDPSKKSYVVQWLSRPDPDSPIRKISSKGHCQGDKSIFCRMEVLSRYCSIPGYNKLCCKSCNLYNNLTNVEGRIEPPPGKHNDIDVFMPTLPVPTVAMEVRPSPSTPLEVPLNASSTNATEDHPETNAVDEPYKIHGLEDEVQPPNLIPRRPSPYEKTRNQRIQELIDEMRKKEMLGKF

SEQ ID NO: 178654 - DNA, 6754 bp, Artificial Sequence
  derived and/or modified sequence
agctgcgggcggctccagctgcccccagatgtgggctgggcggctcgcggggaactttcgcgccggctgcgagtgcggggccccggctgcagtccggctgccatggatccgccggcgggagccgctcgccgcctgctctgccccgcgctgctgctgctgctgctgctgctgccgccgccgctcctgccgccgccgccgccgcccgcgaacgccaggctcgccgccgccgccgaccccccaggcgggcccctggggcacggagcggagcgcatcctggcggtgcccgtgcgcactgacgcccagggccgcttggtgtcccacgtggtgtcggcagctacgtccagagcaggggtacgagcccgcagggccgccccggtccggaccccgagcttccccggaggcaacgaggaggagcctggcagtcacctcttctacaatgtcacggtctttggccgagacctgcacctgcggctgcggcccaacgcccgcctcgtggcgcccggggccactatggagtggcagggcgagaagggcaccacccgcgtggagcccctgctcgggagctgtctctacgtcggagacgtggccggcctagccgaagcctcctctgtggcgctcagcaactgcgatgggctggctggtctgatccggatggaggaggaggagttcttcatcgaacccttggagaaggggctggcggcgcaggaggctgagcaaggccgtgtgcatgtggtgtatcgccggccacccacgtcccctcctctcggggggccacaggccctggacacaggggcctccctggacagcctggacagcctcagccgcgccctgggcgtcctagaggagcacgccaacagctcgaggcggagggcacgcaggcatgctgcggacgatgactacaacatcgaggtcctgctgggcgtggatgactctgtggtgcagttccacgggaaggagcacgtacagaagtacctgctgacactcatgaacattgtcaatgaaatctaccatgacgagtccttgggtgcccacatcaacgtggtcctggtgcggatcatcctcctgagctatggaaagtccatgagcctcatcgagatcgggaacccctctcagagcctggagaatgtctgccgctgggcctacctccagcagaagccagacacgggccacgatgaataccacgatcacgccatcttcctcacacggcaggactttgggccttccggcatgcaaggctatgctcctgtcaccggcatgtgccatccggtccgcagctgcaccctgaaccatgaggacggcttctcctcagcgtttgtggtggcccatgagactggccacgtgctgggcatggagcacgacgggcagggcaaccgctgtggcgacgaggtgcggctgggcagcatcatggcgcccctggtgcaggccgccttccaccgcttccactggtcccgctgcagccagcaggagctgagccgctacctgcactcctatgactgcctgctggatgaccccttcgcccacgactggccggcgctgccccagctcccgggactgcactactccatgaacgagcaatgccgctttgacttcggcctgggctacatgatgtgcacggcgttccggacctttgacccctgcaagcagctgtggtgcagccatcctgacaacccctacttttgcaagaccaagaaggggccccccttggacgggactatgtgtgcacctggcaagcattgttttaaaggacactgcatctggctgacacctgacatcctcaaacgggacggcagctggggcgcttggagtccgtttggctcctgctcacgtacctgtggcacgggcgtgaagttcaggacccgccagtgtgacaacccacacccggccaacgggggccgcacctgctcgggccttgcctacgacttccagctctgcagccgccaggactgccccgactccctggctgacttccgcgaggagcagtgccgccagtgggacctgtacttcgagcacggcgacgcccagcaccactggctgccccacgagcaccgggatgccaaggagagatgccacctgtactgcgagtccagggagaccggggaggtggtgtccatgaagcgcatggtgcatgacgggacgcgctgctcctacaaggacgccttcagcctctgtgtgcgcggggactgcaggaaggtgggctgtgacggtgtgatcggctccagcaagcaggaagacaagtgtggcgtgtgcggaggggacaacagccactgcaaagtggtcaagggcacgttcacacggtcacccaagaagcatggttacatcaagatgtttgagatccctgcaggagccagacacctgctcattcaggaggtagacgccaccagccaccatctggccgtcaagaacctggagacaggcaagttcatcttaaatgaagagaatgacgtggatgccagttccaaaaccttcattgccatgggcgtggagtgggagtacagagacgaggacggccgggagacgctgcagaccatgggccccctccacggcaccatcaccgttctggtcatcccggtgggagacacccgggtctcactgacgtacaaatacatgatccatgaggactcactgaatgtcgacgacaacaacgtcctggaagaggactctgtggtctacgagtgggccctgaagaagtggtctccgtgctccaagccctgtggcggagggtcccagttcaccaagtatggctgccgccggaggctggaccacaagatggtacaccgtggcttctgtgccgccctctcgaagcccaaagccatccgcagagcgtgcaacccacaggaatgctcccagccagtgtgggtcacaggcgaatgggagccatgtagccagacctgtgggcggacaggcatgcaggtgcgctccgtgcgctgcattcagccgctacacgacaacaccacccgctccgtgcacgccaagcactgcaatgacgcccggcccgagagccgccgggcctgcagccgcgagctctgccctggtcgttggcgagccgggccctggtcccagtgctcagtaacctgtggcaacggcacccaggagcggccagtgctctgccgcaccgcggacgacagcttcggcatctgccaggaggagcgtcctgagacagcgaggacctgcaggcttggcccctgtccccgaaacatctcagatccctccaagaagagctacgtagttcagtggctgtcccgcccggaccccgactcgcccatccggaagatctcgtcaaagggccactgccaaggcgacaagtcaatattctgtaggatggaagtcttgtcccgctattgctccatcccaggctacaacaagctgtgctgcaagtcctgtaacctgtacaacaacctcaccaacgtggagggcaggatagagccaccgcctgggaagcacaacgacattgacgtgttcatgcctaccctcccagtgcccactgtagccatggaggtgcggccatcaccaagcacccccctggaggtccctctcaatgcctccagcaccaatgccacagaggatcacccagaaaccaatgccgtagatgaaccctacaaaatccatggcctggaagatgaagtccagccacccaacctaatccctcgacgaccgagcccctatgaaaagaccagaaaccaaagaatccaagagctcattgatgagatgcggaagaaagagatgctcggaaagttctaataaaatggaaagatagcatccctagcatttttttcttgcttatagagatattccatgggatagcaaatcctgtgtcatggagatgaagtcaaaattcctgattccaaaaggttttgagaaaacaaagagggggaatgacgtaagaaagataggcatgagcatgtggtaactaggttagcacgtgtgcttcccagcccaggagcgaccaaatactgtggtggcgtcaggtgtgcagtggagaggaatatagaggctgtatggcctccctcagtgagggcagggcaagagggatcactctgagagaacaaaaataggccccaagttgctaagcagtgattgggaaccttcctttccttggcggagatgcatgacattccctaccgatccccagacacagcctgtgggactcttaggagaaatggtgatttactgaataactgacccgttgccgagatgagtacaatgaagtggaggtgatgaactcaaatcgtcttccagggccaggcggctgaccggggtgagcgtagtggcccgctggggaccatggccgccctgacagccacacccacctggagctgacttggttctggctgttgctgccactgtgaaatctgtatctctctccatctctgctctactatccccggccttgccagacagtgttctttttcggaagaagtctagatttttgcatgaaaaaaactcaatctttaaaggtcgactcagaacattttaaggaggcctccacttggtctgatgcagtcttgctaattaagaactaaaggccttctgaccttcttggtgctcatgctgtacggcatctgaatgtctcgaccgagtctgagccgtgcagctgtcctccacctgcgaaagtaatgagaatcctatcacgggacataaggataggtctaaacagggtccatgccaagaaaacagtggggtgctctcccaggcctctcccctgtccactaaccctggccttgccggctgccttccaggctctgggggaagagctcctgcattcttccctggccaccttggctccagggctccccagagagcctcttccctccccaagtacctgagaaagatgagagaggcacgtgctctgctgggaaggtccagtgagcggttcaagggcctggaatctccctacggccaagtctaagggttctgggattctgggctttgtgggctttgcttgcttgctgggaatgggctttccctgtcccgccctgccccacctcgcctctgtctctcagaagctccagaacccagcagtgacctgcaaaatgtggcctctgatgggggcttagggtgggagatggggagagcctacattgtcttttgctccttgaaaactttaatagctcctattttccagagaatggtgctttgtgagcaacatgcgagtaagagagaaataggaggaagggggagtaggggcggatgggagaagagtggctcatttttacctctcactgccttgacattttgtgaacgtgaagcttaaactttctgggcttacaagacccaggggcacgtcagctccttagatgggctcagcctgacacataattcttaaacctttcctgtttaagaaacttctagaggctgtgtactctcaccaatcctcttcgagaatttgttcatgtgtatttccccattatatggatgaggctcaggataacagcatagtggctaccttctactgagttttgaggtgctaataagtatgtttgtctgaggctgcacatgtgggtggctctgtgtgtatgatccaagggacaaaatgacgatgtaggaaccagcaagaacggaatctgggctgatgcttcagtctccacctgggtgatggctagcctcccgccctccaccaccgcatcccacacgtgctgcgcactgtccccgtgtctcctggagaaccaaactggagaaaacctttctgagtatctctcatagtaccccttccttaagaagatgtggtttagagcatgtgtgcaatcctgcctctgtaattaggaaacggagcccgaggctttccattgttggttgaacccaggacagctggtgctattcacaggctgaagaactgggcagttcttacttgggtctgtcctaggatgtggaggaagttcaggactaacgctaggcagagagtatgactcggtttacccagcctaggggcctctggatgggaacactccattccaagatctcagcagagcagggcttcctggcttgaggctggaagcctttgggaagaggcccagctgggacattccctgggcacctgtcttccgctgaagggagcaaggtgccctctgggactgacagccatgaccctctgtgccatcctcaatccttgagccatatatcaagagtcctctagagccggatggtcctcaaaagtctgtccaaggaatgccaacgttcaccgggctctgagaaacgacgcaaatctctgagctggggaccacttggagaaccggcttagtaacagtcctgatcttcgcaagccagcttcttctgcatctgaggggctcctggcgcccagaggaggcagacagatgtcttctagctgagtttctaaccgcatgatgagactcagaccttccgctgcactagaaaatctgcaacagtgtccctgagtcacttctccttagtgggcagactcgtgttagatttgtggaacccagctctctgatttactccttttggaaaacccatggaatttcatgtataaggctttcatttgtattttaaggtttttctgtttgttttgagtatatacatggtgctcaatagcaacatcttagcagatgaagcagtttatgattccactccctcctgtatgacaggtagccactatactgaatcaaggtgctgaactcaaatcacaaaattctggcttaccgatacaacaaccaatacatctttgttctgtaatgtaaaatttgactccttacttttataacttattaaagttaaaatgtctgtgtttttgcaaatcatg

SEQ ID NO: 178655 - DNA, 3636 bp, Artificial Sequence
  derived and/or modified sequence
atggatcctcccgctggggccgcccgcaggctgctttgtcctgcattgctgcttctgctcctgctgttgcccccaccgttgttaccacccccccctcctccggccaacgctaggctggccgctgctgccgatccgcccggcgggccgctggggcacggcgcggaacggatcctagctgtgcctgtgcgtacagacgctcagggccggttggtgtctcacgtggtctcagctgcaaccagccgagccggggtcagagccaggcgcgctgcaccagtgaggacacccagctttcctggggggaatgaagaggagcccggaagtcatctgttctacaatgtgacagtgttcggtcgagatcttcatctccggctgagacctaatgcaaggctcgtggcccctggcgctactatggagtggcagggcgaaaagggcaccaccagagtcgagcctttgctggggtcctgcttatacgtgggcgatgtggctgggctggcagaggccagctcagtcgctctgtcgaactgtgatgggctggcgggactgattcggatggaggaagaggagttctttattgaaccactggaaaaaggactggccgctcaagaggctgagcagggccgggtccatgttgtgtatcggcgacctcctacaagtccacccctgggaggtccacaagccttagacacaggcgcgtctctagacagtttggactcactgtcccgggcgctgggagtcctggaggagcatgcgaactcctctagacgccgcgcacggaggcacgctgctgatgacgattacaacattgaagtgctgttgggcgtagacgacagcgttgtacagtttcacggaaaagaacatgtacagaagtatctcctcacattaatgaatattgtgaacgagatttaccacgacgaaagcctcggggcccacattaacgtggttcttgtgagaatcatcctgctgtcttatgggaagagcatgagcttgattgagattggtaatccctcccaaagtctggagaacgtatgccgctgggcatatctgcagcagaagcccgatactggtcacgatgaataccatgaccatgccattttcctaacaaggcaggattttggcccaagtggaatgcagggatatgcacccgttaccgggatgtgtcaccctgtgagaagctgtacgctgaatcatgaggacggcttctcttcagcgttcgtggtggcccacgaaaccggacacgtactggggatggaacacgatggccagggaaaccggtgcggtgacgaggtgagactcgggtctatcatggctcctctggttcaggccgcatttcatcgcttccactggagcaggtgttcacagcaggagctttcaaggtatcttcacagttacgactgtctcctcgacgacccgtttgcacatgattggcccgccctgccccagcttcccggtctgcactacagcatgaatgagcaatgtcggttcgactttggccttgggtatatgatgtgtacggcattcaggacatttgacccttgtaaacagttgtggtgctcacaccccgataatccctacttttgcaaaacaaagaagggcccgcccctggacgggactatgtgtgcaccaggcaagcattgctttaaaggccattgtatttggctgacccctgacattctgaaacgtgatggtagttggggcgcctggtctcctttcggaagctgcagccgtacctgtggaacaggagtgaagttccgcacccgccagtgtgacaatcctcatccagctaacggaggtcgcacctgctccggacttgcctatgactttcagctatgttcgcgacaagactgtccagactccctggctgacttcagggaggagcaatgtcggcaatgggatctatactttgaacacggggacgcccaacatcactggctgccccacgagcatcgggacgcaaaggagagatgccacctgtactgcgaatcccgcgagaccggagaagttgtgagcatgaaaaggatggtgcacgatggcacacgttgctcatacaaggatgccttctctttgtgcgtgcggggcgattgcaggaaggtggggtgtgacggggtcatcggctcttctaagcaggaagacaaatgtggcgtctgcggaggtgataacagtcactgtaaggtggtgaaagggacctttactcgctccccaaaaaaacacggatatatcaagatgtttgagatcccggccggcgccaggcacctcctgatccaggaagttgacgcaaccagccatcacctggccgtgaagaaccttgagacaggcaagttcattttaaatgaggagaacgacgtggacgcaagttctaagacttttatagctatgggagtcgaatgggaatatcgcgacgaagacggccgggagactctccagaccatgggccctctacacgggacaatcaccgtcctggtcattcctgtgggggatacaagggtctcactgacctataagtatatgatacatgaggatagcctgaacgttgacgataacaatgtactcgaggaggatagcgtggtttacgagtgggcgttaaaaaagtggagtccctgtagcaagccctgcggcggtgggtcccagtttaccaaatacggctgcagacgacggctagaccataaaatggtgcaccgcggcttttgtgctgccctgtccaagcctaaggctatcagaagggcttgcaacccccaggaatgctctcaacctgtctgggtgaccggtgaatgggaaccttgttctcaaacctgcggcaggacaggaatgcaggtgcggtctgtcagatgtattcagcctttgcacgacaacaccactcggtcagtgcatgccaaacactgcaatgatgcacggcccgaatcgcgcagggcctgctcccgggaattatgccccggcaggtggagagctggaccatggtctcagtgcagcgtgacatgcggaaatggaactcaggagagaccagtgctgtgtcgcaccgctgacgactcatttggtatctgccaggaggaacggccagagacagcaaggacgtgtcgcttaggcccgtgtccgcgtaatatctcagatcccagcaagaagtcttacgtggtgcagtggctgtcaagacctgacccagattccccaattcgtaagatcagctcgaagggccactgtcagggagacaagtccattttttgtaggatggaggttctttccaggtattgtagcatcccagggtataataagctgtgttgtaagagctgcaacctctacaataacctgactaacgttgaaggccggattgagccccctccgggcaagcataatgatattgatgtgttcatgcctacactgcctgttcccacagttgcgatggaggttcggccttcacccagcaccccattggaggttccactaaacgcctcctccacgaatgccacagaagaccatcctgagactaatgcagttgatgagccctataaaatccacggcctcgaggacgaggtccagccaccaaacctgattcctagacgtccctctccttacgaaaagaccaggaaccagaggatacaggaactcatcgatgagatgcgaaagaaggagatgcttggaaagttctag

SEQ ID NO: 178656 - DNA, 3636 bp, Artificial Sequence
  derived and/or modified sequence
atggaccccccagctggagctgcccggcggctgctgtgcccagccctgctgctgctgctgctgctgctgcccccacccctgctgcccccacctcctcctccagccaatgcccggctggccgctgctgctgaccccccaggcggccccctgggccacggggctgagcgcatcctggccgtgcctgtgaggacagatgcccagggccgcctggtgagccacgtggtgtctgctgccaccagccgggccggcgtgcgggccaggagagctgcccctgtgaggacccccagcttccctggaggaaatgaggaggagcccggcagccacctgttctacaacgtgacagtgtttggccgggacctgcacctgcggctgcggcccaatgcccggctggtggcccctggggccaccatggagtggcagggcgagaagggcaccaccagggtggagcccctgctgggcagctgcctgtatgtgggagatgtggccggcctggccgaggccagctctgtggccctgagcaactgtgatggcctggccggcctcatccgcatggaggaggaggagttcttcatcgagcccctggagaagggcctggccgcccaggaggccgagcagggccgggtgcacgtggtgtacagaagaccacccaccagcccccccctgggcggcccccaggccctggacacaggagccagcctggacagcctggacagcctgagccgggccctgggcgtgctggaggagcacgccaacagcagcagaagaagagccaggagacatgctgctgatgatgactacaacatcgaggtgctgctgggcgtggatgattctgtggtgcagttccacggcaaggagcacgtgcagaagtacctgctgaccctgatgaacatcgtgaatgagatctaccatgatgagagcctgggcgcccacatcaacgtggtgctggtgcgcatcatcctgctgtcctatggcaagtccatgagcctcatcgagatcggcaaccccagccagagcctggagaatgtgtgccgctgggcctacctgcagcagaagccagacaccggccatgatgagtaccatgaccacgccatcttcctgacccggcaggactttggccccagcggcatgcagggctacgcccctgtgacaggcatgtgccaccctgtgcgcagctgcaccctgaaccatgaagatggcttcagcagcgcctttgtggtggcccacgagaccggccacgtgctgggcatggagcatgatggccagggcaacagatgtggagatgaggtgcggctgggcagcatcatggcccccctggtgcaggccgccttccaccgcttccactggagccgctgcagccagcaggagctgagccgctacctgcacagctatgactgcctgctggatgacccctttgcccatgactggccagccctgccccagctgcccggcctgcactacagcatgaatgagcagtgccgctttgattttggcctgggctacatgatgtgcacagccttccgcacctttgacccctgcaagcagctgtggtgcagccacccagacaacccctacttctgcaagaccaagaagggcccccccctggatggcaccatgtgtgcccctgggaagcactgcttcaagggccactgcatctggctgaccccagacatcctgaagagagatggctcctggggcgcctggagccccttcggcagctgcagcaggacctgtggcactggagtgaagttccgcacccggcagtgtgacaacccccacccagccaatggaggccgcacctgcagcggcctggcctatgacttccagctgtgcagccggcaggactgcccagacagcctggccgacttccgggaggagcagtgccggcagtgggacctgtactttgagcacggagatgcccagcaccactggctgccccatgagcacagagatgccaaggagcgctgccacctgtactgtgagagccgggagaccggggaggtggtgtccatgaagaggatggtgcatgatggcacccgctgcagctacaaggatgccttcagcctgtgtgtgcggggggactgcaggaaggtgggctgtgatggagtgattggcagcagcaagcaggaggacaagtgtggggtgtgtggcggggacaacagccactgcaaggtggtgaagggcaccttcaccaggagccccaagaagcacggctacatcaagatgtttgagatcccagctggggcccggcacctgctgatccaggaggtggatgccaccagccaccacctggccgtgaagaacctggagaccgggaagttcatcctgaatgaggagaatgatgtggatgccagcagcaagaccttcatcgccatgggcgtggagtgggagtacagagatgaagatggccgggagaccctgcagaccatgggccccctgcacggcaccatcaccgtgctggtgattcctgtgggggacaccagggtgtccctgacctacaagtacatgattcatgaggacagcctgaatgtggatgacaacaacgtgctggaggaggacagcgtggtgtatgagtgggccctgaagaagtggagcccctgcagcaagccctgtggcggcggcagccagttcaccaagtatggctgcagaagaaggctggaccacaagatggtgcaccggggcttctgtgccgccctgagcaagcccaaggccatcagaagagcctgcaacccccaggagtgcagccagcctgtgtgggtgactggagagtgggagccctgcagccagacctgtggccgcacaggcatgcaggtgcgctctgtgcgctgcatccagcccctgcatgacaacaccaccaggtctgtgcacgccaagcactgcaatgatgcccggcctgagagcagaagagcctgcagccgggagctgtgccccggccgctggagggctggcccctggagccagtgcagcgtgacctgtggaaatggcacccaggagaggcctgtgctgtgcaggacagcagatgacagctttggcatctgccaggaggagaggcctgagacagcccggacctgccgcctgggcccctgccccaggaacatcagtgaccccagcaagaagagctatgtggtgcagtggctgagcaggccagaccctgacagccccatcaggaagatcagcagcaagggccactgccagggcgacaagagcatcttctgcaggatggaggtgctgagccgctactgcagcatccctggctacaacaagctgtgctgcaagagctgcaacctgtacaacaacctgaccaacgtggagggccgcatcgagcccccacctgggaagcacaatgacattgatgtgttcatgcccaccctgcctgtgcccaccgtggccatggaggtgcggcccagccccagcacccccctggaggtgcccctgaatgccagcagcaccaatgccacagaggaccaccctgagaccaatgctgtggatgagccctacaagatccacggcctggaggatgaggtgcagccccccaacctgatcccccggcggcccagcccctatgagaagaccaggaaccagaggatccaggagctgattgatgagatgaggaagaaggagatgctgggcaagttctag

SEQ ID NO: 178657 - DNA, 3636 bp, Artificial Sequence
  derived and/or modified sequence
atggacccccccgccggcgccgcccggcggctgctgtgccccgccctgctgttgctcttattgcttctgcctccacccttgcttccgcctccgccaccgcctgccaatgcacggctagccgctgctgcagaccccccaggcggccccctagggcacggggctgaacgaatccttgcagtgccggtgcgcacggacgcccagggtcgcctggtatcacatgtcgtgagtgctgccacctctcgcgccggcgtcagagcccggagggcagcccctgttcgaaccccaagcttcccaggggggaatgaagaggaacctgggagccatcttttctataatgtcacggtattcggacgagatttgcacttgagactgagaccaaacgctagattggtggcccctggcgcaaccatggagtggcagggagaaaaagggaccactagggtggaacccctgctgggaagttgcctgtacgtgggtgatgtcgctggtctggcagaagcaagctcagtcgcactatccaattgtgacgggctcgcaggacttatccgcatggaggaagaggagtttttcattgagcctcttgaaaaaggtctcgcggctcaggaggccgaacaaggaagagtgcatgtggtgtaccgaagaccgccgacctcaccgccactgggcggaccgcaggcattagacactggggcgtctcttgattccctggactcactgagtagagctctgggagtgctggaggagcatgctaatagttcgagacggcgcgctaggcgccatgcggctgacgatgactacaacatcgaggtgttacttggggtggatgattccgtcgtccagttccatgggaaggaacatgtccagaaatatctcctgacactaatgaatatcgtgaacgagatataccacgacgagtccctgggggcccatatcaacgtggtgctggtcaggattattcttctgagctatggaaaatcgatgtccctgatagagattgggaacccgagtcagtctctcgaaaatgtgtgcaggtgggcgtacctgcagcaaaagcctgacacaggacatgacgagtaccacgaccatgccatcttcctgactaggcaagacttcggcccgagtgggatgcagggatacgctcctgtgactgggatgtgccatcccgtcagatcatgcacgctcaaccacgaggatggattctcctccgcgttcgttgtggctcacgagactggacacgtgttagggatggaacatgacggtcagggtaatcggtgcggggatgaggtgagactgggtagcatcatggctcctttagtccaggcagcctttcataggttccactggtcgagatgtagccaacaagaattgagtcgctatctgcactcatacgattgccttctagacgatcctttcgctcacgactggccagctctgcctcagcttcccggtttacattattccatgaatgagcaatgtcgctttgattttgggctcgggtacatgatgtgcaccgctttccgcactttcgacccttgcaaacagctgtggtgttcccacccagataacccatatttctgtaaaacaaagaagggcccccctctggatggaacgatgtgtgcccccgggaagcactgtttcaagggacattgcatctggctaactcctgatatactgaaaagagacgggagctggggtgcctggagccccttcgggtcgtgttccagaacgtgtgggacaggggtcaagttcaggactcggcagtgtgataatccccatccagcgaacggaggtaggacatgcagcggactggcgtacgattttcagctgtgctcccggcaagattgtccagatagccttgctgactttcgggaagagcagtgtagacagtgggacctctatttcgagcacggtgacgcccagcatcactggctcccacatgagcatcgagacgccaaggagcggtgccacctatactgcgaatctcgcgaaaccggtgaggtggtgtcaatgaagaggatggtgcacgatggcacacgctgttcctataaggacgcattcagcctctgtgtccgcggggattgtagaaaagtcggctgcgatggggtgataggctcatctaaacaggaggacaagtgtggtgtgtgtggaggtgataatagtcattgcaaggtcgtgaaggggacatttacgaggtcacctaagaagcacgggtacattaagatgttcgaaatacccgccggagctagacacctgcttatacaggaggtcgatgccacatcgcaccacctggccgtgaaaaaccttgagacggggaaatttatattgaatgaggagaacgacgttgacgcttcatctaaaactttcattgctatgggagtcgagtgggaatatagagatgaggacggtcgagaaactttacagaccatgggccccctccacgggacaattacagtgctagtgatacctgttggagacacacgggtaagtttgacatataagtatatgattcatgaagacagcttgaacgtggacgataacaacgtgctggaggaggactcagttgtgtacgagtgggcactcaagaagtggagcccttgcagtaagccgtgtggcgggggaagtcaattcactaaatacggatgcagaagacgtctggatcataaaatggtacacagaggcttctgtgcggcactcagtaaaccaaaagccataaggagagcttgtaacccacaggagtgcagccagcccgtgtgggtgactggggagtgggagccctgttcgcagacatgtggccgaactggtatgcaggtgaggtctgtgagatgtatccagccccttcacgacaacactacccgatccgtccacgcgaaacattgcaacgatgccaggccagaatcacgccgggcttgtagccgagaactgtgccctgggcggtggagagccggcccttggagccagtgcagtgtgacctgcggcaacgggacgcaggagagacccgtgctgtgccggactgccgatgattctttcggcatttgtcaggaagaacgcccagaaactgcccgcacatgcaggctggggccctgtccgcgcaacatttcagatccctcaaagaagtcatacgttgtgcagtggctgtctcgtcctgatcccgacagtccaataagaaagatctcatctaaagggcactgccagggggataagtctatattttgtcggatggaagtactttcgcgctactgctcaatccccggttataacaagctatgctgtaagtcatgtaatctttataataatctcacaaacgtggagggacgaatcgagcctccgccaggcaagcataatgatatcgatgtttttatgcctacgctgcctgtgccaacagtcgcaatggaggttcggccatccccatccacaccccttgaggtacccctgaacgcttctagtactaatgccaccgaagatcaccctgaaaccaatgcggttgacgagccatataagattcatggtttagaggatgaggtgcagccacctaatcttatcccacgccggccgagcccctacgagaaaactaggaatcagcgcatccaggagctgattgacgagatgaggaagaaggagatgttgggcaagttttag

SEQ ID NO: 178658 - DNA, 3636 bp, Artificial Sequence
  derived and/or modified sequence
atggacccccctgccggagccgctaggaggctgctctgccctgccctgttgctgcttttgctgctcctgcctccccctctgctgcctccgccacctcctcccgctaacgcgcgactagcagctgcagcggaccctcctggcggaccccttgggcatggcgcagaacgcattctggctgtgcctgtgcgaactgacgcccagggtcgtctggtgtcccatgtggtcagtgcagccacctctagagccggagtgcgggctaggagagctgctccagtgcgcacgcctagttttcctggaggcaacgaagaggaacccggaagtcacctcttctacaacgttactgtgtttgggagggatctgcacctgcgccttaggcccaacgcgcgtttggttgccccaggcgctactatggaatggcaaggggagaagggcacaactcgagtggagcccctgcttgggtcttgtttgtacgtgggcgatgtcgcaggtctggcagaggcttcctcagtagccctctctaactgtgatggactggcaggtcttattcgaatggaggaggaagagttcttcatcgaacccctagaaaaaggactggccgcacaagaggctgaacagggcagggttcacgtggtgtataggagaccacccacaagccctccattgggcggtccacaggcactagatactggtgcctcactagacagcctggactcactttcacgcgcactgggcgtgttggaggaacacgccaacagttctagacgcagagcacgaaggcacgccgctgatgatgattataatatcgaggtgcttctgggtgtggacgactccgtggtccaattccatggtaaagaacacgttcagaaatacctcctcacacttatgaacatcgtgaatgagatctatcacgacgaatctttgggggcacatatcaacgttgtgctagtgcggatcatcctcttaagctacggcaagtccatgtctctgatcgagatcgggaatccttcgcagtctttggaaaacgtgtgccgctgggcctatctccagcagaaaccggacaccgggcatgatgagtatcatgaccacgcaatatttctcacacgccaggattttggacccagcgggatgcagggatatgcgcctgttacagggatgtgtcatcctgtgaggtcttgtaccttgaaccacgaggatggcttttcatcagcctttgtcgttgctcatgaaacgggtcatgtgctcggaatggagcacgatggccagggcaacagatgtggggacgaggtccgtctcggatccatcatggcaccacttgtgcaggcagcgtttcaccgatttcactggtcgcgatgctctcagcaggaactcagtcgttatctgcactcttacgactgcctgctggatgatcccttcgcccacgactggcctgcattaccccagttaccaggcctccactactcaatgaatgagcaatgccggttcgacttcggattgggatacatgatgtgtaccgccttccggacattcgatccatgtaagcagctgtggtgctctcaccctgataatccttatttttgcaagacgaagaaaggccctccactcgacggaaccatgtgcgcccctggcaagcactgtttcaaaggccactgcatctggctcacccccgatattctcaagagggatggctcttggggcgcttggagccccttcggttcgtgctctagaacctgtggcactggcgtcaagttccgaacccgccagtgcgataatccccatccagctaacgggggtcgcacttgcagtggcctggcatatgatttccagctctgtagtcgccaagactgtcccgacagccttgccgactttcgggaggagcagtgccgccagtgggacttgtatttcgagcacggagatgcgcagcatcattggctaccacatgaacaccgggacgctaaagaacgttgccacctgtactgtgagagccgggaaactggcgaagtggtctctatgaaacggatggtccacgacggtaccaggtgctcttacaaggacgcgttcagtctctgtgtacgtggcgattgcagaaaggtgggctgcgacggagtgatcgggtcttccaaacaggaagacaagtgcggagtgtgtggcggtgacaatagccactgcaaggtggtgaagggtacatttacacggtctccaaagaaacatggctacattaaaatgttcgaaatccctgccggtgctcgacacctccttatccaagaggtggacgccacatcccatcacctagcagtgaagaatcttgagactggaaagtttatccttaacgaggagaacgatgtggacgcgtcatctaaaaccttcatcgccatgggcgtggagtgggaatacagggatgaggacggaagagagacccttcaaacaatggggcctctccatggcaccattactgttctagttatccctgtcggagatacacgggtcagcctgacctataagtatatgatccatgaagactcgttgaatgtcgacgacaacaatgtgctggaggaggattctgtcgtttatgagtgggcgctgaagaaatggtccccatgttcaaaaccatgcggcggagggagccagttcacaaagtatggctgccggagaaggctggaccataaaatggtccaccgtggcttctgtgccgcactatccaagccaaaggccattcggagggcttgcaatccacaggaatgtagccagccagtctgggtcactggggagtgggagccttgctcccaaacttgcgggcgaacagggatgcaggtgcgctcggtcaggtgcattcagcccttgcatgataacacaacacgcagcgttcacgcaaagcactgcaatgatgccaggccagagtctcgacgggcatgctcacgggagctgtgccccggtcgctggcgcgcaggaccctggtctcagtgctcagtgacttgcggaaacggtacccaagaacggccagtgctatgcagaacagctgacgatagcttcggaatctgtcaagaggagagaccagagacagcccgaacttgtcgcctggggccatgccctagaaacatcagcgacccctccaaaaagtcttacgtagtccaatggttaagccggccagacccagatagcccaattcgtaagatcagcagtaagggacattgtcagggtgacaagagcattttctgtcgtatggaggtgctgtcaaggtattgtagtatacctggttacaataagctgtgctgcaagtcctgcaatctgtacaacaatctgacaaacgtcgaaggacgaatcgagccgccacccggaaaacacaacgatatagacgtatttatgcctaccctgcccgtgccaacagtcgcaatggaggtcagaccgagccccagcacaccactagaagtgccactaaatgcaagttcaacaaatgcaactgaagatcatcccgagaccaacgcggtggatgagccatataaaattcatgggctggaagacgaggtgcagccgccaaatctcattcctcggagacctagcccttacgagaagaccagaaaccagcggattcaggagctgatcgatgagatgagaaagaaagaaatgctcggcaagttttag

SEQ ID NO: 178659 - DNA, 69 bp, Artificial Sequence
  derived and/or modified sequence
atggcgtctgcttgcggggcaccaggccctgggggagcactcgggtctcaagccccaagttggtattag

SEQ ID NO: 178660 - DNA, 3636 bp, Artificial Sequence
  derived and/or modified sequence
atggacccccccgccggcgccgccagaagactgctgtgccccgccctgctgctgctgctgctgctgctgcccccccccctgctgccccccccccccccccccgccaacgccagactggccgccgccgccgacccccccggcggccccctgggccacggcgccgagagaatcctggccgtgcccgtgagaaccgacgcccagggcagactggtgagccacgtggtgagcgccgccaccagcagagccggcgtgagagccagaagagccgcccccgtgagaacccccagcttccccggcggcaacgaggaggagcccggcagccacctgttctacaacgtgaccgtgttcggcagagacctgcacctgagactgagacccaacgccagactggtggcccccggcgccaccatggagtggcagggcgagaagggcaccaccagagtggagcccctgctgggcagctgcctgtacgtgggcgacgtggccggcctggccgaggccagcagcgtggccctgagcaactgcgacggcctggccggcctgatcagaatggaggaggaggagttcttcatcgagcccctggagaagggcctggccgcccaggaggccgagcagggcagagtgcacgtggtgtacagaagaccccccaccagcccccccctgggcggcccccaggccctggacaccggcgccagcctggacagcctggacagcctgagcagagccctgggcgtgctggaggagcacgccaacagcagcagaagaagagccagaagacacgccgccgacgacgactacaacatcgaggtgctgctgggcgtggacgacagcgtggtgcagttccacggcaaggagcacgtgcagaagtacctgctgaccctgatgaacatcgtgaacgagatctaccacgacgagagcctgggcgcccacatcaacgtggtgctggtgagaatcatcctgctgagctacggcaagagcatgagcctgatcgagatcggcaaccccagccagagcctggagaacgtgtgcagatgggcctacctgcagcagaagcccgacaccggccacgacgagtaccacgaccacgccatcttcctgaccagacaggacttcggccccagcggcatgcagggctacgcccccgtgaccggcatgtgccaccccgtgagaagctgcaccctgaaccacgaggacggcttcagcagcgccttcgtggtggcccacgagaccggccacgtgctgggcatggagcacgacggccagggcaacagatgcggcgacgaggtgagactgggcagcatcatggcccccctggtgcaggccgccttccacagattccactggagcagatgcagccagcaggagctgagcagatacctgcacagctacgactgcctgctggacgaccccttcgcccacgactggcccgccctgccccagctgcccggcctgcactacagcatgaacgagcagtgcagattcgacttcggcctgggctacatgatgtgcaccgccttcagaaccttcgacccctgcaagcagctgtggtgcagccaccccgacaacccctacttctgcaagaccaagaagggcccccccctggacggcaccatgtgcgcccccggcaagcactgcttcaagggccactgcatctggctgacccccgacatcctgaagagagacggcagctggggcgcctggagccccttcggcagctgcagcagaacctgcggcaccggcgtgaagttcagaaccagacagtgcgacaacccccaccccgccaacggcggcagaacctgcagcggcctggcctacgacttccagctgtgcagcagacaggactgccccgacagcctggccgacttcagagaggagcagtgcagacagtgggacctgtacttcgagcacggcgacgcccagcaccactggctgccccacgagcacagagacgccaaggagagatgccacctgtactgcgagagcagagagaccggcgaggtggtgagcatgaagagaatggtgcacgacggcaccagatgcagctacaaggacgccttcagcctgtgcgtgagaggcgactgcagaaaggtgggctgcgacggcgtgatcggcagcagcaagcaggaggacaagtgcggcgtgtgcggcggcgacaacagccactgcaaggtggtgaagggcaccttcaccagaagccccaagaagcacggctacatcaagatgttcgagatccccgccggcgccagacacctgctgatccaggaggtggacgccaccagccaccacctggccgtgaagaacctggagaccggcaagttcatcctgaacgaggagaacgacgtggacgccagcagcaagaccttcatcgccatgggcgtggagtgggagtacagagacgaggacggcagagagaccctgcagaccatgggccccctgcacggcaccatcaccgtgctggtgatccccgtgggcgacaccagagtgagcctgacctacaagtacatgatccacgaggacagcctgaacgtggacgacaacaacgtgctggaggaggacagcgtggtgtacgagtgggccctgaagaagtggagcccctgcagcaagccctgcggcggcggcagccagttcaccaagtacggctgcagaagaagactggaccacaagatggtgcacagaggcttctgcgccgccctgagcaagcccaaggccatcagaagagcctgcaacccccaggagtgcagccagcccgtgtgggtgaccggcgagtgggagccctgcagccagacctgcggcagaaccggcatgcaggtgagaagcgtgagatgcatccagcccctgcacgacaacaccaccagaagcgtgcacgccaagcactgcaacgacgccagacccgagagcagaagagcctgcagcagagagctgtgccccggcagatggagagccggcccctggagccagtgcagcgtgacctgcggcaacggcacccaggagagacccgtgctgtgcagaaccgccgacgacagcttcggcatctgccaggaggagagacccgagaccgccagaacctgcagactgggcccctgccccagaaacatcagcgaccccagcaagaagagctacgtggtgcagtggctgagcagacccgaccccgacagccccatcagaaagatcagcagcaagggccactgccagggcgacaagagcatcttctgcagaatggaggtgctgagcagatactgcagcatccccggctacaacaagctgtgctgcaagagctgcaacctgtacaacaacctgaccaacgtggagggcagaatcgagcccccccccggcaagcacaacgacatcgacgtgttcatgcccaccctgcccgtgcccaccgtggccatggaggtgagacccagccccagcacccccctggaggtgcccctgaacgccagcagcaccaacgccaccgaggaccaccccgagaccaacgccgtggacgagccctacaagatccacggcctggaggacgaggtgcagccccccaacctgatccccagaagacccagcccctacgagaagaccagaaaccagagaatccaggagctgatcgacgagatgagaaagaaggagatgctgggcaagttctag

SEQ ID NO: 178661 - protein, 113 aa, Artificial Sequence
  derived and/or modified sequence
MADVEDGEETCALASHSGSSGSKSGGDKMFSLKKWNAVAMWSWDVECDTCAICRVQVMDACLRCQAENKQEDCVVVWGECNHSFHNCCMSLWVKQNNRCPLCQQDWVVQRIGK

SEQ ID NO: 178662 - DNA, 342 bp, Artificial Sequence
  derived and/or modified sequence
atggccgacgtagaggatggcgaggagacctgtgcacttgccagccactccgggagttctgggtccaaaagcggaggcgacaaaatgtttagtttaaaaaagtggaatgctgtggcaatgtggagctgggatgtcgaatgcgacacctgtgcgatctgccgggtacaggtcatggacgcttgcctgcgctgccaggcagagaacaaacaagaagactgcgtcgtggtctggggggagtgcaaccattctttccacaactgttgtatgagtctgtgggtcaaacaaaataatcgctgtccactctgccagcaggactgggtcgtgcagcgaatcggcaagtag

SEQ ID NO: 178663 - DNA, 342 bp, Artificial Sequence
  derived and/or modified sequence
atggctgatgtggaggatggagaggagacctgtgccctggccagccacagcggcagcagcggcagcaagagcggcggggacaagatgttcagcctgaagaagtggaatgctgtggccatgtggagctgggatgtggagtgtgacacctgtgccatctgccgggtgcaggtgatggatgcctgcctgcgctgccaggccgagaacaagcaggaggactgtgtggtggtgtggggcgagtgcaaccacagcttccacaactgctgcatgagcctgtgggtgaagcagaacaaccgctgccccctgtgccagcaggactgggtggtgcagagaattggcaagtag

SEQ ID NO: 178664 - DNA, 342 bp, Artificial Sequence
  derived and/or modified sequence
atggccgacgtggaggacggcgaggagacctgcgccctggccagccatagcggcagctcgggctctaagagcggtggagataagatgttctctctgaagaagtggaatgcagtggccatgtggagttgggatgttgagtgcgatacctgtgctatctgtagagtacaggtgatggacgcttgcctcagatgccaggccgagaacaaacaggaagattgtgtggtcgtgtggggggaatgcaaccactcatttcacaattgctgcatgagcctgtgggtgaagcagaacaaccggtgtcccttatgtcagcaagattgggtggtacagcggattgggaagtag

SEQ ID NO: 178665 - DNA, 342 bp, Artificial Sequence
  derived and/or modified sequence
atggccgatgtggaagacggagaagaaacctgcgctttagcctcccactccggcagtagcggcagtaagtccgggggagataagatgttttcactgaagaagtggaacgccgttgccatgtggtcctgggatgttgagtgcgacacctgcgctatttgccgagtccaggtgatggatgcatgcctccgatgccaggctgaaaacaaacaggaggattgcgtggttgtgtggggagaatgtaaccacagttttcacaactgctgcatgtccctgtgggtcaagcaaaacaacagatgtccgctgtgccaacaggattgggttgtgcaacgcatcggaaaatag

SEQ ID NO: 178666 - DNA, 2763 bp, Artificial Sequence
  derived and/or modified sequence
gggcagccggggtctaggcaccacggtggctggcggcctgcgggcggcgctgtggcccgtcgggcggctccacagagccgccctagccttccgccttccccaagccaacgtctccgccgtcggctccgcggcgccgccatggccgacgtggaagacggagaggaaacctgcgccctggcctctcactccgggagctcaggctccaagtcgggaggcgacaagatgttctccctcaagaagtggaacgcggtggccatgtggagctgggacgtggagtgcgatacgtgcgccatctgcagggtccaggtgatggatgcctgtcttagatgtcaagctgaaaacaaacaagaggactgtgttgtggtctggggagaatgtaatcattccttccacaactgctgcatgtccctgtgggtgaaacagaacaatcgctgccctctctgccagcaggactgggtggtccaaagaatcggcaaatgagagtggttagaaggcttcttagcgcagttgttcagagccctggtggatcttgtaatccagtgccctacaaaggctagaacactacaggggatgaattcttcaaataggagccgatggatctgtggtcctttgggactcatcaaagccttggtttagcattttgtcagttttatcttcagaaattctctgcgattaagaagataatttattaaaggtggtccttcctacctctgtggtgtgtgtcgcgcacacagcttagaagtgctataaaaaaggaaagagctccaaattgaatcacctttataatttacccatttctatacaacaggcagtggaagcagtttcagagaactttttgcatgcttatggttgatcagttaaaaaagaatgttacagtaacaaataaagtgcagtttaaaacccaactcttactcttaatttgttcctaatacgtatttttggcagggagagggaacggtccatgaaatctttatgtgatataaggattttaagtttgggccagtgaacagggtaaataaaatttaacttttgagcatatggaattttgattgcctttaaagttactattctgtatcattgattcatcaagaaaacctagatctgcactcacctcactgttcaatcattgagtggtaaaggacagaagtattttctagttctggtcagatgatataattttttttttttttttttgtgggggtgaagtcttgctctgccacccaggctggagtgcagtggcatgatgtcaactcactgcaacctccgcctcccgggttcaagtgattctcctgcctcagcctcccgagtagctgggattacaggtgtgtgccaccacacccggctaatttttgtatttttagtagagacgggatttccccatgttggccaggctggtctcaaactcctgacctcaggtgattcgcccacctcagcctcccaaagtgctgggattacaggtgtgggccactgcacctggcccagatgatataatttaactgtgttttaggtaacatgttaatgagggaaaatgtttaccagtgtagcattggatcaaaaagtttatcacacagtgttttaataaatggtttattctgcttaccttatttgaattgtcattataattttatatgcaaccttaatttgtcaagtaaatactttcatttaatttgaaagaattcatattcatttgctctttcatttgacaataataaaatttaaggtttattacctggaaagagtgcaagaaaatactaaacaactttatcaaactgattcacactgaggggaggttattttgtaacaaataatggaccacaagttcattttgtattcttctgtagtagaggctactgatatgaatttaagaaaaaaccttagaatcttaacttttcacatctgcagatgcagtgtgccattctgaatttttcaatctaagggatgtggatacatagaatgtttaaaaagataacaattagaatgaaaaattaaaattatgtatgcttttatatgggttactttttattgatcacatttctctggaaatttttctttatattttttcacagttgtctttctagctactgaaaaaattatacaaatatctttggccatttaaatgtttatcattgtgcagtgaactgttttagtaactttctgtttgacctttttagaaggttgcatccttaaaatgtgaaccagatacatggctttgcattgaagaggaaagcagtagaatgtcaggttactttaggcagtgtgacagtatataaatgaaatgtggaggatggtggtaacaatttgattttccacacagcaaaaccacagtcccgccacctaacaaagccctgtttatgccacacaccagcatctgagggaagaggaggcactgtgacaaagcagcgctgatgctgctcagcctgcgatgattacagctcatctgcacagccatctgaaagtttaatacatactcatcagagggaacatgccgggacaattttgggttccaatacaaaagttaagcatcaaacaggtttttctttccatttgattaaatgtgctgattttattttactgttgcattagaaacaaacaagttatctttcgctatttaattttccctctatgcaaattgtgttattacagctgaccgctatcagtaaatcttaattctgtcagtcccattgcttccttttttataaaaatactgtgtccccctttactgtcatgaagtgaaattcataaatatatttcctacacatataa

SEQ ID NO: 178667 - DNA, 342 bp, Artificial Sequence
  derived and/or modified sequence
atggccgacgtggaggacggcgaggagacctgcgccctggccagccacagcggcagcagcggcagcaagagcggcggcgacaagatgttcagcctgaagaagtggaacgccgtggccatgtggagctgggacgtggagtgcgacacctgcgccatctgcagagtgcaggtgatggacgcctgcctgagatgccaggccgagaacaagcaggaggactgcgtggtggtgtggggcgagtgcaaccacagcttccacaactgctgcatgagcctgtgggtgaagcagaacaacagatgccccctgtgccagcaggactgggtggtgcagagaatcggcaagtag

SEQ ID NO: 178668 - protein, 3014 aa, Artificial Sequence
  derived and/or modified sequence
MAPPPPPVLPVLLLLAAAAALPAMGLRAAAWEPRVPGGTRAFALRPGCTYAVGAACTPRAPRELLDVGRDGRLAGRRRVSGAGRPLPLQVRLVARSAPTALSRRLRARTHLPGCGARARLCGTGARLCGALCFPVPGGCAAAQHSALAAPTTLPACRCPPRPRPRCPGRPICLPPGGSVRLRLLCALRRAAGAVRVGLALEAATAGTPSASPSPSPPLPPNLPEARAGPARRARRGTSGRGSLKFPMPNYQVALFENEPAGTLILQLHAHYTIEGEEERVSYYMEGLFDERSRGYFRIDSATGAVSTDSVLDRETKETHVLRVKAVDYSTPPRSATTYITVLVKDTNDHSPVFEQSEYRERVRENLEVGYEVLTIRASDRDSPINANLRYRVLGGAWDVFQLNESSGVVSTRAVLDREEAAEYQLLVEANDQGRNPGPLSATATVYIEVEDENDNYPQFSEQNYVVQVPEDVGLNTAVLRVQATDRDQGQNAAIHYSILSGNVAGQFYLHSLSGILDVINPLDFEDVQKYSLSIKAQDGGRPPLINSSGVVSVQVLDVNDNEPIFVSSPFQATVLENVPLGYPVVHIQAVDADSGENARLHYRLVDTASTFLGGGSAGPKNPAPTPDFPFQIHNSSGWITVCAELDREEVEHYSFGVEAVDHGSPPMSSSTSVSITVLDVNDNDPVFTQPTYELRLNEDAAVGSSVLTLQARDRDANSVITYQLTGGNTRNRFALSSQRGGGLITLALPLDYKQEQQYVLAVTASDGTRSHTAHVLINVTDANTHRPVFQSSHYTVSVSEDRPVGTSIATLSANDEDTGENARITYVIQDPVPQFRIDPDSGTMYTMMELDYENQVAYTLTIMAQDNGIPQKSDTTTLEILILDANDNAPQFLWDFYQGSIFEDAPPSTSILQVSATDRDSGPNGRLLYTFQGGDDGDGDFYIEPTSGVIRTQRRLDRENVAVYNLWALAVDRGSPTPLSASVEIQVTILDINDNAPMFEKDELELFVEENNPVGSVVAKIRANDPDEGPNAQIMYQIVEGDMRHFFQLDLLNGDLRAMVELDFEVRREYVLVVQATSAPLVSRATVHILLVDQNDNPPVLPDFQILFNNYVTNKSNSFPTGVIGCIPAHDPDVSDSLNYTFVQGNELRLLLLDPATGELQLSRDLDNNRPLEALMEVSVSDGIHSVTAFCTLRVTIITDDMLTNSITVRLENMSQEKFLSPLLALFVEGVAAVLSTTKDDVFVFNVQNDTDVSSNILNVTFSALLPGGVRGQFFPSEDLQEQIYLNRTLLTTISTQRVLPFDDNICLREPCENYMKCVSVLRFDSSAPFLSSTTVLFRPIHPINGLRCRCPPGFTGDYCETEIDLCYSDPCGANGRCRSREGGYTCECFEDFTGEHCEVDARSGRCANGVCKNGGTCVNLLIGGFHCVCPPGEYERPYCEVTTRSFPPQSFVTFRGLRQRFHFTISLTFATQERNGLLLYNGRFNEKHDFIALEIVDEQVQLTFSAGETTTTVAPKVPSGVSDGRWHSVQVQYYNKPNIGHLGLPHGPSGEKMAVVTVDDCDTTMAVRFGKDIGNYSCAAQGTQTGSKKSLDLTGPLLLGGVPNLPEDFPVHNRQFVGCMRNLSVDGKNVDMAGFIANNGTREGCAARRNFCDGRRCQNGGTCVNRWNMYLCECPLRFGGKNCEQAMPHPQLFSGESVVSWSDLNIIISVPWYLGLMFRTRKEDSVLMEATSGGPTSFRLQILNNYLQFEVSHGPSDVESVMLSGLRVTDGEWHHLLIELKNVKEDSEMKHLVTMTLDYGMDQNKADIGGMLPGLTVRSVVVGGASEDKVSVRRGFRGCMQGVRMGGTPTNVATLNMNNALKVRVKDGCDVDDPCTSSPCPPNSRCHDAWEDYSCVCDKGYLGINCVDACHLNPCENMGACVRSPGSPQGYVCECGPSHYGPYCENKLDLPCPRGWWGNPVCGPCHCAVSKGFDPDCNKTNGQCQCKENYYKLLAQDTCLPCDCFPHGSHSRTCDMATGQCACKPGVIGRQCNRCDNPFAEVTTLGCEVIYNGCPKAFEAGIWWPQTKFGQPAAVPCPKGSVGNAVRHCSGEKGWLPPELFNCTTISFVDLRAMNEKLSRNETQVDGARALQLVRALRSATQHTGTLFGNDVRTAYQLLGHVLQHESWQQGFDLAATQDADFHEDVIHSGSALLAPATRAAWEQIQRSEGGTAQLLRRLEGYFSNVARNVRRTYLRPFVIVTANMILAVDIFDKFNFTGARVPRFDTIHEEFPRELESSVSFPADFFRPPEEKEGPLLRPAGRRTTPQTTRPGPGTEREAPISRRRRHPDDAGQFAVALVIIYRTLGQLLPERYDPDRRSLRLPHRPIINTPMVSTLVYSEGAPLPRPLERPVLVEFALLEVEERTKPVCVFWNHSLAVGGTGGWSARGCELLSRNRTHVACQCSHTASFAVLMDISRRENGEVLPLKIVTYAAVSLSLAALLVAFVLLSLVRMLRSNLHSIHKHLAVALFLSQLVFVIGINQTENPFLCTVVAILLHYIYMSTFAWTLVESLHVYRMLTEVRNIDTGPMRFYYVVGWGIPAIVTGLAVGLDPQGYGNPDFCWLSLQDTLIWSFAGPIGAVIIINTVTSVLSAKVSCQRKHHYYGKKGIVSLLRTAFLLLLLISATWLLGLLAVNRDALSFHYLFAIFSGLQGPFVLLFHCVLNQEVRKHLKGVLGGRKLHLEDSATTRATLLTRSLNCNTTFGDGPDMLRTDLGESTASLDSIVRDEGIQKLGVSSGLVRGSHGEPDASLMPRSCKDPPGHDSDSDSELSLDEQSSSYASSHSSDSEDDGVGAEEKWDPARGAVHSTPKGDAVANHVPAGWPDQSLAESDSEDPSGKPRLKVETKVSVELHREEQGSHRGEYPPDQESGGAARLASSQPPEQRKGILKNKVTYPPPLTLTEQTLKGRLREKLADCEQSPTSSRTSSLGSGGPDCAITVKSPGREPGRDHLNGVAMNVRTGSAQADGSDSEKP

SEQ ID NO: 178669 - DNA, 9045 bp, Artificial Sequence
  derived and/or modified sequence
atggcccctccccccccccccgtcctccccgtgctgctgctactcgcagctgccgctgccttgcccgccatgggactgcgcgctgcagcatgggagccccgtgtgccgggcgggacacgcgccttcgcgctgagaccagggtgcacgtatgccgtgggcgccgcctgcacccccagagctccacgggagcttctcgacgttggaagagacggccgactcgctggacgccgcagagtatctggggccggtcggccactacctcttcaggtgagattggttgctcgtagcgctccaacagccctttcccggagactgagggcgagaacccacctgcccggctgcggcgctcgcgcccgcctgtgcggcaccggagccaggttatgcggcgccctctgctttcccgttccaggcgggtgcgccgcggcacagcactctgctctggctgcacccacaaccctgccagcttgtaggtgccctccccgccctaggcccagatgccctgggagaccaatctgcctgccccccggcggttcagtgagactgaggctcctgtgtgcacttcgccgcgcagctggtgccgtgcgagtagggctggccttagaagctgctactgccggtaccccctccgcatccccatcgccctctccacccctgcctccaaatctccccgaagctcgtgccgggccagctaggcgagcccggcgaggtacttcaggcaggggctcacttaaatttccgatgccgaactatcaggtcgccttgttcgaaaatgagcccgcagggacactcatcttacagctccacgcgcattataccattgaaggagaggaagagcgcgtgtcctactacatggaaggactttttgacgaaaggagccgcgggtatttccgcatcgacagcgctaccggggccgtatcgaccgactcagtgctggatagagagaccaaggagactcacgtactgcgcgtgaaagccgttgactactctaccccacctcgtagcgctacgacatacattacggttcttgtgaaagacaccaatgaccatagtccggtattcgagcagagtgaatatcgagagagggtgcgagagaacctcgaagtaggttacgaagtcctgactatccgggctagcgaccgtgatagcccaatcaacgcaaacctgagatatcgggtgctgggtggcgcatgggacgtcttccagctgaatgagagcagtggcgtcgtgtccacaagggctgtcctcgaccgcgaggaggccgccgagtaccaactgctggtggaggcaaacgatcagggtagaaatcccggtccgctgagtgccacagccaccgtttacatcgaggtcgaagacgagaacgacaattacccccagttcagcgaacagaactatgtcgtccaagtccctgaagatgtgggtcttaatacggctgtactgagggtgcaggccaccgatcgcgaccagggccaaaacgctgcgatccattattctattttgtcggggaacgttgccggccagttttacctgcactcactgagtggcattcttgatgttatcaaccctctcgactttgaggacgtgcagaaatactcactgtccatcaaagcgcaggacggaggccgtcctccgttgatcaacagcagcggcgtggtgtccgtccaggttttggacgttaatgataatgaaccaatctttgtgagcagtccctttcaggccaccgtgttggaaaatgtcccgctgggataccctgtggtgcacatacaggcggtggacgctgattccggcgaaaacgccagactgcattaccgcctagttgatacagccagcacttttcttgggggtgggagtgccggcccaaaaaacccggcacccacccctgactttccctttcagatacacaacagcagtggatggatcaccgtgtgcgctgaactggacagggaagaagttgaacactatagcttcggtgtagaggctgttgatcatggcagtcctcctatgtcctcaagtacatccgtgtctatcactgtgttagatgtcaatgataatgacccagtattcacccagccgacatacgaactccgactcaacgaggatgccgccgtgggtagttccgtgctgactctccaagcacgggacagggatgcaaactcagtgattacttaccagctcacaggcgggaacacacgcaatcgatttgcactgagcagccagcggggtggagggctgattacacttgcattgcccctggactataaacaggagcaacaatatgttctggctgtgactgcaagtgacggcactcggtcgcacacggcgcacgtgcttataaatgtgaccgacgccaacacccacagacccgtattccagagctctcactacaccgtgtcagtctcagaagatagacctgtaggcaccagtattgccaccctgtctgctaacgacgaagatacaggcgaaaatgcgcgaatcacatatgtcatacaagaccctgtccctcagttccgcattgatcctgactccggaaccatgtacactatgatggagctcgattacgaaaatcaagtggcgtacaccctgaccattatggcgcaggataatggaatcccccagaaatctgacacgactacactggaaatcctgatcttggatgctaatgacaatgcccctcagttcctttgggatttttatcagggaagtattttcgaggatgcccccccttcaacaagcatactccaagtgtcggctaccgatcgtgacagcggccctaatggacgcctcctctacacattccagggcggggacgatggcgacggggacttttatatcgagcccacaagcggagtcatccgaacacagcgacgtctggaccgtgagaacgtggccgtctacaatctctgggctctggcagttgatcggggatcgccaacaccactttctgcgtctgtcgagatccaggtcactatactcgacatcaacgataatgcccccatgttcgaaaaggatgaactggaactgttcgtagaggagaacaaccctgtgggatccgttgtggcaaagatccgggctaatgatcccgacgagggtccgaacgcccagattatgtaccaaattgtcgagggcgacatgcgccacttctttcagttggatctactcaacggggacctgagagccatggtggaactggatttcgaggtgcgtcgggagtatgtgctcgtggtgcaagccactagtgcccctttagtgagcagagctacggtccatatcctactggtggatcagaacgataaccctcctgttctaccagattttcagattctattcaataactacgtgacaaacaaatctaattcttttcctacaggggtgatcggctgcattcctgcccatgaccccgacgtgagcgactccctaaactacacattcgtgcagggcaacgagctcagactactgctactggatcctgctacaggcgagctacagctgtcacgggacttagacaataacaggcccctggaagccctcatggaagtttcggtttcagatgggattcattcggtgactgccttttgcactctgagagtgactataatcacagatgacatgctcaccaacagcatcacagttcggctggagaatatgtcacaggagaaatttctgagcccactgcttgcactgttcgtagaaggtgttgcagctgtgctcagcacaaccaaagacgatgtcttcgtgtttaatgttcaaaacgacaccgatgtgagttcgaacatcctgaatgttacattcagtgcgctgctgcccggaggtgttcgaggccagttttttccgtccgaagacttacaagaacagatctacctcaaccgaaccctgcttactacaatttcaacccagcgggtgctgccttttgacgacaacatctgccttagggaaccatgcgagaattatatgaagtgcgtctccgtcctgcgcttcgattcgagcgcgcctttcctgtcgtctactactgttttgttccgccccatacacccaatcaatggactgcgatgtagatgtccgcccggctttactggcgactattgtgagacagaaattgacctttgctattccgacccctgcggtgccaacgggcgttgtaggtctcgcgagggaggatacacttgcgagtgcttcgaggacttcaccggggagcactgtgaggttgatgccagaagtggccgctgtgcgaatggggtgtgcaaaaatggtgggacctgcgtcaacctccttattggcgggttccattgtgtctgtccccctggcgagtacgagaggccctactgcgaagtgaccaccaggagcttccccccacagtcctttgtgacttttagaggtttacgtcagagatttcatttcactattagtctcacgtttgccactcaggagcgaaatggactcctgctgtataatgggagatttaatgaaaaacatgatttcatcgccttggaaatcgtagacgaacaggtccaattaacatttagtgctggtgagactacaacgactgtggctcccaaggtcccttcaggcgtgtctgacggtagatggcacagtgtccaagtgcagtactataacaaacctaacatcggacacctgggcctgccacacgggccatctggcgagaaaatggccgttgtgacagtggacgactgtgacactacaatggccgtgagatttggtaaggacatcggcaactactcctgtgcagcccagggaacacaaacaggctcaaagaagtctctggacctcactgggcctctgctgctgggaggagtcccaaatctgcctgaggacttccccgtccacaatcgccaattcgtgggctgcatgcgcaatctgtcggtggacggcaagaacgtggacatggccggcttcattgctaacaacggaacgagggagggatgcgcagctcgacgcaatttctgtgatgggcggcggtgtcagaatggaggaacttgcgtgaatcgctggaacatgtatctgtgtgaatgccctctcaggttcggagggaagaattgcgaacaagctatgccccatccccaattgttttcgggcgagtccgtggtctcctggagcgacctgaacattatcatctctgtcccttggtaccttgggctgatgttcagaactaggaaagaggactcagtgctgatggaggcaacttcaggaggacctacttcgttccgcttacagattcttaacaactatttgcagtttgaggttagccatggcccatctgacgtagagtcggtgatgctgtcagggctgcgggtgacagacggggaatggcaccatcttttaattgagctgaaaaatgtgaaagaggacagcgagatgaagcatctggttactatgacactcgactacgggatggatcaaaataaagctgacatcggaggtatgttgcccggactgacggtccggagtgttgttgtgggcggtgcatcagaagacaaggtttctgtgagacggggatttagaggatgcatgcagggcgttcggatgggtggcactcctacaaacgtggctacattgaacatgaataatgctctgaaagtgcgagtgaaggacggatgtgacgtcgacgatccatgcacatccagcccctgccccccgaattccagatgccacgacgcttgggaggattattcatgcgtttgtgataaaggatatctggggattaactgtgtcgacgcctgtcatctcaacccgtgcgagaatatgggggcatgcgtgcggtctcccggcagcccacagggttacgtgtgcgagtgtggtccttcacattacggtccctattgcgaaaacaagctagacctcccctgtccacggggctggtgggggaacccggtttgcggtccttgtcactgtgccgttagcaagggcttcgatccggattgtaacaaaacgaatggccaatgccagtgcaaggagaactattacaagctactagcccaggacacatgtctgccctgcgactgcttcccacatgggtcgcacagtcgtacttgcgatatggctactggccaatgcgcttgtaagccaggcgtgattgggaggcaatgtaacaggtgtgataaccctttcgcggaggtcacaacactgggctgcgaggtcatttacaacggctgccctaaggccttcgaggccgggatatggtggccgcagacaaagtttggacaacccgctgctgtaccatgccccaaaggatctgtgggcaacgcagtgaggcattgttcgggtgaaaagggttggcttccgcctgagttatttaactgcactacaattagttttgtagacctgagagctatgaacgaaaagctctcccgaaacgagacgcaggtcgacggcgccagagccctgcagctggtgcgagctctaagatccgccactcagcacactggaacactattcggtaatgatgtccgaactgcctatcaactgctcggacatgtactccagcacgagagctggcaacaggggttcgacctggccgccacccaagatgcagacttccacgaggatgtcatacacagcggtagcgctcttctggcacctgccacccgcgccgcttgggagcagatacagcggagtgaaggaggcaccgctcaactgttgaggcggcttgaggggtactttagcaatgtggcacgtaacgtacgccgaacctatcttaggccctttgtgatcgtaaccgccaacatgattctggcagttgatattttcgataagtttaactttactggggcgcgagtgcctcgattcgatacgatacacgaggagtttcctagagagctggagtcatccgtgtccttccctgcggatttcttcagaccacctgaagaaaaggaaggccccctcttgcgccctgcgggccgcaggaccacacctcagacaaccagacccggccctggcaccgagagggaagcgcctatctctcgtcgtcgcagacacccagacgacgcaggccagtttgctgtagcactcgtcatcatctacaggacactggggcagcttctgccagaaagatatgatcctgatagacgctccctgaggctcccccacaggcccataattaataccccaatggtgtccacactggtatacagtgaaggtgcgccccttccccggcccctcgaacgccctgtcctggtcgaattcgccctgttggaagtggaagaacgtacaaagcccgtgtgcgttttttggaaccattctctggccgttgggggcacagggggatggtccgcccgggggtgcgaactcctttctagaaatcggacccatgttgcctgtcagtgctcgcatactgcgtcctttgcagttctgatggacattagcaggcgggagaacggtgaggtgctccctcttaaaatagtcacatacgctgctgtgtccctgagtctggctgccctgttggttgcatttgttctgcttagtctggtccggatgctgcgctctaacctacactcgattcacaagcatcttgcagtggcactttttctgagccagctcgtttttgtcatcgggataaaccaaaccgagaatccatttttgtgtacagttgtggccatcctccttcactatatatacatgagcaccttcgcctggacactggtggaaagtttgcatgtataccgcatgttgaccgaagtgaggaatattgataccggccccatgcgtttttactacgtggtgggctggggcatcccagctattgtgaccggcctggccgtgggattggaccctcaggggtacggaaatccagacttttgctggctctctttgcaagacaccctcatctggagctttgccggtcctatcggggcagtaataataatcaacaccgtcacttcggtgctttcagcaaaagtttcctgtcagagaaagcatcattattatggcaagaaagggattgtatccctgctcagaacggctttcctgctgctactgctgatatccgccacgtggctcctcggcctgttggcggtaaatcgcgacgcacttagcttccactaccttttcgccatcttcagtggactgcagggcccctttgtacttctgttccactgtgtattgaaccaggaagtgcggaaacatttgaagggtgtccttggcggacggaagctgcaccttgaggactctgcgaccacaagagccactcttttgaccaggtctcttaattgtaatactaccttcggagatggacccgacatgcttagaaccgatctaggcgaatcaacagcttctctagatagcatcgtaagggatgaagggatccagaaactgggcgtgtcatccggtttagtgagaggctcgcacggcgagcccgacgcgtcccttatgccccgaagttgtaaggaccctcccggccacgatagcgattctgattcggagctgtcgttggacgaacagtcatccagttacgccagttcacactcaagcgactcggaggatgatggggtgggagctgaagaaaagtgggatccagcacggggagccgtccatagtactccaaagggggacgctgtggcaaatcatgttccagctgggtggcccgaccagtcacttgccgaatcagacagtgaggatcccagcggtaagcctcggctgaaggtcgagaccaaagtctcagtcgagttgcatagggaggagcagggcagtcacaggggtgagtacccccctgaccaagaatccggcggagccgcacggctcgcgtcttcacaaccacctgagcagcgaaaaggcatcctcaaaaacaaggtcacatatccaccccccctcacattaacggagcagaccctcaaggggcgcctgcgagaaaagctggctgactgcgagcagagcccgaccagcagtcgcacctctagccttgggagtgggggtccagactgcgctatcacagtcaagagccccggacgcgaaccaggtagagatcacctcaacggtgttgccatgaacgtgaggaccggcagcgctcaggctgatgggagcgactctgagaaaccctag

SEQ ID NO: 178670 - DNA, 9045 bp, Artificial Sequence
  derived and/or modified sequence
atggcccctcctcctcctcctgtgctgcctgtgctgctgctgctggccgctgctgctgccctgcctgccatgggcctgcgggctgctgcctgggagccccgggtgcctgggggcacccgggcctttgccctgcggcccggctgcacctatgctgtgggcgccgcctgcaccccccgggccccccgggagctgctggatgtgggcagagatggccgcctggccggcagaagaagagtgtctggggccggccggcccctgcccctgcaggtgcggctggtggcccggagcgcccccacagccctgagccggcggctgcgggcccggacccacctgcccggctgtggggcccgggcccggctgtgtggcactggagcccggctgtgtggggccctgtgcttccctgtgcctgggggctgtgccgccgcccagcacagcgccctggccgcccccaccaccctgcctgcctgccgctgccccccccggccccggccccgctgccccggccggcccatctgcctgcccccaggcggctctgtgcggctgcggctgctgtgtgccctgcggcgggctgctggagctgtgcgggtgggcctggccctggaggccgccacagctggcaccccatctgccagccccagccccagcccccccctgccccccaacctgcctgaggcccgggccggccctgcccggcgggcccggcggggcaccagcggccggggcagcctgaagttccccatgcccaactaccaggtggccctgtttgaaaatgaacctgctggcaccctcatcctgcagctgcacgcccactacaccattgaaggagaggaggagcgggtgtcctactacatggagggcctgtttgatgagaggagccggggctacttcagaattgacagcgccaccggggctgtgtccacagattctgtgctggaccgggagaccaaggagacccacgtgctgcgggtgaaggctgtggactacagcaccccacccaggtctgccaccacctacatcaccgtgctggtgaaggacaccaatgaccacagccctgtgtttgagcagagcgagtaccgggagcgggtgcgggagaacctggaggtgggctatgaggtgctgaccatccgggccagtgaccgggacagccccatcaatgccaacctgcgctacagagtgctgggcggggcctgggatgtgttccagctgaatgaaagcagcggcgtggtgtccaccagggctgtgctggaccgggaggaggccgctgagtaccagctgctggtggaggccaatgaccagggcaggaaccctggccccctgagcgccacagccaccgtgtacatcgaggtggaggatgaaaatgacaactacccccagttcagcgagcagaactacgtggtgcaggtgcctgaagatgtgggcctgaacacagctgtgctgcgggtgcaggccacagaccgggaccagggccagaatgctgccatccactacagcatcctgtctggaaatgtggccggccagttctacctgcacagcctgagcggcatcctggatgtgatcaaccccctggactttgaagatgtgcagaagtacagcctgagcatcaaggcccaggacggcggccggcccccactcatcaacagcagcggcgtggtgtctgtgcaggtgctggatgtgaatgacaatgagcccatctttgtgagcagccccttccaggccaccgtgctggagaatgtgcccctgggctaccctgtggtgcacatccaggccgtggatgctgacagcggggagaatgcccggctgcactaccgcctggtggacacagccagcaccttcctgggcggcggcagcgctggccccaagaacccagcccccaccccagacttccccttccagatccacaacagcagcggctggatcaccgtgtgtgccgagctggaccgggaggaggtggagcactacagctttggagtggaggccgtggaccacggcagcccccccatgagcagcagcacctctgtgtccatcaccgtgctggatgtgaatgacaatgaccctgtgttcacccagcccacctatgagctgcggctgaatgaagatgctgctgtgggcagctctgtgctgaccctgcaggcccgggacagagatgccaacagcgtcatcacctaccagctgactggaggcaacaccaggaacagatttgccctgagcagccagaggggcggcggcctcatcaccctggccctgcccctggactacaagcaggagcagcagtatgtgctggccgtgacagccagtgatggcaccaggagccacacagcccacgtgctgatcaacgtgacagatgccaacacccacaggcctgtgttccagagcagccactacacagtgtctgtgtctgaggacaggcctgtgggcaccagcatcgccaccctgagcgccaatgatgaggacaccggggagaatgcccgcatcacctacgtgatccaggaccctgtgccccagttcagaattgatcctgattctggcaccatgtacaccatgatggagctggactatgagaaccaggtggcctacaccctgaccatcatggcccaggacaatggcatcccccagaagagtgacaccaccaccctggagatcctgatcctggatgccaatgacaatgccccccagttcctgtgggacttctaccagggcagcatctttgaagatgccccacccagcaccagcatcctgcaggtgtctgccacagaccgggacagcggccccaacggccgcctgctgtacaccttccagggcggagatgatggagatggagacttctacatcgagcccaccagcggggtcatccgcacccagaggcggctggacagagaaaatgtggccgtgtacaacctgtgggccctggccgtggaccggggcagccccacccccctgagcgcctctgtggagatccaggtgaccatcctggacatcaatgacaatgcccccatgtttgagaaggatgagctggagctgtttgtggaggagaacaaccctgtgggctctgtggtggccaagatccgggccaatgaccctgatgagggccccaatgcccagatcatgtaccagatcgtggagggggacatgaggcacttcttccagctggacctgctgaatggagacctgcgggccatggtggagctggactttgaggtgagaagagaatatgtgctggtggtgcaggccaccagcgcccccctggtgtcccgggccaccgtgcacatcctgctggtggaccagaatgacaacccccctgtgctgcctgacttccagatcctcttcaacaactacgtgaccaacaagagcaacagcttccccactggagtcatcggctgcatcccagcccatgaccctgatgtgtctgacagcctgaactacacctttgtgcagggcaatgagctgcggctgctgctgctggaccctgccactggagagctgcagctgagccgggacctggacaacaaccggcccctggaggccctgatggaggtgtctgtgtctgatggcatccacagcgtgacagccttctgcaccctgcgggtgaccatcatcacagatgacatgctgaccaacagcatcaccgtgcggctggagaacatgagccaggagaagttcctgagccccctgctggccctgtttgtggagggcgtggccgctgtgctgagcaccaccaaggatgatgtgtttgtgttcaacgtgcagaatgacacagatgtgagcagcaacatcctgaatgtgaccttcagcgccctgctgcctggaggagtgcggggccagttcttccccagcgaggacctgcaggagcagatctacctgaacagaaccctgctgaccaccatcagcacccagagggtgctgccctttgatgacaacatctgcctgcgggagccctgtgagaactacatgaagtgtgtgtctgtgctgcgctttgacagcagcgcccccttcctgagcagcaccaccgtgctcttccggcccatccaccccatcaatggcctgcgctgccgctgccccccaggcttcaccggggactactgtgaaacagaaattgacctgtgctacagcgacccctgtggggccaacggccgctgccgcagccgggagggcggctacacctgtgagtgctttgaggacttcaccggggagcactgtgaggtggatgcccggagcggccgctgtgccaatggagtgtgcaagaatggaggcacctgtgtgaacctgctgattggaggcttccactgtgtgtgccccccaggagaatatgagcggccctactgtgaggtgaccaccaggagcttccccccccagagctttgtgaccttccggggcctgcggcagcgcttccacttcaccatcagcctgacctttgccacccaggagagaaatggcctgctgctgtacaacggccgcttcaatgagaagcatgacttcatcgccctggagatcgtggatgagcaggtgcagctgaccttctctgctggggagaccaccaccaccgtggcccccaaggtgcccagcggcgtgtctgatggccgctggcacagcgtgcaggtgcagtactacaacaagcccaacatcggccacctgggcctgccccacggccccagcggggagaagatggctgtggtgacagtggatgactgtgacaccaccatggctgtgcgctttgggaaggacatcggcaactacagctgtgccgcccagggcacccagacaggcagcaagaagagcctggacctgaccggccccctgctgctgggcggcgtgcccaacctgcctgaggacttccctgtgcacaaccggcagtttgtgggctgcatgaggaacctgtctgtggatggcaagaatgtggacatggccggcttcatcgccaacaacggcacccgggagggctgtgccgcccggaggaacttctgtgatggccgccgctgccagaatggaggcacctgtgtgaaccgctggaacatgtacctgtgtgagtgccccctgcgctttggaggcaagaactgtgagcaggccatgccccacccccagctgttctctggagagagcgtggtgtcctggagcgacctgaacatcatcatctctgtgccctggtacctgggcctgatgttccgcaccaggaaggaggacagcgtgctgatggaggccaccagcggcggccccaccagcttccggctgcagatcctgaacaactacctgcagtttgaggtgagccacggccccagtgatgtggagagcgtgatgctgagcggcctgcgggtgacagatggagagtggcaccacctgctgattgagctgaagaatgtgaaggaggacagcgagatgaagcacctggtgaccatgaccctggactatggcatggaccagaacaaggctgacattggaggcatgctgcccggcctgactgtgcgctctgtggtggtgggcggggccagcgaggacaaggtgtctgtgcggcggggcttccggggctgcatgcagggcgtgaggatgggcggcacccccaccaacgtggccaccctgaacatgaacaatgccctgaaggtgcgggtgaaggatggctgtgatgtggatgacccctgcaccagcagcccctgcccccccaacagccgctgccatgatgcctgggaggactacagctgtgtgtgtgacaagggctacctgggcatcaactgtgtggatgcctgccacctgaacccctgtgagaacatgggcgcctgtgtgcgcagccctggcagcccccagggctacgtgtgtgaatgtggccccagccactacggcccctactgtgagaacaagctggacctgccctgcccccggggctggtggggcaaccctgtgtgtggcccctgccactgtgctgtgtccaagggctttgatcctgactgcaacaagaccaacggccagtgccagtgcaaggagaactactacaagctgctggcccaggacacctgcctgccctgtgactgcttcccccacggcagccacagcaggacctgtgacatggccaccggccagtgtgcctgcaagccaggagtgattggccggcagtgcaacagatgtgacaacccctttgctgaggtgaccaccctgggctgtgaggtgatctacaacggctgccccaaggcctttgaagctggcatctggtggccccagaccaagtttggccagcctgctgctgtgccctgccccaagggctctgtgggcaatgctgtgcgccactgcagcggggagaagggctggctgcccccagagctgttcaactgcaccaccatcagctttgtggacctgcgggccatgaatgagaagctgagcagaaatgagacccaggtggatggagcccgggccctgcagctggtgcgggccctgcggagcgccacccagcacacaggcaccctgtttggaaatgatgtgaggacagcctaccagctgctgggccacgtgctgcagcacgagagctggcagcagggctttgacctggccgccacccaggatgctgacttccatgaagatgtgatccacagcggcagcgccctgctggccccagccaccagggctgcctgggagcagatccagaggtctgagggcggcacagcccagctgctgcggcggctggagggctacttcagcaatgtggccagaaatgtgcggaggacctacctgcggccctttgtgattgtgacagccaacatgatcctggccgtggacatctttgacaagttcaacttcaccggggcccgggtgcccaggtttgacaccatccacgaggagttcccccgggagctggagagctctgtgtccttccctgctgacttcttccggcccccagaggagaaggagggccccctgctgcggcctgctggccgccgcaccaccccccagaccaccaggcctggccctggaacagagcgggaggcccccatcagcagaagaagaagacacccagatgatgctggccagtttgctgtggccctggtgatcatctaccgcaccctgggccagctgctgcctgagagatatgaccctgacagaagaagcctgcggctgccccaccggcccatcatcaacacccccatggtgtccaccctggtgtacagcgagggcgcccccctgccccggcccctggagaggcctgtgctggtggagtttgccctgctggaggtggaggagaggaccaagcctgtgtgtgtgttctggaaccacagcctggccgtgggcggcactggaggctggagcgcccggggctgtgagctgctgagcaggaacagaacccacgtggcctgccagtgcagccacacagccagctttgctgtgctgatggacatcagcagaagagaaaatggagaggtgctgcccctgaagatcgtgacctacgccgctgtgtccctgagcctggccgccctgctggtggcctttgtgctgctgagcctggtgaggatgctgcggagcaacctgcacagcatccacaagcacctggccgtggccctcttcctgagccagctggtgtttgtgattggcatcaaccagacagagaaccccttcctgtgcaccgtggtggccatcctgctgcactacatctacatgagcacctttgcctggaccctggtggagagcctgcacgtgtacaggatgctgacagaggtgaggaacatcgacaccggccccatgaggttctactacgtggtgggctggggcatcccagccatcgtgacaggcctggccgtgggcctggacccccagggctacggcaacccagacttctgctggctgagcctgcaggacaccctcatctggagctttgctggccccatcggggctgtgatcatcatcaacacagtgacctctgtgctgagcgccaaggtgtcctgccagaggaagcaccactactacggcaagaagggcatcgtgtccctgctgaggacagccttcctgctgctgctgctgatcagcgccacctggctgctgggcctgctggccgtgaacagagatgccctgtccttccactacctgtttgccatcttcagcggcctgcagggcccctttgtgctgctcttccactgtgtgctgaaccaggaggtgaggaagcacctgaagggcgtgctgggcggcaggaagctgcacctggaggacagcgccaccacccgggccaccctgctgaccaggagcctgaactgcaacaccacctttggagatggccctgacatgctgaggacagacctgggggagagcacagccagcctggacagcatcgtgagagatgagggcatccagaagctgggcgtgagcagcggcctggtgcggggcagccatggagagccagatgccagcctgatgcccaggagctgcaaggaccccccaggccatgacagcgacagcgacagcgagctgagcctggatgagcagagcagcagctatgccagcagccacagcagtgacagtgaagatgatggagtgggcgctgaggagaagtgggaccctgcccggggagctgtgcacagcacccccaagggagatgctgtggccaaccacgtgcctgctggctggccagaccagagcctggccgagagtgacagcgaggaccccagcggcaagccccggctgaaggtggagaccaaggtgtctgtggagctgcaccgggaggagcagggcagccacagaggagagtaccccccagaccaggagagcggcggggccgcccggctggccagcagccagcccccagagcagaggaagggcatcctgaagaacaaggtgacctaccccccacccctgaccctgacagagcagaccctgaagggccgcctgcgggagaagctggccgactgtgagcagagccccaccagcagcaggaccagcagcctgggcagcggcggccctgactgtgccatcaccgtgaagagccctggccgggagcccggccgggaccacctgaatggagtggccatgaatgtgaggactggaagtgcccaggctgatggcagtgacagcgagaagccctag

SEQ ID NO: 178671 - DNA, 9045 bp, Artificial Sequence
  derived and/or modified sequence
atggcccccccccccccccccgtgctgcccgtgctgctgctgctggcagccgccgcagccctgcccgctatgggacttagagcagcggcatgggaacccagagttcccggcggtactcgcgcttttgcactccgcccggggtgtacctacgcagttggagctgcttgcacaccacgcgctcccagggaactgctggatgtgggccgggacggtcgcttggccggacgaagacgcgtatcgggcgccggaaggcctctccccctccaggtccgtctagtagcacgcagcgcccccacagctctcagcagacggctgcgagctcggacccatctacccggatgcggtgctcgggcgaggttgtgcgggaccggggctaggctgtgtggggccctctgttttcccgtacccggaggatgcgctgccgcacagcattccgctctggcagcccctacgactctgcctgcatgtcgatgccctccaagaccccgacctcgatgtccagggaggccaatttgtctgcctccaggcggctcagtccgcctacgcctgctctgcgccttacgtcgagctgctggagccgtgagagttggccttgctcttgaggccgccaccgcaggaaccccatcagcatcaccttcgcctagcccgcctttgcccccaaacctgccagaagctcgggcgggccccgctcggagagcaaggcgaggaacatcaggccggggatcactcaagtttcctatgcccaattatcaggttgcactgttcgaaaacgagccagccggcacactcattctgcagctgcatgcgcactataccattgagggagaggaagagcgagtgtcttattacatggaggggcttttcgatgagcgcagccggggctatttccggatcgactcagccactggcgcagtgagcactgattcagtcttagacagggagaccaaggagactcacgtcttgagagtgaaggctgtcgactactctacccccccacgtagcgcgactacgtacattaccgtgttggtgaaagacacaaacgatcactcacctgttttcgaacaatccgaatatcgagaacgcgtccgggagaacctcgaagttggctacgaggtgttaactattcgcgcctctgacagggactccccaatcaacgccaatctgaggtatcgggtgctcggaggcgcttgggatgtctttcagttaaatgagtcatctggggtcgtgtccactcgcgctgtcctagatcgtgaggaggctgcagagtatcaactcctggtggaagccaacgaccaaggacgcaacccaggcccactgtctgccaccgccactgtctatatcgaagtggaggacgagaacgacaactacccacaattctctgaacaaaactatgttgtacaggtaccagaagacgtgggcttgaatactgccgttctgagagtacaagccactgatagggatcagggccagaatgcagcaatccactattccatcctaagcggcaacgtggccggccagttctatctacactccctttcaggaatcctggatgtgatcaatccgctcgatttcgaagatgtgcaaaaatattccctgagcattaaggcacaggatggcggacggccccccttaatcaatagttcaggggtggttagcgtgcaggtcctggatgtgaacgacaatgagccaatttttgtgagcagccccttccaggctacagtgctcgagaatgtgcccctgggctaccctgtggtgcacatccaggccgtagacgccgattctggagaaaatgcaagactccactatcgactagtcgacactgcttcgactttcctggggggcggtagcgccggcccaaagaatcccgccccaacccccgatttccccttccaaatccacaacagttccggatggatcaccgtctgtgctgaactggacagagaagaggtggaacattatagcttcggagtggaagctgtcgaccacgggtcaccacccatgtcttcctctaccagtgtcagtatcaccgtcctggatgtgaacgataacgacccagtattcacgcaacctacgtacgagctgcggctaaatgaggatgcagctgtaggatccagtgttttgacactccaagcacgcgaccgcgacgccaactccgttatcacctaccagttgaccgggggtaatacccggaacaggtttgctctgagctctcaaagggggggaggcctgatcactctcgccctaccattggattacaaacaggagcagcaatacgtacttgctgtgactgcgtccgacggcactcggtcccacactgcacatgtgctgattaacgtcaccgacgccaatactcataggcccgtgttccagtcatctcactatacagttagcgtaagtgaggacaggccagttggtactagcatcgcaaccctcagcgccaacgacgaagatacgggcgaaaatgctcgaatcacttacgtgatccaggatccagtccctcagttcagaattgaccctgactctggaacaatgtacacaatgatggagctcgactacgaaaatcaggttgcctatacgctgacaatcatggcccaggacaacgggatacctcagaagtccgataccacaaccctggaaatccttatactggacgccaatgacaatgcaccccaattcctgtgggatttctaccaggggtcaattttcgaggacgcacccccatccacgtccattcttcaggtatctgctacagacagggactcagggccaaacggtcggctgctgtatacgtttcagggaggcgacgatggcgatggagacttttacatcgaacctactagcggtgtgattcgtacccagaggagattggatagagagaacgtagccgtgtataacttatgggctctcgccgttgataggggatctcctacgcccctctcagccagtgtagagatccaggtcactattctggacattaacgataacgcgccaatgttcgaaaaggacgaactggagctgtttgttgaagaaaataatcctgtcggaagcgtggttgccaagattcgcgctaatgaccccgacgaagggccaaacgcccaaatcatgtatcagattgtggaaggcgacatgagacacttcttccagttggatctcctgaacggtgatctccgcgccatggttgaactggactttgaagtccggagagaatacgtcctggttgtacaggcaacatctgctcctctcgtctcccgggcaacagtgcacatattacttgtggatcagaatgataatccacccgtgttacctgattttcagatcctgttcaacaattacgtgacaaacaagtctaactcttttcctacaggagtcattggctgtatccccgctcacgaccccgacgtctcagactctctgaattacacgtttgtacaagggaacgagctgcggctcctcttgctcgaccctgctaccggtgaattgcagctgtccagggatcttgacaataacagaccccttgaggccctgatggaggtaagtgtgtctgacggtatccactccgtaacagcattttgcaccctccgggttaccatcatcacggacgatatgctgacaaattcgatcactgtgcggctcgaaaatatgtctcaggagaagttcctgtcacctctgctggcgctcttcgtagaaggtgtggcagctgttctcagcacgacaaaggacgatgtctttgtgttcaatgttcagaatgatactgacgtgagctccaatatactcaacgtgacttttagcgctcttctccctggtggcgtccgtgggcagttcttcccaagtgaggaccttcaggagcaaatctatctgaaccgaaccctgcttacgaccatttctactcagcgtgtgctgcctttcgacgacaatatctgtctccgtgagccttgcgaaaattatatgaaatgtgtgagcgtgctgcggttcgacagctcagccccttttctttcgtctacgacagtcctgttcaggcctatccaccccatcaacggcctgaggtgcaggtgtccccccggctttaccggggattactgcgagaccgaaatcgatctttgttactctgatccctgtggcgccaacgggagatgccgtagccgcgaggggggttatacttgtgagtgttttgaggattttaccggggagcactgcgaagtagacgcccgtagcggaaggtgcgcaaatggggtctgtaagaatggcggcacatgtgtgaacctccttatcgggggttttcactgcgtctgcccgcccggggagtacgaacgcccatattgcgaagtcaccacgcggagcttccccccacagagctttgtgaccttccgcggtctgaggcagaggttccacttcaccatcagcctcacctttgcaactcaagaaagaaatgggctcctgctgtataatggaaggttcaacgaaaaacacgatttcattgctctggagatagtcgacgagcaggttcagttgactttttccgctggcgaaaccaccaccactgtggcccccaaggtgccctccggcgtgagtgacggaagatggcactccgttcaggttcaatactacaataaaccgaatattgggcatttgggactgccccacggcccatctggggaaaagatggccgtggtgaccgtcgatgactgcgacactaccatggctgtgcgcttcggcaaggatatcggcaactatagttgcgctgcccagggcacacagacgggatctaagaagagcttagatctgacaggtcctttgttgcttggcggggtacccaaccttcctgaggattttcccgtacataaccgccagtttgtcggttgtatgcggaatctttcagtggatgggaaaaacgtggacatggccggcttcatcgcaaataatggcacaagagagggatgcgccgcacgtaggaatttttgtgacgggcgccgctgccagaacggtgggacatgcgtcaacagatggaatatgtacttatgcgagtgcccactgcgttttggcgggaagaactgcgaacaggccatgccccatccgcagttattctctggggagtcagtggtgtcgtggagtgatctgaacattataatatcagtgccttggtatttggggctcatgttccgaacacgaaaggaggactccgtcctgatggaggccacaagcgggggccccacgtcctttcgcctacagatcttgaataactacctgcagttcgaggttagtcacgggccctctgacgtcgaatcagtgatgctgtcaggtctacgcgtaaccgatggggaatggcaccacctgctgatagagctcaagaacgtcaaagaagactcagagatgaaacacctggtgaccatgacactagactatggtatggaccagaataaagccgatatcggcggcatgctacctggtctgaccgtcagatccgtggtcgtggggggggcatcagaggacaaagtgagcgtccggaggggttttcgaggttgtatgcagggggtgcgtatgggagggactccgacgaatgtagctaccctcaacatgaacaatgccttgaaagtgcgggtgaaggatggctgcgacgtagatgacccgtgcacgtctagtccatgtcctccaaattctcgctgtcacgatgcttgggaggactactcttgcgtttgcgacaaggggtacctggggatcaactgcgtcgatgcctgtcatctgaacccatgcgaaaacatgggcgcttgtgttaggtccccaggcagcccccagggttatgtctgcgaatgcggcccttcacactacggcccttactgtgaaaataagctcgacttaccctgcccaagaggctggtggggaaacccagtttgcggtccatgtcactgcgctgtcagcaaaggcttcgacccagattgtaacaagactaacggtcagtgtcagtgtaaagaaaactactacaagctgctcgcccaggatacctgcctcccatgcgattgttttccacatggaagccacagcaggacctgtgacatggcgacaggccaatgtgcatgcaagccaggtgtgatcgggagacagtgcaatcgctgtgataaccccttcgccgaagtgactactttgggctgtgaagtgatctataacgggtgcccaaaggcttttgaggccggcatttggtggcctcaaaccaaattcggccagccagcggccgtgccttgtcccaaggggagcgtaggaaacgctgtgagacattgctccggcgaaaaagggtggctgcccccagaactctttaactgcaccacaatttctttcgtggacctgagagccatgaatgagaagctgtcacgtaacgagacccaggtggacggcgcaagagcgctacagctggtgagggccctgagaagcgctacccagcacacagggacactgttcggaaatgacgtcagaactgcgtaccagctgttaggccacgtgctgcagcatgaatcctggcaacagggatttgatctggcggcgactcaggacgccgattttcatgaggacgttatacattctggctcagcgctcctggctcccgccacgcgagccgcttgggagcagatccagaggagtgaaggaggcactgcacaactgctgcgcaggctggaaggctatttctccaacgtggccagaaacgtcagacgaacgtacctaaggccgttcgtcatcgtgaccgccaacatgatactcgcagtggacatttttgataaattcaatttcacgggagcccgtgtccctaggttcgacaccatccacgaggagttccccagagaactggagtcaagcgttagcttccccgccgacttttttagaccacctgaagaaaaagaggggcccctgttgcggccagccggacgcagaaccacccctcaaacaaccaggcccgggcccggtactgagagagaagcacccatctctaggagaagacgacaccctgatgatgccgggcaatttgccgtggccctggtcattatctatagaactcttggccagttgcttccggagagatacgaccccgaccgaaggtcactgagattgcctcacaggcctatcattaacacacccatggttagtaccttggtctatagcgaaggtgctccacttccccgtccccttgagaggcccgtactagtcgagtttgctctgctcgaagtggaggaacgcacaaagcctgtgtgcgtgttttggaaccacagtctggcagtgggcggtactggcgggtggagtgcacggggctgtgaattgctttcccggaacagaacacatgtggcttgtcagtgctcacacactgcaagtttcgccgtactgatggacatttctaggcgtgagaacggggaggttctccccttgaagattgttacttatgctgccgtctccctcagcctggcagcactcctagtagccttcgtcttgttgtccctggttagaatgctgaggagcaatctccatagcatccacaagcatctggcagtggcactctttctgagccagctcgtattcgtaataggaatcaatcagaccgaaaacccgtttctgtgcaccgtggtcgcaatattactccattatatatatatgtcaacatttgcctggacacttgttgaaagtttgcacgtgtataggatgctgactgaagtgcgcaacattgatacagggccaatgcggttctactatgtcgtgggctgggggatccctgctatcgttaccggacttgccgtgggcttagatcctcagggctacggcaatccggacttttgctggcttagcctgcaggatactcttatctggtcatttgccggccccatcggcgctgtgataatcatcaacactgtgacgagcgtgctgagtgccaaggttagttgccagcgcaaacaccactactacggcaaaaagggaatcgtgagtctcctgcgaaccgccttcctgctgctcctcctgattagcgctacttggctgctcggtctcctggcagtgaaccgagacgccctaagttttcattatctgttcgccatcttcagtggattgcagggacccttcgtcttgctgttccactgcgtcttaaatcaggaggtgagaaaacacctcaagggagtgctcgggggacggaagttacatttggaagatagcgctaccaccagggctaccttgctcacacgctcactcaactgcaacactaccttcggagatgggccagacatgctccggacagatttaggcgagagcacagcatccctcgacagcatcgttcgtgacgagggcattcagaagctgggggtgtcgtctggactcgtacggggatctcatggcgaacctgatgcttctcttatgcctcgttcgtgcaaagaccctcctgggcacgatagtgatagcgattcagagctcagcttggatgaacaatcttcatcctatgcgagttctcatagcagcgacagtgaagatgacggggtgggcgctgaggaaaaatgggacccagctaggggagcagtccacagtacccccaagggcgatgccgtcgccaaccatgttccagcgggctggcctgaccagagtttggccgaaagcgactccgaagacccatctgggaagcccaggctgaaggtagaaaccaaggtatccgtggagttgcaccgtgaggagcaagggagccatcggggagaatacccaccagatcaggagtctggtggggccgcccgcctcgcatcctcccagccccccgagcagcgcaaagggatactgaagaataaggtgacatatccccccccccttaccctgacggagcagaccctcaaagggcgactgcgggagaaactagcagattgtgagcagtcccctacctcatctcgaacgtccagcttgggtagcggtggccctgattgtgcgatcactgtcaaaagccccgggagagaacccggtagggatcacttaaacggggtcgctatgaacgtaagaacaggatcagcccaggcagatggctccgactccgaaaaaccctag

SEQ ID NO: 178672 - DNA, 9045 bp, Artificial Sequence
  derived and/or modified sequence
atggcaccgcctccgcctcctgtgcttccagtgttgctgctgcttgctgccgctgcggcactcccggctatgggactgcgcgcagctgcttgggagccccgtgtgccagggggtactcgggctttcgcattgagacctggatgcacttatgctgttggggctgcctgtacacctagggcccctcgggagttgctcgatgttggacgcgatgggaggttggctgggcgtagaagagtctctggcgcaggaaggccattgcccttgcaggtgagactggtcgccagatcagctccaacagctttgtccagacgactgagagccagaacacacttaccaggctgtggggctagggcaagactgtgcggaactggggcacgcttgtgtggggctctgtgcttccctgtcccgggtggatgtgctgcagcacagcacagcgccctggctgcccctactactctccccgcttgcaggtgtcctcctagacctaggcctaggtgcccgggacgaccaatttgcctgccacccggaggctcggtgaggctgcggctgctatgcgcactgaggagagcagctggtgcagtgagagtaggtctggccctggaagcggctactgctggcacaccttccgcgtccccctccccatcaccccctctcccgccaaatttgccggaagccagagcgggtcctgcccgacgcgcaagaaggggcacctcaggccgtggctctctcaaattccctatgcccaactaccaggtcgccctgttcgagaatgagcctgccggtactctgatcttacagctgcatgcccactataccatcgaaggagaggaggaacgtgtcagctattacatggaaggcctgttcgacgagagatcccgcggttatttccgcattgacagcgccaccggtgctgtcagcaccgatagtgtgctggacagagaaactaaggagacccacgtgttgcgagtgaaggccgtggattattccaccccacctaggagtgcaacgacatatataaccgtgttggtgaaggacaccaatgatcatagcccagtctttgaacagtcggaataccgggagcgtgttcgggagaatctggaggtggggtatgaagtgcttaccatccgagcctctgacagggattcaccaattaacgctaatctaaggtacagggtgctggggggagcatgggacgtcttccaactgaacgaaagttccggtgtggtttccacacgcgctgtactcgaccgagaggaggctgcggaatatcagcttctcgtggaggcaaatgatcagggacgcaatcctgggcctttgtcagccacagccaccgtgtacatagaggtggaggatgaaaatgacaactacccacagtttagcgaacagaactacgttgttcaggtgcccgaagacgtcggactgaacacggccgtgcttcgcgtccaggcgaccgaccgcgatcagggccagaatgccgctatccactattcaattttatcaggcaatgttgctggacagttttatctgcatagcctctccggtattcttgacgtaatcaacccactcgacttcgaggacgtgcaaaaatactccttgtctatcaaggctcaagacgggggaagacccccactcatcaactcgtcaggagtggtcagcgtgcaggtgttggatgtcaacgataatgagccaattttcgtcagctccccctttcaggcaaccgtactggagaacgttccacttggataccccgtggtgcacatacaggccgttgatgccgactccggggaaaatgcccgactgcattatagactggtggataccgcatcgactttcctcggcggtggatctgccggtcctaaaaaccccgctccaacgccagactttcccttccagatccacaactcaagtggttggattactgtctgtgccgagctggatagggaggaggtggaacattattctttcggcgttgaagcagtggatcacggaagccctccgatgtccagcagcactagtgtcagcatcacagtcctggacgtgaacgacaatgatcccgtgtttactcagcctacctacgagctaagattaaacgaggatgcagccgtcggatcttccgttctcacacttcaagcacgtgaccgcgacgctaactctgtgatcacataccagttgacaggcggtaacaccagaaaccggtttgccctcagctcccagcgcggtgggggactgattacgctggctctgcccctggactacaaacaggagcagcaatacgtattagctgtgacggccagcgacgggactcgctcacatacagctcacgtacttatcaatgtgactgatgccaatacccatcgtcccgtctttcaatcgtctcactatacagtaagcgttagtgaagacagaccggtagggactagcatcgccacactgtcagcaaacgacgaagacactggagaaaacgctcgcattacatatgtgatccaggacccagtcccgcagttcagaatagatccagacagtggaactatgtataccatgatggagttggactatgagaaccaggtggcctacacactgactataatggctcaggacaacggcatcccccagaagagcgacaccactaccctggagatcctgatcctggatgccaatgacaatgccccacagtttctgtgggacttctaccagggctctatcttcgaggatgcccctccctccacatcaatcctgcaagtttcagctactgacagagatagcggacctaatggcaggttgctgtacacttttcaaggaggcgatgacggagatggcgacttctatatcgaacctactagtggggttattcgcacacagaggcgtctggacagggagaatgttgctgtatacaacctttgggccctggccgtggaccgcggttcaccaacacccttatcagcttcagtcgaaattcaggtgacgattctcgatattaatgacaatgcacctatgtttgagaaggacgaattggagctgttcgtggaagagaacaaccccgtcggctcagtggtagcgaaaattcgggctaacgatcccgacgaaggacctaatgcccagataatgtatcagatcgtggaaggagacatgcgtcacttcttccagctcgaccttctaaacggggatctgcgggctatggtggaactagattttgaagtgaggcgggaatatgttctggtggtacaggctaccagtgcccctctggtaagtcgcgcaactgtccatatcctattggtggaccagaacgacaacccccctgtgcttccggatttccaaatcctcttcaataactacgtaacaaacaagtctaactcctttcccacgggagtcatcggctgcatacctgcccacgacccagacgtctctgattccctgaattatacattcgtgcagggtaatgagctgcggctcctactgttggacccagccaccggcgagcttcagttatcacgggacctggacaataacagacctctggaggccttaatggaggtgtctgtgagcgacggaatccactccgtgaccgccttctgtactctgagggtgaccattataacagacgacatgctgactaacagcatcacggtgcggctggaaaacatgtctcaggagaagttcttaagtccactactggccctgttcgtcgagggggtggccgcagttctgagcacaaccaaggatgatgtgtttgtgtttaatgtgcagaacgacacagatgtgtcatcgaatatcctgaacgtgaccttcagcgctctcctacctggcggagttcgcggtcagttttttccgtcagaagacctccaagaacagatctatcttaacagaactctgctgacaactatttccactcaaagagtgttgccattcgacgataacatatgcctgcgcgaaccatgcgaaaactatatgaagtgtgtttcagtgctgaggttcgacagctcagctcctttccttagctcaacaacggtgctcttcagacctatccatcccatcaacgggttgaggtgtaggtgcccaccgggttttaccggtgattattgcgagacagagatcgatctatgttacagcgacccatgcggcgctaatgggaggtgtcggtcccgtgaaggagggtacacttgcgaatgctttgaagactttactggcgagcactgcgaagtagatgccagaagcggccgatgtgcaaatggagtgtgtaagaacggcggaacctgcgtcaacctccttatagggggatttcactgcgtgtgtccacccggagagtatgagcgcccttactgcgaggtgactacaaggtcattcccccctcaaagcttcgtcacttttcggggactccgccagcggttccactttacaatctcattgacatttgccacccaagagcgcaatggcctgctcctgtataatggcagatttaatgagaaacatgactttatagcactagagattgtggatgaacaggttcagttaaccttcagtgccggagaaaccaccaccacagttgccccaaaggttccgagcggtgttagcgacggacgctggcactcagtgcaggttcagtactacaataagcccaacattgggcacctggggttgccccatggaccgtccggggagaaaatggcagttgtgaccgttgacgactgtgacactaccatggccgttcgatttggaaaagacataggcaactacagttgcgctgcccagggcacccagaccggaagtaagaagagtctcgaccttacaggacctctcttacttgggggtgtccccaacctacccgaagacttccccgtacacaatagacaattcgtagggtgcatgaggaacctctctgtcgacggtaagaacgtcgatatggccggatttatagccaacaacgggactagggagggctgtgccgctcggaggaatttttgtgacggcaggagatgccagaatgggggaacgtgtgtaaaccggtggaacatgtatttgtgtgaatgcccactgcgcttcggcggaaaaaattgcgagcaagccatgcctcatcctcagttattttcaggcgagagcgtggtgtcttggagcgatctaaatataatcattagtgtaccttggtaccttggcctaatgtttcggacaaggaaggaagattctgtactgatggaagctaccagcggcggaccaacatcattccgcctgcagatacttaataactatctccaattcgaagttagccatggtccttccgatgtagaatcggtgatgctgtcgggcttgcgggtgaccgacggggaatggcatcatcttctaatagagttgaaaaacgttaaagaggactccgaaatgaaacaccttgttaccatgaccttagactatggaatggatcagaacaaggcggacattgggggaatgctgccagggctgacagtgcgatcagtggtggttggcggtgcctccgaagacaaggtgagcgtaagaagaggattcagaggttgcatgcagggagtgcggatgggcggtacccccactaacgtggcgaccttaaacatgaacaacgcgctcaaggtccgggtgaaagacgggtgtgacgtcgacgacccttgcacatctagtccatgcccacctaacagccgttgccacgatgcatgggaggactattcatgcgtttgtgacaaggggtacttaggcatcaactgtgtggacgcctgtcacctcaatccgtgtgagaacatgggagcttgcgtgaggtcacctggctcccctcaaggatacgtgtgtgaatgtggtccctcacattacggaccctactgtgagaacaaattggacctcccctgtcctagaggttggtggggtaatcccgtgtgcggcccatgccattgcgctgtaagtaagggctttgatccggattgcaataagacaaacggacagtgtcagtgcaaagagaattattacaagttactggcccaggatacttgcctcccatgcgattgctttccgcacgggtcacacagtcgaacgtgtgacatggctacaggccaatgtgcgtgcaaaccgggtgtgattggcagacaatgcaaccgttgtgacaacccttttgcagaggttacaacccttggctgcgaggttatatacaacgggtgcccgaaggccttcgaggccggtatatggtggccccaaacgaagtttgggcaaccagctgcagtgccgtgtcccaagggatccgtgggtaacgccgtgcgacactgtagtggcgaaaaaggctggttgcccccagagttatttaactgcactacaattagctttgtggatctgagggccatgaatgagaagttaagcaggaatgagactcaggttgatggcgctcgcgcattgcagctcgtccgcgcattgcgctccgcgacccagcatactggcacgttgtttgggaacgacgtaagaacggcctaccagctcctgggccatgtgctccagcacgagagctggcaacagggttttgatctggcagctacccaggacgccgattttcacgaggatgtgatacattctggctccgccttgctggcgcctgctacccgagccgcttgggaacagatccagcgttctgaagggggtacagcacagcttctgaggcgcttggaaggctacttttctaacgtggctaggaacgtgcgtcggacctacctcagaccattcgtaatagttaccgccaacatgatcctcgccgtcgacattttcgataagtttaattttacaggcgcacgtgttccgaggttcgataccatccacgaagaatttcctcgagaactcgagtcctctgtgagtttccccgctgacttcttccgtccccctgaagagaaggagggccctctactgcgacccgcaggcagaagaactacaccccagaccacccgccctggcccagggacagaacgggaggctcctatcagtcggagacgcaggcatcccgatgatgccggacagttcgcagtggcgctggtaatcatttatcgcaccctcggccaactattgcccgagcgctacgatcccgacaggaggtcactccggttgccacacagacctataatcaacactcccatggtctccacgcttgtatacagcgaaggtgctccactaccgcgacccctcgaacggccagtgctcgtggaattcgctcttctggaggtggaggaacggacgaagccagtctgtgtgttttggaaccactcactggcagtcggcggtaccgggggatggtctgctagaggctgcgagctgctgtcacggaataggactcacgttgcctgtcagtgtagccacaccgctagtttcgccgttctcatggatatttctagaagggaaaatggggaagtacttcctctgaaaattgtcacatacgccgctgtttctctgagcctcgcagccctcttagtcgcctttgtcctgctatccttagtacgcatgctgagatccaacctccattccatccataagcacttggccgtggcgctttttctgtcacagctggtgttcgtgattggaatcaatcagactgaaaacccttttctatgcaccgtggtggccatcttgctgcactatatttatatgtccactttcgcctggacactggtcgagagcctgcatgtgtacagaatgttaaccgaagtgcggaacatcgacaccgggccaatgcgtttttattatgtggtggggtgggggatcccggctattgttacagggctggcagtcggtctggatccccagggctatgggaacccggacttttgctggctgtccctccaagatactctgatctggagtttcgccggacctattggcgcagtgataataatcaatactgtcacatccgtgctgtcagctaaggtatcctgccagcgcaagcaccattattacggaaagaagggaatcgtgtctttgctacggaccgcttttttgttgctgctgctgattagcgccacctggttgctgggcctgttggccgtgaaccgcgacgcgttgtcctttcactacctgtttgcaatcttttccggccttcagggacctttcgtcttgctgttccactgtgtgctcaaccaggaggtgcgtaaacacctgaagggcgttctgggcggtcgcaaattgcatcttgaagactccgccactacccgcgcaacactgttgacaaggagtctcaattgtaacacaacattcggagacgggcctgatatgctacgcactgacctcggggaaagcaccgcgtcgctggattccatcgtccgagacgagggcatccagaagctgggagtgagcagtgggctcgttcggggatctcacggagagcctgatgcatccctcatgcccagatcttgtaaggatcctcctggacatgactcggactctgacagcgagcttagccttgacgagcagtcttcgtcctacgcgagttcacatagctctgactcagaagatgatggggtgggcgcagaagaaaagtgggacccagccagaggggctgtccactcgacacctaaaggtgatgctgtggccaaccacgttccagcaggctggcctgatcaaagcctggctgaatcggacagcgaagacccaagcgggaagcctagactgaaagtcgagactaaagtctctgtcgagctccatcgagaggaacaaggctcacatagaggggagtatccacccgaccaggagagtggaggagccgctagactggcctcatctcagccgccagaacagaggaaaggcatattaaagaataaagtgacatatcctcccccactcactcttaccgaacaaacgctgaaggggcgtcttcgggaaaagctggccgactgtgagcagagccctacctctagtaggacgagttctctgggatcaggaggcccagattgcgctattactgtcaaatcccccggacgggagccgggaagggaccatttgaacggtgttgctatgaatgtccggaccggcagtgcccaggccgacggcagtgactccgagaagccatag

SEQ ID NO: 178673 - DNA, 11389 bp, Artificial Sequence
  derived and/or modified sequence
atggcgccgccgccgccgcccgtgctgcccgtgctgctgctcctggccgccgccgccgccctgccggcgatggggctgcgagcggccgcctgggagccgcgcgtacccggcgggacccgcgccttcgccctccggcccggctgtacctacgcggtgggcgccgcttgcacgccccgggcgccgcgggagctgctggacgtgggccgcgatgggcggctggcaggacgtcggcgcgtctcgggcgcggggcgcccgctgccgctgcaagtccgcttggtggcccgcagtgccccgacggcgctgagccgccgcctgcgggcgcgcacgcaccttcccggctgcggagcccgtgcccggctctgcggaaccggtgcccggctctgcggggcgctctgcttccccgtccccggcggctgcgcggccgcgcagcattcggcgctcgcagctccgaccaccttacccgcctgccgctgcccgccgcgccccaggccccgctgtcccggccgtcccatctgcctgccgccgggcggctcggtccgcctgcgtctgctgtgcgccctgcggcgcgcggctggcgccgtccgggtgggactggcgctggaggccgccaccgcggggacgccctccgcgtcgccatccccatcgccgcccctgccgccgaacttgcccgaagcccgggcggggccggcgcgacgggcccggcggggcacgagcggcagagggagcctgaagtttccgatgcccaactaccaggtggcgttgtttgagaacgaaccggcgggcaccctcatcctccagctgcacgcgcactacaccatcgagggcgaggaggagcgcgtgagctattacatggaggggctgttcgacgagcgctcccggggctacttccgaatcgactctgccacgggcgccgtgagcacggacagcgtactggaccgcgagaccaaggagacgcacgtcctcagggtgaaagccgtggactacagtacgccgccgcgctcggccaccacctacatcactgtcttggtcaaagacaccaacgaccacagcccggtcttcgagcagtcggagtaccgcgagcgcgtgcgggagaacctggaggtgggctacgaggtgctgaccatccgcgccagcgaccgcgactcgcccatcaacgccaacttgcgttaccgcgtgttggggggcgcgtgggacgtcttccagctcaacgagagctctggcgtggtgagcacacgggcggtgctggaccgggaggaggcggccgagtaccagctcctggtggaggccaacgaccaggggcgcaatccgggcccgctcagtgccacggccaccgtgtacatcgaggtggaggacgagaacgacaactacccccagttcagcgagcagaactacgtggtccaggtgcccgaggacgtggggctcaacacggctgtgctgcgagtgcaggccacggaccgggaccagggccagaacgcggccattcactacagcatcctcagcgggaacgtggccggccagttctacctgcactcgctgagcgggatcctggatgtgatcaaccccttggatttcgaggatgtccagaaatactcgctgagcattaaggcccaggatgggggccggcccccgctcatcaattcttcaggggtggtgtctgtgcaggtgctggatgtcaacgacaacgagcctatctttgtgagcagccccttccaggccacggtgctggagaatgtgcccctgggctaccccgtggtgcacattcaggcggtggacgcggactctggagagaacgcccggctgcactatcgcctggtggacacggcctccacctttctggggggcggcagcgctgggcctaagaatcctgcccccacccctgacttccccttccagatccacaacagctccggttggatcacagtgtgtgccgagctggaccgcgaggaggtggagcactacagcttcggggtggaggcggtggaccacggctcgccccccatgagctcctccaccagcgtgtccatcacggtgctggacgtgaatgacaacgacccggtgttcacgcagcccacctacgagcttcgtctgaatgaggatgcggccgtggggagcagcgtgctgaccctgcaggcccgcgaccgtgacgccaacagtgtgattacctaccagctcacaggcggcaacacccggaaccgctttgcactcagcagccagagagggggcggcctcatcaccctggcgctacctctggactacaagcaggagcagcagtacgtgctggcggtgacagcatccgacggcacacggtcgcacactgcgcatgtcctaatcaacgtcactgatgccaacacccacaggcctgtctttcagagctcccattacacagtgagtgtcagtgaggacaggcctgtgggcacctccattgctaccctcagtgccaacgatgaggacacaggagagaatgcccgcatcacctacgtgattcaggaccccgtgccgcagttccgcattgaccccgacagtggcaccatgtacaccatgatggagctggactatgagaaccaggtcgcctacacgctgaccatcatggcccaggacaacggcatcccgcagaaatcagacaccaccaccctagagatcctcatcctcgatgccaatgacaatgcaccccagttcctgtgggatttctaccagggttccatctttgaggatgctccaccctcgaccagcatcctccaggtctctgccacggaccgggactcaggtcccaatgggcgtctgctgtacaccttccagggtggggacgacggcgatggggacttctacatcgagcccacgtccggtgtgattcgcacccagcgccggctggaccgggagaatgtggccgtgtacaacctttgggctctggctgtggatcggggcagtcccactccccttagcgcctcggtagaaatccaggtgaccatcttggacattaatgacaatgcccccatgtttgagaaggacgaactggagctgtttgttgaggagaacaacccagtggggtcggtggtggcaaagattcgtgctaacgaccctgatgaaggccctaatgcccagatcatgtatcagattgtggaaggggacatgcggcatttcttccagctggacctgctcaacggggacctgcgtgccatggtggagctggactttgaggtccggcgggagtatgtgctggtggtgcaggccacgtcggctccgctggtgagccgagccacggtgcacatccttctcgtggaccagaatgacaacccgcctgtgctgcccgacttccagatcctcttcaacaactatgtcaccaacaagtccaacagtttccccaccggcgtgatcggctgcatcccggcccatgaccccgacgtgtcagacagcctcaactacaccttcgtgcagggcaacgagctgcgcctgttgctgctggaccccgccacgggcgaactgcagctcagccgcgacctggacaacaaccggccgctggaggcgctcatggaggtgtctgtgtctgatggcatccacagcgtcacggccttctgcaccctgcgtgtcaccatcatcacggacgacatgctgaccaacagcatcactgtccgcctggagaacatgtcccaggagaagttcctgtccccgctgctggccctcttcgtggagggggtggccgccgtgctgtccaccaccaaggacgacgtcttcgtcttcaacgtccagaacgacaccgacgtcagctccaacatcctgaacgtgaccttctcggcgctgctgcctggcggcgtccgcggccagttcttcccgtcggaggacctgcaggagcagatctacctgaatcggacgctgctgaccaccatctccacgcagcgcgtgctgcccttcgacgacaacatctgcctgcgcgagccctgcgagaactacatgaagtgcgtgtccgttctgcgattcgacagctccgcgcccttcctcagctccaccaccgtgctcttccggcccatccaccccatcaacggcctgcgctgccgctgcccgcccggcttcaccggcgactactgcgagacggagatcgacctctgctactccgacccgtgcggcgccaacggccgctgccgcagccgcgagggcggctacacctgcgagtgcttcgaggacttcactggagagcactgtgaggtggatgcccgctcaggccgctgtgccaacggggtgtgcaagaacgggggcacctgcgtgaacctgctcatcggcggcttccactgcgtgtgtcctcctggcgagtatgagaggccctactgtgaggtgaccaccaggagcttcccgccccagtccttcgtcaccttccggggcctgagacagcgcttccacttcaccatctccctcacgtttgccactcaggaaaggaacggcttgcttctctacaacggccgcttcaatgagaagcacgacttcatcgccctggagatcgtggacgagcaggtgcagctcaccttctctgcaggcgagacaacaacgaccgtggcaccgaaggttcccagtggtgtgagtgacgggcggtggcactctgtgcaggtgcagtactacaacaagcccaatattggccacctgggcctgccccatgggccgtccggggaaaagatggccgtggtgacagtggatgattgtgacacaaccatggctgtgcgctttggaaaggacatcgggaactacagctgcgctgcccagggcactcagaccggctccaagaagtccctggatctgaccggccctctactcctggggggtgtccccaacctgccagaagacttcccagtgcacaaccggcagttcgtgggctgcatgcggaacctgtcagtcgacggcaaaaatgtggacatggccggattcatcgccaacaatggcacccgggaaggctgcgctgctcggaggaacttctgcgatgggaggcggtgtcagaatggaggcacctgtgtcaacaggtggaatatgtatctgtgtgagtgtccactccgattcggcgggaagaactgtgagcaagccatgcctcacccccagctcttcagcggtgagagcgtcgtgtcctggagtgacctgaacatcatcatctctgtgccctggtacctggggctcatgttccggacccggaaggaggacagcgttctgatggaggccaccagtggtgggcccaccagctttcgcctccagatcctgaacaactacctccagtttgaggtgtcccacggcccctccgatgtggagtccgtgatgctgtccgggttgcgggtgaccgacggggagtggcaccacctgctgatcgagctgaagaatgttaaggaggacagtgagatgaagcacctggtcaccatgaccttggactatgggatggaccagaacaaggcagatatcgggggcatgcttcccgggctgacggtaaggagcgtggtggtcggaggcgcctctgaagacaaggtctccgtgcgccgtggattccgaggctgcatgcagggagtgaggatgggggggacgcccaccaacgtcgccaccctgaacatgaacaacgcactcaaggtcagggtgaaggacggctgtgatgtggacgacccctgtacctcgagcccctgtccccccaatagccgctgccacgacgcctgggaggactacagctgcgtctgtgacaaagggtaccttggaataaactgtgtggatgcctgtcacctgaacccctgcgagaacatgggggcctgcgtgcgctcccccggctccccgcagggctacgtgtgcgagtgtgggcccagtcactacgggccgtactgtgagaacaaactcgaccttccgtgccccagaggctggtgggggaaccccgtctgtggaccctgccactgtgccgtcagcaaaggctttgatcccgactgtaataagaccaacggccagtgccaatgcaaggagaattactacaagctcctagcccaggacacctgtctgccctgcgactgcttcccccatggctcccacagccgcacttgcgacatggccaccgggcagtgtgcctgcaagcccggcgtcatcggccgccagtgcaaccgctgcgacaacccgtttgccgaggtcaccacgctcggctgtgaagtgatctacaatggctgtcccaaagcatttgaggccggcatctggtggccacagaccaagttcgggcagccggctgcggtgccatgccctaagggatccgttggaaatgcggtccgacactgcagcggggagaagggctggctgcccccagagctctttaactgtaccaccatctccttcgtggacctcagggccatgaatgagaagctgagccgcaatgagacgcaggtggacggcgccagggccctgcagctggtgagggcgctgcgcagtgctacacagcacacgggcacgctctttggcaatgacgtgcgcacggcctaccagctgctgggccacgtccttcagcacgagagctggcagcagggcttcgacctggcagccacgcaggacgccgactttcacgaggacgtcatccactcgggcagcgccctcctggccccagccaccagggcggcgtgggagcagatccagcggagcgagggcggcacggcacagctgctccggcgcctcgagggctacttcagcaacgtggcacgcaacgtgcggcggacgtacctgcggcccttcgtcatcgtcaccgccaacatgattcttgctgtcgacatctttgacaagttcaactttacgggagccagggtcccgcgattcgacaccatccatgaagagttccccagggagctggagtcctccgtctccttcccagccgacttcttcagaccacctgaagaaaaagaaggccccctgctgaggccggctggccggaggaccaccccgcagaccacgcgcccggggcctggcaccgagagggaggccccgatcagcaggcggaggcgacaccctgatgacgctggccagttcgccgtcgctctggtcatcatttaccgcaccctggggcagctcctgcccgagcgctacgaccccgaccgtcgcagcctccggttgcctcaccggcccatcattaataccccgatggtgagcacgctggtgtacagcgagggggctccgctcccgagacccctggagaggcccgtcctggtggagttcgccctgctggaggtggaggagcgaaccaagcctgtctgcgtgttctggaaccactccctggccgttggtgggacgggagggtggtctgcccggggctgcgagctcctgtccaggaaccggacacatgtcgcctgccagtgcagccacacagccagctttgcggtgctcatggatatctccaggcgtgagaacggggaggtcctgcctctgaagattgtcacctatgccgctgtgtccttgtcactggcagccctgctggtggccttcgtcctcctgagcctggtccgcatgctgcgctccaacctgcacagcattcacaagcacctcgccgtggcgctcttcctctctcagctggtgttcgtgattgggatcaaccagacggaaaacccgtttctgtgcacagtggttgccatcctcctccactacatctacatgagcacctttgcctggaccctcgtggagagcctgcatgtctaccgcatgctgaccgaggtgcgcaacatcgacacggggcccatgcggttctactacgtcgtgggctggggcatcccggccattgtcacaggactggcggtcggcctggacccccagggctacgggaaccccgacttctgctggctgtcgcttcaagacaccctgatttggagctttgcggggcccatcggagctgttataatcatcaacacagtcacttctgtcctatctgcaaaggtttcctgccaaagaaagcaccattattatgggaaaaaagggatcgtctccctgctgaggaccgcattcctcctgctgctgctcatcagcgccacctggctgctggggctgctggctgtgaaccgcgatgcactgagctttcactacctcttcgccatcttcagcggcttacagggccccttcgtcctccttttccactgcgtgctcaaccaggaggtccggaagcacctgaagggcgtgctcggcgggaggaagctgcacctggaggactccgccaccaccagggccaccctgctgacgcgctccctcaactgcaacaccaccttcggtgacgggcctgacatgctgcgcacagacttgggcgagtccaccgcctcgctggacagcatcgtcagggatgaagggatccagaagctcggcgtgtcctctgggctggtgaggggcagccacggagagccagacgcgtccctcatgcccaggagctgcaaggatccccctggccacgattccgactcagatagcgagctgtccctggatgagcagagcagctcttacgcctcctcacactcgtcagacagcgaggacgatggggtgggagctgaggaaaaatgggacccggccaggggcgccgtccacagcacccccaaaggggacgctgtggccaaccacgttccggccggctggcccgaccagagcctggctgagagtgacagtgaggaccccagcggcaagccccgcctgaaggtggagaccaaggtcagcgtggagctgcaccgcgaggagcagggcagtcaccgtggagagtaccccccggaccaggagagcgggggcgcagccaggcttgctagcagccagcccccagagcagaggaaaggcatcttgaaaaataaagtcacctacccgccgccgctgacgctgacggagcagacgctgaagggccggctccgggagaagctggccgactgtgagcagagccccacatcctcgcgcacgtcttccctgggctctggcggccccgactgcgccatcacagtcaagagccctgggagggagccggggcgtgaccacctcaacggggtggccatgaatgtgcgcactgggagcgcccaggccgatggctccgactctgagaaaccgtgaggcaagcccgtcaccccacacaggctgcggcatcaccctcagaccttggagcccaaggggccactgcccttgaagtggagtgggcccagagtgtggcggtccccatggtggcagccccccgactgatcatccagacacaaaggtcttggttctcccaggagctcagggcctgtcagacctggtgacaagtgccaaaggccacaggcatgagggaggcgtggaccactgggccagcaccgctgagtcctaagactgcagtcaaagccagaactgagaggggaccccagactgggcccagaggctggccagagttcaggaacgccgggcacagaccaaagaccgcggtccagccccgcccaggcgggcatctcatggcagtgcggacccgtggctggcagcccgggcagtcctttgcaaaggcaccccttgtcttaaaatcacttcgctatgtgggaaaggtggagatacttttatatatttgtatgggactctgaggaggtgcaacctgtatatatattgcattcgtgctgactttgttatcccgagagatccatgcaatgatctcttgctgtcttctctgtcaagattgcacagttgtacttgaatctggcatgtgttgacgaaactggtgccccagcagatcaaaggtgggaaatacgtcagcagtggggctaaaaccaagcggctagaagccctacagctgccttcggccaggaagtgaggatggtgtgggccctccccgccggccccctgggtccccagtgttcgctgtgtgtgcgtttgtcctctgctgccatctgccccggctgtgtgaattcaagacagggcagtgcagcactaggcaggtgtgaggagccctgctgaggtcactgtggggcacggttgccacacggctgtcatttttcacctggtcattctgtgaccaccaccccctcccctcaccgcctcccaggtggcccgggagctgcaggtggggatggctttgtcctttgctcctgctccccgtgggacctgggaccttaaagcgttgcaggttcctgatttggacagaggtgtggggccttccaggccgttacatacctcctgccaattctctaactctctgagactgcgaggatctccaggcagggttctcccctctggagtctgaccaattacttcattttgcttcaaatggccaattgtgcagagggacaaagccacagccacactcttcaacggttaccaaactgtttttggaaattcacaccaaggtcgggcccactgcaggcagctggcacagcgtggcccgaggggctgtggaacgggtcccggaactgtcagacatgtttgattttagcgtttcctttgttcttcaaatcaggtgcccaaataagtgatcagcacagctgcttccaaataggagaaaccataaaataggatgaaaatcaagtaaaatgcaaagatgtccacactgttttaaacttgaccctgatgaaaatgtgagcactgttagcagatgcctatgggagaggaaaagcgtatctgaaaatggtccaggacaggaggatgaaatgagatcccagagtcctcacacctgaatgaattatacatgtgccttaccaggtgagtggtctttcgaagataaaaaactctagtccctttaaacgtttgcccctggcgtttcctaagtacgaaaaggtttttaagtcttcgaacagtctcctttcatgactttaacaggattctgccccctgaggtgtaatttttttgttctatttttttccacgtactccacagccaacatcacgaggtgtaatttttaatttgatcagaactgttaccaaaaaacaactgtcagttttattgagatgggaaaaatgtaaacctatttttattacttaagactttatgggagagattagacactggaggtttttaacagaacgtgtatttattaatgttcaaaacactggaattacaaatgagaagagtctacaataaattaagatttttgaatttgtacttctgcggtgctggtttttctccacaaacacccccgcccctccccatgcccagggtggccgtggaagggacggtttacggacgtgcagctgagctgtccgtgtcccatgctccctcagccagtggaacgtgccggaactttttgtccattccctagtaggcctgccacagcctagatgggcagtttttgtctttcaccaaatttgaggactttttttttttgccattatttcttcagttttcttttcttgcactgatctttctcctctccttctgtgactccagtgactcagacgttagacctcttgatgttttcccactggtccctgaggctctgttc

SEQ ID NO: 178674 - DNA, 9045 bp, Artificial Sequence
  derived and/or modified sequence
atggcccccccccccccccccgtgctgcccgtgctgctgctgctggccgccgccgccgccctgcccgccatgggcctgagagccgccgcctgggagcccagagtgcccggcggcaccagagccttcgccctgagacccggctgcacctacgccgtgggcgccgcctgcacccccagagcccccagagagctgctggacgtgggcagagacggcagactggccggcagaagaagagtgagcggcgccggcagacccctgcccctgcaggtgagactggtggccagaagcgcccccaccgccctgagcagaagactgagagccagaacccacctgcccggctgcggcgccagagccagactgtgcggcaccggcgccagactgtgcggcgccctgtgcttccccgtgcccggcggctgcgccgccgcccagcacagcgccctggccgcccccaccaccctgcccgcctgcagatgcccccccagacccagacccagatgccccggcagacccatctgcctgccccccggcggcagcgtgagactgagactgctgtgcgccctgagaagagccgccggcgccgtgagagtgggcctggccctggaggccgccaccgccggcacccccagcgccagccccagccccagcccccccctgccccccaacctgcccgaggccagagccggccccgccagaagagccagaagaggcaccagcggcagaggcagcctgaagttccccatgcccaactaccaggtggccctgttcgagaacgagcccgccggcaccctgatcctgcagctgcacgcccactacaccatcgagggcgaggaggagagagtgagctactacatggagggcctgttcgacgagagaagcagaggctacttcagaatcgacagcgccaccggcgccgtgagcaccgacagcgtgctggacagagagaccaaggagacccacgtgctgagagtgaaggccgtggactacagcaccccccccagaagcgccaccacctacatcaccgtgctggtgaaggacaccaacgaccacagccccgtgttcgagcagagcgagtacagagagagagtgagagagaacctggaggtgggctacgaggtgctgaccatcagagccagcgacagagacagccccatcaacgccaacctgagatacagagtgctgggcggcgcctgggacgtgttccagctgaacgagagcagcggcgtggtgagcaccagagccgtgctggacagagaggaggccgccgagtaccagctgctggtggaggccaacgaccagggcagaaaccccggccccctgagcgccaccgccaccgtgtacatcgaggtggaggacgagaacgacaactacccccagttcagcgagcagaactacgtggtgcaggtgcccgaggacgtgggcctgaacaccgccgtgctgagagtgcaggccaccgacagagaccagggccagaacgccgccatccactacagcatcctgagcggcaacgtggccggccagttctacctgcacagcctgagcggcatcctggacgtgatcaaccccctggacttcgaggacgtgcagaagtacagcctgagcatcaaggcccaggacggcggcagaccccccctgatcaacagcagcggcgtggtgagcgtgcaggtgctggacgtgaacgacaacgagcccatcttcgtgagcagccccttccaggccaccgtgctggagaacgtgcccctgggctaccccgtggtgcacatccaggccgtggacgccgacagcggcgagaacgccagactgcactacagactggtggacaccgccagcaccttcctgggcggcggcagcgccggccccaagaaccccgcccccacccccgacttccccttccagatccacaacagcagcggctggatcaccgtgtgcgccgagctggacagagaggaggtggagcactacagcttcggcgtggaggccgtggaccacggcagcccccccatgagcagcagcaccagcgtgagcatcaccgtgctggacgtgaacgacaacgaccccgtgttcacccagcccacctacgagctgagactgaacgaggacgccgccgtgggcagcagcgtgctgaccctgcaggccagagacagagacgccaacagcgtgatcacctaccagctgaccggcggcaacaccagaaacagattcgccctgagcagccagagaggcggcggcctgatcaccctggccctgcccctggactacaagcaggagcagcagtacgtgctggccgtgaccgccagcgacggcaccagaagccacaccgcccacgtgctgatcaacgtgaccgacgccaacacccacagacccgtgttccagagcagccactacaccgtgagcgtgagcgaggacagacccgtgggcaccagcatcgccaccctgagcgccaacgacgaggacaccggcgagaacgccagaatcacctacgtgatccaggaccccgtgccccagttcagaatcgaccccgacagcggcaccatgtacaccatgatggagctggactacgagaaccaggtggcctacaccctgaccatcatggcccaggacaacggcatcccccagaagagcgacaccaccaccctggagatcctgatcctggacgccaacgacaacgccccccagttcctgtgggacttctaccagggcagcatcttcgaggacgccccccccagcaccagcatcctgcaggtgagcgccaccgacagagacagcggccccaacggcagactgctgtacaccttccagggcggcgacgacggcgacggcgacttctacatcgagcccaccagcggcgtgatcagaacccagagaagactggacagagagaacgtggccgtgtacaacctgtgggccctggccgtggacagaggcagccccacccccctgagcgccagcgtggagatccaggtgaccatcctggacatcaacgacaacgcccccatgttcgagaaggacgagctggagctgttcgtggaggagaacaaccccgtgggcagcgtggtggccaagatcagagccaacgaccccgacgagggccccaacgcccagatcatgtaccagatcgtggagggcgacatgagacacttcttccagctggacctgctgaacggcgacctgagagccatggtggagctggacttcgaggtgagaagagagtacgtgctggtggtgcaggccaccagcgcccccctggtgagcagagccaccgtgcacatcctgctggtggaccagaacgacaacccccccgtgctgcccgacttccagatcctgttcaacaactacgtgaccaacaagagcaacagcttccccaccggcgtgatcggctgcatccccgcccacgaccccgacgtgagcgacagcctgaactacaccttcgtgcagggcaacgagctgagactgctgctgctggaccccgccaccggcgagctgcagctgagcagagacctggacaacaacagacccctggaggccctgatggaggtgagcgtgagcgacggcatccacagcgtgaccgccttctgcaccctgagagtgaccatcatcaccgacgacatgctgaccaacagcatcaccgtgagactggagaacatgagccaggagaagttcctgagccccctgctggccctgttcgtggagggcgtggccgccgtgctgagcaccaccaaggacgacgtgttcgtgttcaacgtgcagaacgacaccgacgtgagcagcaacatcctgaacgtgaccttcagcgccctgctgcccggcggcgtgagaggccagttcttccccagcgaggacctgcaggagcagatctacctgaacagaaccctgctgaccaccatcagcacccagagagtgctgcccttcgacgacaacatctgcctgagagagccctgcgagaactacatgaagtgcgtgagcgtgctgagattcgacagcagcgcccccttcctgagcagcaccaccgtgctgttcagacccatccaccccatcaacggcctgagatgcagatgcccccccggcttcaccggcgactactgcgagaccgagatcgacctgtgctacagcgacccctgcggcgccaacggcagatgcagaagcagagagggcggctacacctgcgagtgcttcgaggacttcaccggcgagcactgcgaggtggacgccagaagcggcagatgcgccaacggcgtgtgcaagaacggcggcacctgcgtgaacctgctgatcggcggcttccactgcgtgtgcccccccggcgagtacgagagaccctactgcgaggtgaccaccagaagcttccccccccagagcttcgtgaccttcagaggcctgagacagagattccacttcaccatcagcctgaccttcgccacccaggagagaaacggcctgctgctgtacaacggcagattcaacgagaagcacgacttcatcgccctggagatcgtggacgagcaggtgcagctgaccttcagcgccggcgagaccaccaccaccgtggcccccaaggtgcccagcggcgtgagcgacggcagatggcacagcgtgcaggtgcagtactacaacaagcccaacatcggccacctgggcctgccccacggccccagcggcgagaagatggccgtggtgaccgtggacgactgcgacaccaccatggccgtgagattcggcaaggacatcggcaactacagctgcgccgcccagggcacccagaccggcagcaagaagagcctggacctgaccggccccctgctgctgggcggcgtgcccaacctgcccgaggacttccccgtgcacaacagacagttcgtgggctgcatgagaaacctgagcgtggacggcaagaacgtggacatggccggcttcatcgccaacaacggcaccagagagggctgcgccgccagaagaaacttctgcgacggcagaagatgccagaacggcggcacctgcgtgaacagatggaacatgtacctgtgcgagtgccccctgagattcggcggcaagaactgcgagcaggccatgccccacccccagctgttcagcggcgagagcgtggtgagctggagcgacctgaacatcatcatcagcgtgccctggtacctgggcctgatgttcagaaccagaaaggaggacagcgtgctgatggaggccaccagcggcggccccaccagcttcagactgcagatcctgaacaactacctgcagttcgaggtgagccacggccccagcgacgtggagagcgtgatgctgagcggcctgagagtgaccgacggcgagtggcaccacctgctgatcgagctgaagaacgtgaaggaggacagcgagatgaagcacctggtgaccatgaccctggactacggcatggaccagaacaaggccgacatcggcggcatgctgcccggcctgaccgtgagaagcgtggtggtgggcggcgccagcgaggacaaggtgagcgtgagaagaggcttcagaggctgcatgcagggcgtgagaatgggcggcacccccaccaacgtggccaccctgaacatgaacaacgccctgaaggtgagagtgaaggacggctgcgacgtggacgacccctgcaccagcagcccctgcccccccaacagcagatgccacgacgcctgggaggactacagctgcgtgtgcgacaagggctacctgggcatcaactgcgtggacgcctgccacctgaacccctgcgagaacatgggcgcctgcgtgagaagccccggcagcccccagggctacgtgtgcgagtgcggccccagccactacggcccctactgcgagaacaagctggacctgccctgccccagaggctggtggggcaaccccgtgtgcggcccctgccactgcgccgtgagcaagggcttcgaccccgactgcaacaagaccaacggccagtgccagtgcaaggagaactactacaagctgctggcccaggacacctgcctgccctgcgactgcttcccccacggcagccacagcagaacctgcgacatggccaccggccagtgcgcctgcaagcccggcgtgatcggcagacagtgcaacagatgcgacaaccccttcgccgaggtgaccaccctgggctgcgaggtgatctacaacggctgccccaaggccttcgaggccggcatctggtggccccagaccaagttcggccagcccgccgccgtgccctgccccaagggcagcgtgggcaacgccgtgagacactgcagcggcgagaagggctggctgccccccgagctgttcaactgcaccaccatcagcttcgtggacctgagagccatgaacgagaagctgagcagaaacgagacccaggtggacggcgccagagccctgcagctggtgagagccctgagaagcgccacccagcacaccggcaccctgttcggcaacgacgtgagaaccgcctaccagctgctgggccacgtgctgcagcacgagagctggcagcagggcttcgacctggccgccacccaggacgccgacttccacgaggacgtgatccacagcggcagcgccctgctggcccccgccaccagagccgcctgggagcagatccagagaagcgagggcggcaccgcccagctgctgagaagactggagggctacttcagcaacgtggccagaaacgtgagaagaacctacctgagacccttcgtgatcgtgaccgccaacatgatcctggccgtggacatcttcgacaagttcaacttcaccggcgccagagtgcccagattcgacaccatccacgaggagttccccagagagctggagagcagcgtgagcttccccgccgacttcttcagaccccccgaggagaaggagggccccctgctgagacccgccggcagaagaaccaccccccagaccaccagacccggccccggcaccgagagagaggcccccatcagcagaagaagaagacaccccgacgacgccggccagttcgccgtggccctggtgatcatctacagaaccctgggccagctgctgcccgagagatacgaccccgacagaagaagcctgagactgccccacagacccatcatcaacacccccatggtgagcaccctggtgtacagcgagggcgcccccctgcccagacccctggagagacccgtgctggtggagttcgccctgctggaggtggaggagagaaccaagcccgtgtgcgtgttctggaaccacagcctggccgtgggcggcaccggcggctggagcgccagaggctgcgagctgctgagcagaaacagaacccacgtggcctgccagtgcagccacaccgccagcttcgccgtgctgatggacatcagcagaagagagaacggcgaggtgctgcccctgaagatcgtgacctacgccgccgtgagcctgagcctggccgccctgctggtggccttcgtgctgctgagcctggtgagaatgctgagaagcaacctgcacagcatccacaagcacctggccgtggccctgttcctgagccagctggtgttcgtgatcggcatcaaccagaccgagaaccccttcctgtgcaccgtggtggccatcctgctgcactacatctacatgagcaccttcgcctggaccctggtggagagcctgcacgtgtacagaatgctgaccgaggtgagaaacatcgacaccggccccatgagattctactacgtggtgggctggggcatccccgccatcgtgaccggcctggccgtgggcctggacccccagggctacggcaaccccgacttctgctggctgagcctgcaggacaccctgatctggagcttcgccggccccatcggcgccgtgatcatcatcaacaccgtgaccagcgtgctgagcgccaaggtgagctgccagagaaagcaccactactacggcaagaagggcatcgtgagcctgctgagaaccgccttcctgctgctgctgctgatcagcgccacctggctgctgggcctgctggccgtgaacagagacgccctgagcttccactacctgttcgccatcttcagcggcctgcagggccccttcgtgctgctgttccactgcgtgctgaaccaggaggtgagaaagcacctgaagggcgtgctgggcggcagaaagctgcacctggaggacagcgccaccaccagagccaccctgctgaccagaagcctgaactgcaacaccaccttcggcgacggccccgacatgctgagaaccgacctgggcgagagcaccgccagcctggacagcatcgtgagagacgagggcatccagaagctgggcgtgagcagcggcctggtgagaggcagccacggcgagcccgacgccagcctgatgcccagaagctgcaaggacccccccggccacgacagcgacagcgacagcgagctgagcctggacgagcagagcagcagctacgccagcagccacagcagcgacagcgaggacgacggcgtgggcgccgaggagaagtgggaccccgccagaggcgccgtgcacagcacccccaagggcgacgccgtggccaaccacgtgcccgccggctggcccgaccagagcctggccgagagcgacagcgaggaccccagcggcaagcccagactgaaggtggagaccaaggtgagcgtggagctgcacagagaggagcagggcagccacagaggcgagtacccccccgaccaggagagcggcggcgccgccagactggccagcagccagccccccgagcagagaaagggcatcctgaagaacaaggtgacctaccccccccccctgaccctgaccgagcagaccctgaagggcagactgagagagaagctggccgactgcgagcagagccccaccagcagcagaaccagcagcctgggcagcggcggccccgactgcgccatcaccgtgaagagccccggcagagagcccggcagagaccacctgaacggcgtggccatgaacgtgagaaccggcagcgcccaggccgacggcagcgacagcgagaagccctag

SEQ ID NO: 178675 - protein, 1499 aa, Artificial Sequence
  derived and/or modified sequence
MKPLAIPANHGVMGQQEKHSLPADFTKLHLTDSLHPQVTHVSSSHSGCSITSDSGSSSLSDIYQATESEAGDMDLSGLPETAVDSEDDDDEEDIERASDPLMSRDIVRDCLEKDPIDRTDDDIEQLLEFMHQLPAFANMTMSVRRELCAVMVFAVVERAGTIVLNDGEELDSWSVILNGSVEVTYPDGKAEILCMGNSFGVSPTMDKEYMKGVMRTKVDDCQFVCIAQQDYCRILNQVEKNMQKVEEEGEIVMVKEHRELDRTGTRKGHIVIKGTSERLTMHLVEEHSVVDPTFIEDFLLTYRTFLSSPMEVGKKLLEWFNDPSLRDKVTRVVLLWVNNHFNDFEGDPAMTRFLEEFENNLEREKMGGHLRLLNIACAAKAKRRLMTLTKPSREAPLPFILLGGSEKGFGIFVDSVDSGSKATEAGLKRGDQILEVNGQNFENIQLSKAMEILRNNTHLSITVKTNLFVFKELLTRLSEEKRNGAPHLPKIGDIKKASRYSIPDLAVDVEQVIGLEKVNKKSKANTVGGRNKLKKILDKTRISILPQKPYNDIGIGQSQDDSIVGLRQTKHIPTALPVSGTLSSSNPDLLQSHHRILDFSATPDLPDQVLRVFKADQQSRYIMISKDTTAKEVVIQAIREFAVTATPDQYSLCEVSVTPEGVIKQRRLPDQLSKLADRIQLSGRYYLKNNMETETLCSDEDAQELLRESQISLLQLSTVEVATQLSMRNFELFRNIEPTEYIDDLFKLRSKTSCANLKRFEEVINQETFWVASEILRETNQLKRMKIIKHFIKIALHCRECKNFNSMFAIISGLNLAPVARLRTTWEKLPNKYEKLFQDLQDLFDPSRNMAKYRNVLNSQNLQPPIIPLFPVIKKDLTFLHEGNDSKVDGLVNFEKLRMIAKEIRHVGRMASVNMDPALMFRTRKKKWRSLGSLSQGSTNATVLDVAQTGGHKKRVRRSSFLNAKKLYEDAQMARKVKQYLSNLELEMDEESLQTLSLQCEPATNTLPKNPGDKKPVKSETSPVAPRAGSQQKAQSLPQPQQQPPPAHKINQGLQVPAVSLYPSRKKVPVKDLPPFGINSPQALKKILSLSEEGSLERHKKQAEDTISNASSQLSSPPTSPQSSPRKGYTLAPSGTVDNFSDSGHSEISSRSSIVSNSSFDSVPVSLHDERRQRHSVSIVETNLGMGRMERRTMIEPDQYSLGSYAPMSEGRGLYATATVISSPSTEELSQDQGDRASLDAADSGRGSWTSCSSGSHDNIQTIQHQRSWETLPFGHTHFDYSGDPAGLWASSSHMDQIMFSDHSTKYNRQNQSRESLEQAQSRASWASSTGYWGEDSEGDTGTIKRRGGKDVSIEAESSSLTSVTTEETKPVPMPAHIAVASSTTKGLIARKEGRYREPPPTPPGYIGIPITDFPEGHSHPARKPPDYNVALQRSRMVARSSDTAGPSSVQQPHGHPTSSRPVNKPQWHKPNESDPRLAPYQSQGFSTEEDEDEQVSAV

SEQ ID NO: 178676 - DNA, 4500 bp, Artificial Sequence
  derived and/or modified sequence
atgaagcccctggccatccccgccaaccacggcgtgatgggccagcaggagaagcacagcctgcccgccgacttcaccaagctgcacctgaccgacagcctgcacccccaggtgacccacgtgagcagcagccacagcggctgcagcatcaccagcgacagcggcagcagcagcctgagcgacatctaccaggccaccgagagcgaggccggcgacatggacctgagcggcctgcccgagaccgccgtggacagcgaggacgacgacgacgaggaggacatcgagagagccagcgaccccctgatgagcagagacatcgtgagagactgcctggagaaggaccccatcgacagaaccgacgacgacatcgagcagctgctggagttcatgcaccagctgcccgccttcgccaacatgaccatgagcgtgagaagagagctgtgcgccgtgatggtgttcgccgtggtggagagagccggcaccatcgtgctgaacgacggcgaggagctggacagctggagcgtgatcctgaacggcagcgtggaggtgacctaccccgacggcaaggccgagatcctgtgcatgggcaacagcttcggcgtgagccccaccatggacaaggagtacatgaagggcgtgatgagaaccaaggtggacgactgccagttcgtgtgcatcgcccagcaggactactgcagaatcctgaaccaggtggagaagaacatgcagaaggtggaggaggagggcgagatcgtgatggtgaaggagcacagagagctggacagaaccggcaccagaaagggccacatcgtgatcaagggcaccagcgagagactgaccatgcacctggtggaggagcacagcgtggtggaccccaccttcatcgaggacttcctgctgacctacagaaccttcctgagcagccccatggaggtgggcaagaagctgctggagtggttcaacgaccccagcctgagagacaaggtgaccagagtggtgctgctgtgggtgaacaaccacttcaacgacttcgagggcgaccccgccatgaccagattcctggaggagttcgagaacaacctggagagagagaagatgggcggccacctgagactgctgaacatcgcctgcgccgccaaggccaagagaagactgatgaccctgaccaagcccagcagagaggcccccctgcccttcatcctgctgggcggcagcgagaagggcttcggcatcttcgtggacagcgtggacagcggcagcaaggccaccgaggccggcctgaagagaggcgaccagatcctggaggtgaacggccagaacttcgagaacatccagctgagcaaggccatggagatcctgagaaacaacacccacctgagcatcaccgtgaagaccaacctgttcgtgttcaaggagctgctgaccagactgagcgaggagaagagaaacggcgccccccacctgcccaagatcggcgacatcaagaaggccagcagatacagcatccccgacctggccgtggacgtggagcaggtgatcggcctggagaaggtgaacaagaagagcaaggccaacaccgtgggcggcagaaacaagctgaagaagatcctggacaagaccagaatcagcatcctgccccagaagccctacaacgacatcggcatcggccagagccaggacgacagcatcgtgggcctgagacagaccaagcacatccccaccgccctgcccgtgagcggcaccctgagcagcagcaaccccgacctgctgcagagccaccacagaatcctggacttcagcgccacccccgacctgcccgaccaggtgctgagagtgttcaaggccgaccagcagagcagatacatcatgatcagcaaggacaccaccgccaaggaggtggtgatccaggccatcagagagttcgccgtgaccgccacccccgaccagtacagcctgtgcgaggtgagcgtgacccccgagggcgtgatcaagcagagaagactgcccgaccagctgagcaagctggccgacagaatccagctgagcggcagatactacctgaagaacaacatggagaccgagaccctgtgcagcgacgaggacgcccaggagctgctgagagagagccagatcagcctgctgcagctgagcaccgtggaggtggccacccagctgagcatgagaaacttcgagctgttcagaaacatcgagcccaccgagtacatcgacgacctgttcaagctgagaagcaagaccagctgcgccaacctgaagagattcgaggaggtgatcaaccaggagaccttctgggtggccagcgagatcctgagagagaccaaccagctgaagagaatgaagatcatcaagcacttcatcaagatcgccctgcactgcagagagtgcaagaacttcaacagcatgttcgccatcatcagcggcctgaacctggcccccgtggccagactgagaaccacctgggagaagctgcccaacaagtacgagaagctgttccaggacctgcaggacctgttcgaccccagcagaaacatggccaagtacagaaacgtgctgaacagccagaacctgcagccccccatcatccccctgttccccgtgatcaagaaggacctgaccttcctgcacgagggcaacgacagcaaggtggacggcctggtgaacttcgagaagctgagaatgatcgccaaggagatcagacacgtgggcagaatggccagcgtgaacatggaccccgccctgatgttcagaaccagaaagaagaagtggagaagcctgggcagcctgagccagggcagcaccaacgccaccgtgctggacgtggcccagaccggcggccacaagaagagagtgagaagaagcagcttcctgaacgccaagaagctgtacgaggacgcccagatggccagaaaggtgaagcagtacctgagcaacctggagctggagatggacgaggagagcctgcagaccctgagcctgcagtgcgagcccgccaccaacaccctgcccaagaaccccggcgacaagaagcccgtgaagagcgagaccagccccgtggcccccagagccggcagccagcagaaggcccagagcctgccccagccccagcagcagcccccccccgcccacaagatcaaccagggcctgcaggtgcccgccgtgagcctgtaccccagcagaaagaaggtgcccgtgaaggacctgccccccttcggcatcaacagcccccaggccctgaagaagatcctgagcctgagcgaggagggcagcctggagagacacaagaagcaggccgaggacaccatcagcaacgccagcagccagctgagcagcccccccaccagcccccagagcagccccagaaagggctacaccctggcccccagcggcaccgtggacaacttcagcgacagcggccacagcgagatcagcagcagaagcagcatcgtgagcaacagcagcttcgacagcgtgcccgtgagcctgcacgacgagagaagacagagacacagcgtgagcatcgtggagaccaacctgggcatgggcagaatggagagaagaaccatgatcgagcccgaccagtacagcctgggcagctacgcccccatgagcgagggcagaggcctgtacgccaccgccaccgtgatcagcagccccagcaccgaggagctgagccaggaccagggcgacagagccagcctggacgccgccgacagcggcagaggcagctggaccagctgcagcagcggcagccacgacaacatccagaccatccagcaccagagaagctgggagaccctgcccttcggccacacccacttcgactacagcggcgaccccgccggcctgtgggccagcagcagccacatggaccagatcatgttcagcgaccacagcaccaagtacaacagacagaaccagagcagagagagcctggagcaggcccagagcagagccagctgggccagcagcaccggctactggggcgaggacagcgagggcgacaccggcaccatcaagagaagaggcggcaaggacgtgagcatcgaggccgagagcagcagcctgaccagcgtgaccaccgaggagaccaagcccgtgcccatgcccgcccacatcgccgtggccagcagcaccaccaagggcctgatcgccagaaaggagggcagatacagagagcccccccccaccccccccggctacatcggcatccccatcaccgacttccccgagggccacagccaccccgccagaaagccccccgactacaacgtggccctgcagagaagcagaatggtggccagaagcagcgacaccgccggccccagcagcgtgcagcagccccacggccaccccaccagcagcagacccgtgaacaagccccagtggcacaagcccaacgagagcgaccccagactggccccctaccagagccagggcttcagcaccgaggaggacgaggacgagcaggtgagcgccgtgtag

SEQ ID NO: 178677 - DNA, 4500 bp, Artificial Sequence
  derived and/or modified sequence
atgaagccgcttgctattccagccaaccatggagttatggggcaacaagaaaagcactccttgcccgccgattttacgaagctccacctgaccgacagcctgcacccgcaggttacccacgtgagctccagccatagcggctgttctattacatcagatagcggcagttctagtctctccgatatttatcaggcaaccgaatccgaagcaggcgatatggatttatcaggtctgccagagaccgctgtggacagcgaagacgacgacgacgaggaggacatcgaaagggccagcgatccattaatgtcacgggacatcgtgagggactgcctagaaaaggaccctatcgatcggacagacgatgacatcgaacaactgctagagttcatgcaccagttgcctgcatttgctaatatgacaatgtccgtgcggcgagagttgtgtgctgtgatggttttcgcggtggttgaacgggcagggacaattgtgttaaatgatggagaggagttggactcgtggagtgtgatcctcaacggttctgttgaggtcacgtaccccgatggcaaagctgaaattctgtgtatgggaaattcatttggagttagtccaacgatggacaaggagtacatgaaaggcgtcatgcgcaccaaggtggatgactgccaattcgtgtgcattgcgcagcaggattattgtagaatcctaaaccaggtcgagaagaatatgcagaaggtagaagaggagggagagatcgttatggtgaaggaacatagggagttggaccgaactggtacacgaaaggggcacatcgttataaaagggacaagcgagcgcttgacgatgcatctggtagaagaacactcggtcgtcgaccccaccttcatagaggacttcctactgacatatcggaccttcctgtcctcgcccatggaagtaggaaagaagctactggagtggtttaatgatccgtccctgcgcgacaaagtgaccagagtcgtgttactgtgggtgaacaatcacttcaacgatttcgagggggatcctgccatgactagattcctggaagaatttgaaaataacctcgaacgagagaagatgggtggccacctgcgcctgctgaacattgcatgcgctgccaaggcgaagcgtcggctgatgactctcactaagcctagccgcgaggccccactgccttttatcctactgggtgggtccgagaaaggctttgggatttttgtggattcggtagactcagggtctaaagcaacggaggccggcctgaaacgtggggatcaaatcctggaagttaacggtcagaatttcgagaatattcaacttagtaaggctatggagatcctgagaaataacactcacctgtcgataaccgtgaaaactaacctcttcgtcttcaaagagcttctgacaagattgtcggaagagaaacggaatggcgcccctcacctgcctaaaataggggacattaaaaaagcttcccggtacagtattccggaccttgctgtcgacgttgaacaagtcatcggattagagaaggttaataaaaagtcgaaagctaacactgtcgggggccggaacaagctcaaaaagatcttggataagaccagaatcagtatacttccgcagaaaccctacaacgacatcggcataggacagtcacaagacgatagcattgtggggttaaggcaaacaaaacacataccaactgcccttccagttagcggcacattgtcatcctctaatcccgatctcctgcagagccaccacaggattctagacttcagcgcaacacctgatctgcccgatcaagtgttgagagtgttcaaggccgatcagcagtcaagatacatcatgatttccaaagataccaccgcaaaagaggtggtgatacaggctattagagagttcgctgttaccgcaacccctgaccagtatagcctctgcgaggtatcagtcactcccgagggcgtcattaaacagaggaggctgccggatcaactgtctaagcttgcagatagaatacagctgtctggccgttattacctcaagaataacatggagaccgagacattatgctctgacgaggatgctcaggaattgctgagggaatctcagatcagtttgctccagcttagcactgtggaagtggccacccagttaagcatgcgaaatttcgaactgtttagaaacatcgaacccactgaatatatcgatgacctgtttaaactgcgtagtaagacgtcatgtgccaacctgaagaggtttgaagaggtgatcaatcaggagacgttttgggtggcctcagagattctgcgggagactaatcagcttaagagaatgaaaatcatcaaacacttcatcaagatcgcgttgcactgtcgagagtgcaagaactttaattcaatgttcgcaatcatctccggtctcaatctcgctccagtggctaggctgcgaacaacctgggaaaaattgcccaacaagtatgaaaagctctttcaagatcttcaggatctgtttgacccatcccgcaacatggctaaataccggaatgttctcaattctcagaatttgcagccgccaataatccccctgttccccgtgatcaaaaaggatctgactttcttacacgagggtaatgactctaaagtcgatgggttggtaaactttgagaaactcagaatgattgcaaaagagataaggcacgtcggccgcatggcatccgtgaacatggacccggcacttatgttccgaacaaggaaaaagaagtggcgaagcctcggaagtctgtctcaggggagcactaatgccacagtgctggatgttgcccagactggcgggcataaaaagagggtaaggcgcagctctttcctgaatgctaagaagctgtatgaagatgcacagatggcccgaaaggtaaagcaatacctctcaaatctcgaactggagatggacgaagagagtctccaaaccctatccctgcaatgtgagccagccacaaataccctacccaagaacccgggggacaaaaaaccggttaaaagcgaaacaagtcctgtggcaccccgtgctggaagtcagcaaaaggcgcagagcttgccacagccccaacagcaaccccctccagctcataaaatcaatcaggggcttcaagtccccgcggtgtcactgtacccgtccagaaaaaaggttcctgttaaggacctcccaccttttgggatcaatagccctcaggccctaaaaaaaatcttgtccctctcagaggaagggtccctcgagaggcataaaaagcaggccgaggatacaatttcgaacgccagtagtcagctgagcagccccccaacaagtcctcagagttccccacgtaaaggctatactctggctccttccggtacagtggataattttagtgattcaggccacagcgaaatctccagccgcagctccattgtctctaattcctcatttgactcggttcccgtatccctgcacgacgagcgtcggcagagacactctgtgagcatcgtggagacaaatttgggaatgggtagaatggagcgtcgcactatgattgagcctgatcagtatagtttggggagttatgctccaatgtccgaggggcgaggtctatacgctaccgccacagtcatcagtagtccttccaccgaggagctgtcccaagatcaaggcgaccgcgcttctcttgatgccgcggattcagggcgtggtagttggacgtcctgttctagcggttctcacgataacatccaaacaatccagcaccagcgttcgtgggagaccttaccgtttggacacactcatttcgattattccggggacccagctggactttgggccagctcctcccacatggaccaaatcatgttctctgaccactcaacgaaatataacaggcagaatcaatcgcgcgagtcactcgagcaggcccagtcacgagccagctgggccagttcaactggatactggggggaagactcggagggtgatactggcactataaaaaggcgcggcggaaaagacgtgagtatcgaggccgagtccagttctttgacgtccgtcaccactgaggagactaaacctgttcccatgccagcgcatatcgccgtggcttccagtactaccaagggattaatcgcacggaaagaggggagataccgcgagccaccgccaaccccaccagggtacatcggtattccgatcactgatttccctgagggccattctcaccctgcccgtaagcctcccgattataacgtggcactgcagcgttctcgcatggtggctagaagctctgacacggcaggcccttccagcgtacagcagccgcacgggcacccaacgagttcacgtcccgtaaataagccgcagtggcataagcctaacgaatccgatccgagattggccccatatcaaagccagggcttttctactgaggaggacgaagatgaacaggtgtcagccgtctag

SEQ ID NO: 178678 - DNA, 4500 bp, Artificial Sequence
  derived and/or modified sequence
atgaagcccctggccatcccagccaaccacggcgtgatgggccagcaggagaagcacagcctgcctgctgacttcaccaagctgcacctgacagacagcctgcacccccaggtgacccacgtgagcagcagccacagcggctgcagcatcaccagtgacagcggcagcagcagcctgagtgacatctaccaggccacagagagcgaggccggggacatggacctgagcggcctgcctgagacagctgtggacagtgaagatgatgatgatgaggaggacatcgagcgggccagtgaccccctgatgagccgggacatcgtgcgggactgcctggagaaggaccccatcgacagaacagatgatgacatcgagcagctgctggagttcatgcaccagctgcctgcctttgccaacatgaccatgtctgtgcggcgggagctgtgtgctgtgatggtgtttgctgtggtggagagagctggcaccatcgtgctgaatgatggagaggagctggacagctggagcgtcatcctgaatggatctgtggaggtgacctacccagatggcaaggccgagatcctgtgcatgggcaacagctttggagtgagccccaccatggacaaggagtacatgaagggcgtgatgaggaccaaggtggatgactgccagtttgtgtgcatcgcccagcaggactactgccgcatcctgaaccaggtggagaagaacatgcagaaggtggaggaggagggggagatcgtgatggtgaaggagcaccgggagctggacagaacaggcaccaggaagggccacatcgtcatcaagggcaccagcgagcggctgaccatgcacctggtggaggagcacagcgtggtggaccccaccttcatcgaggacttcctgctgacctaccgcaccttcctgagcagccccatggaggtgggcaagaagctgctggagtggttcaatgaccccagcctgcgggacaaggtgaccagggtggtgctgctgtgggtgaacaaccacttcaatgactttgaaggagaccctgccatgacccgcttcctggaggagtttgagaacaacctggagcgggagaagatgggcggccacctgcggctgctgaacatcgcctgtgccgccaaggccaagaggcggctgatgaccctgaccaagcccagccgggaggcccccctgcccttcatcctgctgggcggcagcgagaagggcttcggcatctttgtggacagcgtggacagcggcagcaaggccacagaagctggcctgaagagaggagaccagatcctggaggtgaatggccagaactttgagaacatccagctgagcaaggccatggagatcctgaggaacaacacccacctgagcatcaccgtgaagaccaacctgtttgtgttcaaggagctgctgacccggctgtctgaggagaagagaaatggagccccccacctgcccaagattggagacatcaagaaggccagccgctacagcatcccagacctggccgtggatgtggagcaggtgattggcctggagaaggtgaacaagaagagcaaggccaacacagtgggcggcaggaacaagctgaagaagatcctggacaagacccgcatcagcatcctgccccagaagccctacaatgacattggaattggccagagccaggatgacagcatcgtgggcctgcggcagaccaagcacatccccacagccctgcctgtgtctggcaccctgagcagcagcaacccagacctgctgcagagccaccaccgcatcctggacttcagcgccaccccagacctgcctgaccaggtgctgcgggtcttcaaggctgaccagcagagccgctacatcatgatcagcaaggacaccacagccaaggaggtggtgatccaggccatccgggagtttgctgtgacagccaccccagaccagtacagcctgtgtgaggtgtctgtgaccccagagggcgtcatcaagcagaggcggctgcctgaccagctgagcaagctggccgaccgcatccagctgagcggccgctactacctgaagaacaacatggagacagagaccctgtgcagtgatgaagatgcccaggagctgctgcgggagagccagatcagcctgctgcagctgagcacagtggaggtggccacccagctgtccatgaggaactttgagctgttcaggaacatcgagcccacagagtacattgatgacctcttcaagctgcggagcaagaccagctgtgccaacctgaagagatttgaggaggtgatcaaccaggagaccttctgggtggccagcgagatcctgcgggagaccaaccagctgaagaggatgaagatcatcaagcacttcatcaagatcgccctgcactgccgggagtgcaagaacttcaacagcatgtttgccatcatcagcggcctgaacctggcccctgtggcccggctgcggaccacctgggagaagctgcccaacaagtatgagaagctgttccaggacctgcaggacctgtttgaccccagcaggaacatggccaagtacagaaatgtgctgaacagccagaacctgcagccccccatcatccccctcttccctgtgatcaagaaggacctgaccttcctgcacgagggcaatgacagcaaggtggatggcctggtgaactttgagaagctgaggatgattgccaaggagatccgccacgtgggccgcatggcctctgtgaacatggaccctgccctgatgttccgcaccaggaagaagaagtggaggagcctgggcagcctgagccagggcagcaccaatgccaccgtgctggatgtggcccagacaggaggccacaagaagagggtgagaagaagcagcttcctgaatgccaagaagctgtatgaagatgcccagatggccaggaaggtgaagcagtacctgagcaacctggagctggagatggatgaggagagcctgcagaccctgagcctgcagtgtgagcccgccaccaacaccctgcccaagaaccctggggacaagaagcctgtgaagtctgagaccagccctgtggccccccgggccggcagccagcagaaggcccagagcctgccccagccccagcagcagcccccaccagcccacaagatcaaccagggcctgcaggtgcctgctgtgtccctgtaccccagcaggaagaaggtgcctgtgaaggacctgccccccttcggcatcaacagcccccaggccctgaagaagatcctgagcctgtctgaggagggcagcctggagcggcacaagaagcaggccgaggacaccatcagcaatgccagcagccagctgagcagcccccccaccagcccccagagcagccccaggaagggctacaccctggcccccagcggcaccgtggacaacttcagtgacagcggccacagcgagatcagcagccgcagcagcatcgtgagcaacagcagctttgacagcgtgcctgtgtccctgcatgatgaaagacggcagaggcacagcgtgtccatcgtggagaccaacctgggcatgggccgcatggagaggaggaccatgattgaaccagaccagtacagcctgggcagctatgcccccatgtctgagggccggggcctgtatgccacagccaccgtcatcagcagccccagcacagaggagctgagccaggaccagggcgaccgggccagcctggatgctgctgacagcggccggggctcctggaccagctgcagcagcggcagccatgacaacatccagaccatccagcaccagaggtcctgggagaccctgcccttcggccacacccactttgactacagcggggaccctgctggcctgtgggccagcagcagccacatggaccagatcatgttcagtgaccacagcaccaagtacaaccggcagaaccagagccgggagagcctggagcaggcccagagccgggcctcctgggccagcagcacaggctactggggagaagattctgagggggacaccggcaccatcaagaggcggggcggcaaggatgtgtccattgaggccgagagcagcagcctgacctctgtgaccacagaggagaccaagcctgtgcccatgcctgcccacatcgctgtggccagcagcaccaccaagggcctgattgccaggaaggagggccgctaccgggagcccccacccaccccacctggctacatcggcatccccatcacagacttccctgagggccacagccacccagccaggaagcccccagactacaacgtggccctgcagaggagcaggatggtggcccggagcagtgacacagctggccccagctctgtgcagcagccccacggccaccccaccagcagcaggcctgtgaacaagccccagtggcacaagcccaatgaaagtgacccccggctggccccctaccagagccagggcttcagcacagaggaggatgaagatgagcaggtgtctgctgtgtag

SEQ ID NO: 178679 - DNA, 4500 bp, Artificial Sequence
  derived and/or modified sequence
atgaagcccctggccatccccgccaaccacggcgtgatgggccagcaggagaagcactcactgcccgcagactttacaaaactgcatttaaccgactccctacaccctcaggtaacccacgtgtcctccagccactctggctgctcaataacgtccgactctggtagcagctccctaagcgatatctatcaagcaaccgagagcgaagctggcgacatggatctgagcgggctccccgagactgctgtggattccgaggacgatgatgatgaggaagatatagagagagcctccgacccgttaatgtcccgggatatagtgcgagactgtctggaaaaggaccccatcgatcgaaccgacgatgacattgagcaactcttagagttcatgcatcagctccccgcttttgctaacatgaccatgagcgtgcggagagagctgtgcgccgtcatggtttttgccgttgtggagcgggctggcaccatcgtattgaatgatggcgaagagctcgacagttggagtgtgattctgaacgggagcgtggaggtgacctaccccgacggaaaggccgaaattctgtgtatgggaaatagctttggcgtaagtcccacgatggataaagagtatatgaaaggggtaatgaggaccaaggtggatgactgccaattcgtgtgtattgcccagcaggactactgccgtattcttaaccaggttgaaaagaatatgcagaaggtcgaggaggagggggaaatagtcatggttaaagaacatcgtgagctagacaggaccggcacacgaaagggccacatcgtcattaagggtaccagcgaaagattgacaatgcatctggtagaggagcactccgtggtcgatccaacattcatagaggattttcttctgacttatcgcactttcctgtcaagtcctatggaggtgggtaagaaactgcttgagtggtttaacgatccctccctccgtgacaaggtgactagggttgttctgctgtgggtaaataaccacttcaacgattttgaaggcgacccagccatgacaaggttcctggaggaatttgaaaataacctcgaaagagagaagatgggtggacatttgcgcctgttaaatattgcatgtgctgcgaaggccaagaggagactgatgaccctgacgaagcccagcagagaggcgccgctcccctttattctgctgggagggagcgaaaaagggttcggcattttcgtcgactccgtggactctggtagcaaggctaccgaagcggggctcaagagaggtgaccaaattttagaggtaaacggtcagaacttcgagaacattcagctttctaaggcaatggaaattctgcgaaataatactcacctgtctattacagtgaagacaaatctgttcgtgttcaaggagctccttaccagactgagtgaagaaaaacggaacggggcccctcacttgcctaagatcggtgacatcaagaaagcatccaggtatagtatacctgacctcgcggtcgacgtggaacaggttatcgggcttgaaaaggtgaataaaaagagcaaggccaataccgttggaggacgtaataaactcaagaaaattctggacaagacaaggatctcgattcttccgcaaaaaccgtataacgacattggcatcggacaatcccaggacgactctatcgtcggcttgcgtcagaccaagcacattccaacggccttaccagtctcaggcacattgtcatcttctaatcccgacttactacagagtcatcatagaattctggactttagcgccacacccgatttgcctgatcaggtcctgcgcgtgtttaaagcagatcagcagagcaggtatataatgatttcaaaagacacgaccgctaaagaggttgtcattcaggcaatcagagaatttgcggtgacagcaaccccagatcagtatagtttgtgtgaggtctcagtaacacccgagggtgtgatcaagcagcgtaggctgcctgatcagctgtcaaagcttgccgacaggattcaactatccggacgctattatcttaagaacaacatggaaacagagaccctgtgcagcgatgaagatgcccaggagctcctgcgagagtctcaaatctccctgcttcagctcagcactgtggaggttgctacacagctgtctatgcggaatttcgagctgttcaggaacatagaaccaacagaatacatagacgacctctttaagctcaggagcaaaacgtcgtgtgctaacttaaagagattcgaagaagtaattaatcaggagactttctgggtggcctccgagatccttcgtgaaacgaaccagctgaagaggatgaaaataattaaacactttattaagatcgccttgcactgtcgcgagtgcaagaatttcaatagcatgttcgcaatcatttccggcttaaacctggctccagttgctagactgcggacaacatgggagaaacttcctaacaaatacgagaaactgttccaagacttgcaagatctatttgaccctagccgaaatatggcaaaataccggaacgtcttaaattcccagaatctccagccaccaatcataccactctttccggttattaagaaggacctgactttcctgcacgaggggaacgactccaaggtggatggactggtgaacttcgaaaaactccgcatgattgcaaaggaaattaggcacgtgggtagaatggccagtgtcaacatggaccccgccctaatgttccgtacaagaaagaagaagtggaggagtctcggctcactttcccagggtagtactaacgccaccgtcctggatgtggcgcaaactggagggcacaaaaaaagggtcagaagaagctctttcctaaatgccaaaaagctgtatgaagacgctcagatggccagaaaggttaaacagtacctctcgaacctggaactcgaaatggacgaagagtcgctccagacactgtccctccagtgcgaacctgcgacaaacacactcccaaagaaccccggcgacaagaaacctgtgaaatctgaaaccagccctgtcgcgcccagagctgggtcccaacaaaaggcacaatccctgccacagcctcagcagcagcctcccccagcccataagatcaaccagggacttcaggtccccgctgtgtccctttatcccagccgcaagaaagttccagttaaggacttaccgccatttgggatcaacagtccacaagccctgaagaaaattctgtcactcagcgaagaaggctctctcgagaggcataaaaagcaggctgaggatacgattagcaacgcgtcctctcagctgagttctccacccacaagtcctcagtcttctccacgaaagggatacactctcgcaccaagtggcactgtcgacaattttagcgacagcggtcactctgaaatcagctcccgcagctcgatcgtttccaactccagctttgatagcgtgcccgtgtccttacacgatgagaggagacaaagacatagtgtgagcatcgtggagactaatctcgggatgggccgcatggaaaggagaaccatgatcgagcccgatcaatactcccttggttcctacgcccctatgagcgaaggcaggggcttgtacgcgactgccacagtgatctcttcccccagtacggaggagcttagccaggatcaaggtgatagagcctccctcgatgcggccgatagcggacgcggtagctggactagttgttcaagtggcagtcacgacaatatccagacaatccagcaccaaagatcttgggagaccctgcctttcggacacacccatttcgattactccggtgacccagcaggtttgtgggctagtagctcccatatggatcagatcatgttctcagatcacagcacaaagtacaatcgacagaatcaaagccgggaatctcttgaacaagctcagagtcgcgcaagctgggcctctagcaccgggtactggggggaagattccgagggcgataccggcaccatcaagaggagaggaggtaaggacgtcagcatcgaggccgagagctcaagcctgacgtccgtgacaactgaagaaaccaagccagtgcccatgccagcccatattgccgttgcgagcagcacaacaaagggcctgatcgcacggaaagagggcaggtacagagaaccacctcctacgcctcccggatatattggcatacccatcaccgatttccccgaggggcattcccacccagctcgcaagccacctgactataatgtggctctgcagcggtctagaatggtggcacggagtagtgacaccgccggaccatcatctgttcagcagccccatgggcatcccacctctagcagacctgtaaacaagccacagtggcacaaacccaacgaatccgatcctcgccttgccccttatcaatcccaagggttttccacggaagaagatgaagacgaacaggtctctgccgtctag

SEQ ID NO: 178680 - DNA, 4500 bp, Artificial Sequence
  derived and/or modified sequence
atgaaaccactggctatacccgcaaaccatggggtgatgggccaacaggagaagcactcacttcccgctgacttcacaaagcttcatctgacagattctcttcacccccaggtgactcatgtgtcctcctcccattcgggatgttcaattacttccgatagcgggtcatcgtctctttccgatatctaccaggcgactgagagcgaggccggagacatggatctgtctggattgcctgagacggccgtagattcggaggacgacgatgacgaagaggacatcgaacgcgcatcagaccccttaatgtctagagacatcgtgagggactgcctggagaaggatccaatcgatcggaccgatgatgacatagaacaactgctggagtttatgcaccaactgccagcatttgctaatatgacaatgagtgtcagacgagagctatgtgccgtgatggtgttcgccgtggtcgagagagccggtacaatcgtcctcaatgatggggaagagctggattcgtggtccgtcatcttaaacggtagcgtcgaagtgacttaccctgatggcaaggccgagatactgtgtatggggaattccttcggagtgagccccactatggacaaggaatacatgaaaggggttatgcggaccaaggtggacgattgccaatttgtgtgcatcgcacagcaagattactgcaggatcttgaaccaagtggaaaagaatatgcagaaagtagaagaagagggagagatcgtaatggtcaaggaacaccgtgaactggatcgcaccgggactaggaagggccacatcgttatcaagggtacctcggagcgactcaccatgcatctggtagaggagcatagcgtcgtggaccccaccttcattgaggacttcctactgacatatagaacattcttgtcatcgcctatggaagtggggaagaaattgctcgagtggttcaatgacccttctctccgggataaggttacccgggtagtgcttctgtgggtgaataatcactttaatgatttcgaaggagaccccgctatgacgagattcttggaggaattcgaaaacaacctggagagagagaaaatgggcggtcatttgcgtctgctgaacatcgcttgcgcagcaaaggcgaagagacgcctgatgactcttaccaaaccatctcgggaggcgcctctaccctttattctactggggggatccgagaaagggttcggtatcttcgtggactctgtggattctgggagtaaagcaactgaagccggtctcaagaggggagatcagatcctcgaggtcaacggccagaatttcgagaacattcagttatccaaggcgatggaaatcctgagaaataatactcatctgtctatcactgttaagacaaatctgtttgtgtttaaggaattacttacaagactcagcgaggagaagcgcaacggagcaccacatttgcctaagattggggacattaaaaaggctagtcggtactcaattcctgacttagctgtggacgtcgagcaggtaattggcctggaaaaggtgaacaagaaaagcaaggcgaacaccgtaggcggtcggaacaaattgaaaaaaatactggacaaaacgcgtataagtatattgccccagaagccctataacgacatagggattgggcagtcccaggatgactcaattgttggactccggcagaccaagcatatcccaacagctttgccagtgtcaggcacactgagctcttcaaatccagatctgctccagagccatcatcgcattctggacttctcagctactcccgatttgcccgaccaggtgctgagggtattcaaggccgaccaacaatcacggtacatcatgatcagcaaggatacaacagctaaagaagtggtcattcaggccattagggagtttgcggtgaccgctacgccagaccagtacagtctgtgcgaggtttccgtgacaccggaaggcgttataaaacagcgtcgactgccagaccagttatccaagcttgctgatcgaatccagctgtctggtcgatattacttgaagaacaacatggaaacagagacattgtgctctgatgaggacgcacaggaactgctgagggagtcacagattagtttgctgcagctgtcaacagttgaggtagcaacccagctgagcatgcgtaactttgaacttttcaggaatatagaacccaccgagtacatcgacgacctattcaagttgcgatcgaaaacgagctgtgccaacttaaagagatttgaggaggtgatcaaccaggagactttttgggtcgcatcagagattctacgggagactaatcagctcaagcggatgaagattatcaagcacttcattaaaatagccctgcactgcagggaatgtaagaattttaacagcatgtttgcgattatctccggactgaatcttgcccctgtcgccaggttgcgcaccacatgggaaaagttgcctaataagtatgagaagctgttccaagacctccaggatctgtttgaccctagccggaacatggccaaataccgcaacgtgctgaatagccagaatcttcagccacctataatccccctctttccagttattaaaaaggatctcacttttctccatgagggcaacgattccaaagtggacggtttggtcaatttcgaaaaactgcgtatgatcgccaaggagatacgccatgtaggccgaatggctagcgtgaatatggacccggctttgatgttccgtacccgtaaaaaaaaatggagatcactgggatctctgtcccagggttctacaaatgccaccgtgcttgacgtcgcccaaactggtgggcataaaaagcgggtgcggaggtcatcctttcttaacgcaaaaaagctctatgaggacgcccagatggcaagaaaggtgaaacaatatctctctaatctggaactagagatggatgaagaaagtttgcagactctgtccctccaatgcgaaccagccacaaacactctaccaaagaaccccggtgataaaaagcccgtaaaaagcgagactagccccgtggcaccaagggcgggttctcagcagaaagcccagtctttaccacagccccaacagcagccacccccagcacataagatcaatcaaggtttacaggttcccgctgtttctttgtatccttctcgcaagaaagttcccgtgaaggaccttccacctttcggcataaactctccacaagctctgaaaaaaattctgtctctaagcgaagagggctcattagagaggcacaagaaacaagccgaggacactatcagcaacgcctcaagccagctaagcagccctcctacaagcccccagtcatctccacgaaaagggtacacacttgcacctagtggcaccgtggataacttctctgactccggccatagcgagatttcatccaggagctctatcgtgtctaactctagctttgacagcgtgcctgtgagcctccacgacgaaaggcgccaaaggcattcagtaagcatcgtggaaacgaacctcggcatgggaagaatggagagacgaacgatgattgagcccgaccaatatagtctgggctcatacgctcctatgagcgagggcaggggtctgtacgccaccgctaccgtgatcagttcccccagcactgaagagctgagccaggatcagggagatcgcgcaagtttggacgctgcggactctgggcgaggctcatggacttcttgtagttctggctcccatgataatatacagacgatccagcaccaacggtcctgggagactctaccctttgggcacacccattttgattacagcggagatccagctgggctgtgggccagttctagccacatggaccagattatgttctcagatcacagtactaagtacaatcggcagaaccagtcacgagaatccctagagcaggcccagtcccgcgctagctgggcgtcaagtacaggatactggggggaggacagcgagggtgacactgggaccatcaagagacggggaggcaaagacgtgtccatcgaagcagagagcagcagtctgacgtcagttaccaccgaagaaactaaacccgttcctatgcccgctcatattgccgtggcctcctcaactactaaggggctgatcgcgagaaaagaaggcagatatagagagcctcctcctacgccacccggatacataggcatccccattacagattttccagaaggccactcacatccagcgcgtaaaccacccgattacaatgtggctctgcagcgttcgcgaatggtggctcggtcatctgatactgccggaccgagctcggtgcagcagcctcacggtcaccccacgtcctccaggcctgtgaataaaccgcaatggcacaagcccaacgagtcagacccacgccttgccccttaccagtctcagggatttagtactgaggaagatgaggatgaacaggtgtctgctgtgtag

SEQ ID NO: 178681 - DNA, 6949 bp, Artificial Sequence
  derived and/or modified sequence
gtgttaagcctttttgaggggagtctgtgtgcagtcagccattttagcttttttcttttttttttttttttcctctccttttcttttgcctcttgttcttcaatctcagaaatgatcttgttctcttggaagactgagagctgtgtgaggttttctcagtcttgtcatagcctaggatggttagagtttcaatgttataaaaatggagacgaacactgttgttcggattccttttctggtctacaagtgtgaagggtttttaagcttaccagtagtgacactttaagctgcagcttggttttccctcctccctttttttttttcctttttcttttaatttaatgctgtagagggtgacttgccatcgtgagagattggtacatgatgtgtaaattcagttcagcatatgtttcttcattatgaaaccactagcaatcccagctaaccatggagttatgggccagcaggagaaacactcacttcctgcagatttcacaaaactgcatcttactgacagtctccacccacaggtgacccacgtttcttctagccattcaggatgtagtatcactagtgattctgggagcagcagtctttctgatatctaccaggccacagaaagcgaggctggtgatatggacctgagtgggttgccagaaacagcagtggattccgaagacgacgacgatgaagaagacattgagagagcatcagatcctctgatgagcagggacattgtgagagactgcctagagaaggacccaattgaccggacagatgatgacattgaacaactcttggaatttatgcaccagttgcctgcttttgccaatatgacaatgtcagtgaggcgagaactctgtgctgtgatggtgttcgcagtggtggaaagagcagggaccatagtgttaaatgatggtgaagagctggactcctggtcagtgattctcaatggatctgtggaagtgacttatccagatggaaaagcagaaatactgtgcatgggaaatagttttggtgtctctcctaccatggacaaagaatacatgaaaggagtgatgagaacaaaggtggatgactgccagtttgtctgcatagcccagcaagattactgccgtattctcaatcaagtagaaaagaacatgcaaaaagttgaagaggaaggagagattgttatggtgaaagaacaccgagaacttgatcgaactggaacaagaaagggacacattgtcatcaagggtacctcagaaaggttaacaatgcatttggtggaagagcattcagtagtagatccaacattcatagaagactttctgttgacctataggacttttctttctagcccaatggaagtgggcaaaaagttattggagtggtttaatgacccgagcctcagggataaggttacacgggtagtattattgtgggtaaataatcacttcaatgactttgaaggagatcctgcaatgactcgatttttagaagaatttgaaaacaatctggaaagagagaaaatgggtggacacctaaggctgttgaatatcgcgtgtgctgctaaagcaaaaagaagattgatgacgttaacaaaaccatcccgagaagctcctttgccttttatcttacttggaggctctgagaagggatttggaatctttgttgacagtgtagattcaggtagcaaagcaactgaagcaggcttgaaacggggggatcagatattagaagtaaatggccaaaactttgaaaacattcagctgtcaaaagctatggaaattcttagaaataacacacatttatctatcactgtgaaaaccaatttatttgtatttaaagaacttctaacaagattgtcagaagagaaaagaaatggtgccccccaccttcctaaaattggtgacattaaaaaggccagtcgctactccattccagatcttgctgtagatgtagaacaggtgataggacttgaaaaagtgaacaaaaaaagtaaagccaacactgtgggaggaaggaacaagctgaaaaagatactcgacaagactcggatcagtatcttgccacagaaaccatacaatgatattgggattggtcagtctcaagatgacagcatagtaggattaaggcagacaaagcacatcccaactgcattgcctgtcagtggaaccttatcatccagtaatcctgatttattgcagtcacatcatcgcattttagacttcagtgctactcctgacttgccagatcaagtgctaagggtttttaaggctgatcagcaaagccgctacatcatgatcagtaaggacactacagcaaaggaagtggtcattcaggctatcagggagtttgctgttactgccaccccggatcaatattcactatgtgaggtctctgtcacacctgagggagtaatcaaacaaagaagacttccagatcagctttccaaacttgcagacagaatacaactgagtggaaggtattatctgaaaaacaacatggaaacagaaactctttgttcagatgaagatgctcaggagttgttgagagagagtcaaatttccctccttcagctcagcactgtggaagttgcaacacagctctctatgcgaaattttgaactctttcgcaacattgaacctactgaatatatagatgatttatttaaactcagatcaaaaaccagctgtgccaacctgaagagatttgaagaagtcattaaccaggaaacattttgggtagcatctgaaattctcagagaaacaaaccagctgaagaggatgaagatcattaagcatttcatcaagatagcactgcactgtagggaatgcaagaattttaactcaatgtttgcaatcatcagtggcctaaacctggcaccagtggcaagactgcgaacgacctgggagaaacttcccaataaatacgaaaaactatttcaagatctccaagacctgtttgatccttccagaaacatggcaaaatatcgtaatgttctcaatagtcaaaatctacaacctcccataatccctctattcccagttatcaaaaaggatctcaccttccttcacgaaggaaatgactcaaaagtagacgggctggtcaattttgagaagctaaggatgattgcaaaagaaattcgtcacgttggccgaatggcttcagtgaacatggaccctgccctcatgttcaggactcggaagaagaaatggcggagtttggggtctctcagccagggtagtacaaatgcaacagtgctagatgttgctcagacaggtggtcataaaaagcgggtacgtcgtagttcctttctcaatgccaaaaagctttatgaagatgcccaaatggctcgaaaagtgaagcagtacctttccaatttggagctagaaatggacgaggagagtcttcagacattatctctgcagtgtgagccagcaaccaacacattgcctaagaatcctggtgacaaaaagcctgtcaaatccgagacctctccagtagctccaagggcagggtcacaacagaaagctcagtccctgccacagccccagcagcagccaccaccagcacataaaatcaaccagggactacaggttcccgccgtgtccctttatccttcacggaagaaagtgcccgtaaaggatctcccaccttttggcataaactctccacaagctttaaaaaaaattctttctttgtctgaagaaggaagtttggaacgtcacaagaaacaggctgaagatacaatatcaaatgcatcttcgcagctttcttctcctcctacttctccacagagttctccaaggaaaggctatactttggctcccagtggtactgtggataatttttcagattctggtcacagtgaaatttcttcacgatccagtattgttagcaattcgtcttttgactcagtgccagtctcactgcacgatgagaggcgccagaggcattctgtcagcatcgtggaaacaaacctagggatgggcaggatggagaggcggaccatgattgaacctgatcagtatagcttggggtcctatgcaccaatgtccgagggccgaggcttatatgctacagctacagtaatttcttctccaagcacagaggaactttcccaggatcagggggatcgcgcgtcacttgatgctgctgacagtggccgtgggagctggacgtcatgctcaagtggctcccatgataatatacagacgatccagcaccagagaagctgggagactcttccattcgggcatactcactttgattattcaggggatcctgcaggtttatgggcatcaagcagccatatggaccaaattatgttttctgatcatagcacaaagtataacaggcaaaatcaaagtagagagagccttgaacaagcccagtcccgagcaagctgggcgtcttccacaggttactggggagaagactcagaaggtgacacaggcacaataaagcggaggggtggaaaggatgtttccattgaagccgaaagcagtagcctaacgtctgtgactacggaagaaaccaagcctgtccccatgcctgcccacatagctgtggcatcaagtactacaaaggggctcattgcacgaaaggagggcaggtatcgagagcccccgcccacccctcccggctacattggaattcccattactgactttccagaagggcactcccatccagccaggaaaccgccggactacaacgtggcccttcagagatcgcggatggtcgcacgatcctccgacacagctgggccttcatccgtacagcagccacatgggcatcccaccagcagcaggcctgtgaacaaacctcagtggcataaaccgaacgagtctgacccgcgcctcgccccctatcagtcccaagggttttccaccgaggaggatgaagatgaacaagtttctgctgtttgaggcacagacttttctggaagcagagcgagccacctgaaaggagagcacaagaagacgtcctgagcattggagccttggaactcacattctgaggacggtggaccagtttgcctccttccctgccttaaaagcagcatggggcttcttctccccttcttcctttcccctttgcatgtgaaatactgtgaagaaattgccctggcacttttcagactttgttgcttgaaatgcacagtgcagcaatcttcgagctcccactgttgctgcctgccacatcacacagtatcattccaaattccaagatcatcacaacaagatgattcactctggctgcacttctcaatgcctggaaggattttttttaatcttccttttagatttcaatccagtcctagcacttgatctcattgggataatgagaaaagctagccattgaactacttggggcctttaacccaccaaggaagacaaagaaaaacaatgaaatcctttgagtacagtgcttgtccacttgtttacaatgtcctccttttaaaaaaaaaaaatgagtttaaagattttgttcagagagtaaatatatatccatttaatgattacagtattattttaaaccttaagtagggttgccagcctggtttctgaaaaaccaaatatgccggacagggtgtggccacaccaagaagacgggaagacctggcttgtgaccctggcttcccatgtccttctggtctcacccgcgaagtgccctatcctggaagtatgaaatgttagccaattaataccaagacacctcatctgctccttccccagtggatggggttcttctgtaaaactgtttgcacatggccaggggagggaactaggacccttgtgtcctgtctgagccttatggaggcaggacggtgtcattggcggatgtgtcctgctccattgagatggatggcaaaccccatttttaagttatatttctttgatttttgttaatttagaggtgtaggttttgttttttgtttttttgtttttttttaagagaaacatttataactggatagcattgcagtgaaagcagcttgggatgttggagctaatgccagctgtttatactgctctttcaagacagcctccctttattgaattggcattagggaataaacaagcctttaaacgtgataaaagatcaaaaacctggttagacatgccagcctttgcaaggcaggttagtcaccaaagactaacctccaagtggctttatggacgctgcatatagagaaggcctaagtgtagcaaccatctgctcacagctgctattaaccctataatgactgaaatgacccctccactctatttttgtgttgttttgcacagactccggaaaagtgaaggctgccaatctgagtagtactcaaatgtgaggaactgctggtcttggattttttttccattaaattcagctgatcatattgatcagtagataaacgtaaatagcttcaaattttaaaagtggaattgcagtgttttttcactgtatcaaacaatgtcagtgctttatttaataattctcttctgtatcatggcatttgtctacttgcttattacattgtcaattatgcatttgtaattttacatgtaatatgcattatttgccagttttattatataggctatggacctcatgtgcatatagaaagacagaaatctagctctaccacaagttgcacaaatgttatctaagcattaagtaattgtagaacataggactgctaatctcagttcgctctgtgatgtcaagtgcagaatgtacaattaactggtgatttcctcatacttttgatactacttgtacctgtatgtcttttagaaagacattggtggagtctgtatcccttttgtatttttaatacaataattgtacatattggttatatttttgttgaagatggtagaaatgtactatgtttatgcttctacatccagtttgtacaagctggaaaataaataaatataacataaagccttgcctatattcttaa

SEQ ID NO: 178682 - protein, 108 aa, Artificial Sequence [sequence omitted]

SEQ ID NO: 178683 - DNA, 1188 bp, Artificial Sequence
  derived and/or modified sequence
gcaggcgcggtggtcggacgacagaccgtgtgtttccaaaatggcggcagcgatggatgtggataccccgagcggcaccaacagcggcgcgggcaagaagcgctttgaagtgaaaaagtggaatgcagtagccctctgggcctgggatattgtggttgataactgtgccatctgcaggaaccacattatggatctttgcatagaatgtcaagctaaccaggcgtccgctacttcagaagagtgtactgtcgcatggggagtctgtaaccatgcttttcacttccactgcatctctcgctggctcaaaacacgacaggtgtgtccattggacaacagagagtgggaattccaaaagtatgggcactaggaaaagacttcttccatcaagcttaattgttttgttattcatttaatgactttccctgctgttacctaattacaaattggatggaactgtgtttttttctgctttgttttttcagtttgctgtttctgtagccatattgtattctgtgtcaaataaagtccagttggattctggaacggatgctctctcttgtgtatgtgaacaaagtgaacataaatgaagagtctccccttccaaggctgaaaactcagcttttgaaagtgaaatgtttgttcatcggggccagagcagggttgtcctctgagcgcatcacttagtgacgaggaatccaacagctcaaggcagagtgtggatcaccggctcccgaaaacagcagtcagcccttctttctcctgtgtgacagcagtgggcagctgaaagagggaagaatgtgggattcagtcatcaaacccagttctgagtcctggttccacagcttgggtactgatggcaatcttggccaagttgtctctctactctgaactttcctcctctgtactgtgggcttctgaggactaagtggcatcatgtgggcacagagagaagctttgtaaaatgtaaaaccgctatacaaatgtgacctttggttgtgtatgacagcagtccccaacctttttgccaccagggattggtttcatggaagacgatttttccatggaccgggggtggggcgggggtgtgcttggggatggttttggaactgttccacctgagatcatgaggcagtagatggaccgcgcaacctagatccctcacatgcacggttcgccaatagggttgaa

SEQ ID NO: 178684 - DNA, 327 bp, Artificial Sequence
  derived and/or modified sequence
atggccgccgcgatggacgtggacaccccctcaggaacaaactccggcgccggtaagaaacggttcgaagtgaaaaaatggaatgcggtggccctctgggcctgggacatcgtagtggacaattgcgctatctgcagaaaccacatcatggatctgtgtatcgagtgtcaggcaaaccaggcttctgccacatcggaggaatgtactgtggcctggggcgtctgtaatcacgccttccactttcattgcatttcacgatggttgaagacacggcaagtgtgccctttagataatcgcgagtgggagtttcagaaatatggccactag

SEQ ID NO: 178685 - DNA, 327 bp, Artificial Sequence
  derived and/or modified sequence
atggctgctgccatggatgtggacaccccatctggcaccaacagcggggccggcaagaagagatttgaggtgaagaagtggaatgctgtggccctgtgggcctgggacatcgtggtggacaactgtgccatctgcaggaaccacatcatggacctgtgcatcgagtgccaggccaaccaggccagcgccaccagtgaagaatgtactgtggcctggggcgtgtgcaaccacgccttccacttccactgcatcagccgctggctgaagacccggcaggtgtgccccctggacaaccgggagtgggagttccagaagtatggccactag

SEQ ID NO: 178686 - DNA, 327 bp, Artificial Sequence
  derived and/or modified sequence
atggccgccgccatggacgtggacacccccagcggcaccaacagcggggccgggaaaaaaaggttcgaagtgaaaaagtggaatgcggttgctctgtgggcctgggatattgtcgtcgataactgcgccatctgccggaaccacattatggatctctgcatcgagtgccaggccaatcaggcatctgcgacctccgaggaatgcacagtggcctggggagtctgcaatcacgccttccatttccattgcatctcaaggtggttgaaaactcgccaggtttgcccactcgataatcgtgaatgggaatttcagaagtatggacactag

SEQ ID NO: 178687 - DNA, 327 bp, Artificial Sequence
  derived and/or modified sequence
atggccgcagccatggatgtagatactccttctggcactaacagtggagccggaaaaaagcgttttgaagtgaaaaaatggaatgctgtggcactttgggcatgggacatcgtggtggataattgtgcaatctgcaggaaccatattatggacctctgtattgaatgtcaagccaaccaagcctccgccacaagcgaagaatgtactgtagcctggggtgtttgtaatcatgctttccattttcactgtataagccgatggctcaagacaaggcaggtgtgtcctctagataatagggagtgggagttccagaagtatggacattag

SEQ ID NO: 178688 - DNA, 327 bp, Artificial Sequence
  derived and/or modified sequence
atggccgccgccatggacgtggacacccccagcggcaccaacagcggcgccggcaagaagagattcgaggtgaagaagtggaacgccgtggccctgtgggcctgggacatcgtggtggacaactgcgccatctgcagaaaccacatcatggacctgtgcatcgagtgccaggccaaccaggccagcgccaccagcgaggagtgcaccgtggcctggggcgtgtgcaaccacgccttccacttccactgcatcagcagatggctgaagaccagacaggtgtgccccctggacaacagagagtgggagttccagaagtacggccactag

SEQ ID NO: 178689 - protein, 322 aa, Artificial Sequence
  derived and/or modified sequence
MCPVDKAHRNQCQACRLKKCLQAGMNQDAVQNERQPRSTAQVHLDSMESNTESRPESLVAPPAPAGRSPRGPTPMSAARALGHHFMASLITAETCAKLEPEDADENIDVTSNDPEFPSSPYSSSSPCGLDSIHETSARLLFMAVKWAKNLPVFSSLPFRDQVILLEEAWSELFLLGAIQWSLPLDSCPLLAPPEASAAGGAQGRLTLASMETRVLQETISRFRALAVDPTEFACMKALVLFKPETRGLKDPEHVEALQDQSQVMLSQHSKAHHPSQPVRFGKLLLLLPSLRFITAERIELLFFRKTIGNTPMEKLLCDMFKN

SEQ ID NO: 178690 - protein, 367 aa, Artificial Sequence
  derived and/or modified sequence
METRPTALMSSTVAAAAPAAGAASRKESPGRWGLGEDPTGVSPSLQCRVCGDSSSGKHYGIYACNGCSGFFKRSVRRRLIYRCQVGAGMCPVDKAHRNQCQACRLKKCLQAGMNQDAVQNERQPRSTAQVHLDSMESNTESRPESLVAPPAPAGRSPRGPTPMSAARALGHHFMASLITAETCAKLEPEDADENIDVTSNDPEFPSSPYSSSSPCGLDSIHETSARLLFMAVKWAKNLPVFSSLPFRDQVILLEEAWSELFLLGAIQWSLPLDSCPLLAPPEASAAGGAQGRLTLASMETRVLQETISRFRALAVDPTEFACMKALVLFKPETRGLKDPEHVEALQDQSQVMLSQHSKAHHPSQPVR

SEQ ID NO: 178691 - DNA, 1991 bp, Artificial Sequence
  derived and/or modified sequence
cagcagcagagttaagtagtattgctttaattgcaacaagctgagctaatgtgggaagaatgcagtagagtggcacagaagaatgctaacccgaaactctaagcctgttccctggaatcttccatctggatggaggagagaaagttgacctggagtgaggttcaatgtaaggacaagatctgcacccggagaagctctctctcggagagcacaggcggcctgaggagtcaaaacaggtggcctgtggagtcagcacaggcagcctggaggaggtgaggaactgaagtttggacagattgagtcactttctcagggacacatggctggccggtgatggagaaggcgtgagcccctcgctccagtgccgcgtgtgcggagacagcagcagcgggaagcactatggcatctatgcctgcaacggctgcagcggcttcttcaagaggagcgtacggcggaggctcatctacaggtgccaggtgggggcagggatgtgccccgtggacaaggcccaccgcaaccagtgccaggcctgccggctgaagaagtgcctgcaggcggggatgaaccaggacgccgtgcagaacgagcgccagccgcgaagcacagcccaggtccacctggacagcatggagtccaacactgagtcccggccggagtccctggtggctcccccggccccggcagggcgcagcccacggggccccacacccatgtctgcagccagagccctgggccaccacttcatggccagccttataacagctgaaacctgtgctaagctggagccagaggatgctgatgagaatattgatgtcaccagcaatgaccctgagttcccctcctctccatactcctcttcctccccctgcggcctggacagcatccatgagacctcggctcgcctactcttcatggccgtcaagtgggccaagaacctgcctgtgttctccagcctgcccttccgggatcaggtgatcctgctggaagaggcgtggagtgaactctttctcctcggggccatccagtggtctctgcctctggacagctgtcctctgctggcaccgcccgaggcctctgctgccggtggtgcccagggccggctcacgctggccagcatggagacgcgtgtcctgcaggaaactatctctcggttccgggcattggcggtggaccccacggagtttgcctgcatgaaggccttggtcctcttcaagccagagacgcggggcctgaaggatcctgagcacgtagaggccttgcaggaccagtcccaagtgatgctgagccagcacagcaaggcccaccaccccagccagcccgtgaggtttgggaaattgctcctgctcctcccgtctttgaggtttatcactgcggaacgcatcgagctcctctttttccgcaagaccatagggaatactccaatggagaagctcctttgtgatatgttcaaaaactagtgggggtggaggtgaaatgtttccaagcactctggaaaacaatctactgaaacgaaacatttgcctactctttgccccagcaattcctcgtaggtgtgtgtacccagcagaaatgcccaccgaaagatattgtaagaatattcatagcagctttattcataatagccccaaactgtatattgatggtaggatgaattaacaagttgtggtatattcatataatgaaaaataatttaaaaagaatgaattacggatacatgtggcaacacaggtaaacttcacagacataaaagttgaatgaaagaagccaggccgaagttccatttatgcagagttcaggaacaggcaagactaattgacaataatagaagttggaatagtggttacttctgggtggtgggggattgatacagagggggctcatgggagccctctggtgtaccagaaatgttgattttgatctgggcagtggtttcacaaatgtattcatacgtaataattcattgagctgtgcactttattttgttagacctc

SEQ ID NO: 178692 - protein, 675 aa, Artificial Sequence
  derived and/or modified sequence
MAAAKVALTKRADPAELRTIFLKYASIEKNGEFFMSPNDFVTRYLNIFGESQPNPKTVELLSGVVDQTKDGLISFQEFVAFESVLCAPDALFMVAFQLFDKAGKGEVTFEDVKQVFGQTTIHQHIPFNWDSEFVQLHFGKERKRHLTYAEFTQFLLEIQLEHAKQAFVQRDNARTGRVTAIDFRDIMVTIRPHVLTPFVEECLVAAAGGTTSHQVSFSYFNGFNSLLNNMELIRKIYSTLAGTRKDVEVTKEEFVLAAQKFGQVTPMEVDILFQLADLYEPRGRMTLADIERIAPLEEGTLPFNLAEAQRQKASGDSARPVLLQVAESAYRFGLGSVAGAVGATAVYPIDLVKTRMQNQRSTGSFVGELMYKNSFDCFKKVLRYEGFFGLYRGLLPQLLGVAPEKAIKLTVNDFVRDKFMHKDGSVPLAAEILAGGCAGGSQVIFTNPLEIVKIRLQVAGEITTGPRVSALSVVRDLGFFGIYKGAKACFLRDIPFSAIYFPCYAHVKASFANEDGQVSPGSLLLAGAIAGMPAASLVTPADVIKTRLQVAARAGQTTYSGVIDCFRKILREEGPKALWKGAGARVFRSSPQFGVTLLTYELLQRWFYIDFGGVKPMGSEPVPKSRINLPAPNPDHVGGYKLAVATFAGIENKFGLYLPLFKPSVSTSKAIGGGP

SEQ ID NO: 178693 - protein, 567 aa, Artificial Sequence
  derived and/or modified sequence
MEDVKQVFGQTTIHQHIPFNWDSEFVQLHFGKERKRHLTYAEFTQFLLEIQLEHAKQAFVQRDNARTGRVTAIDFRDIMVTIRPHVLTPFVEECLVAAAGGTTSHQVSFSYFNGFNSLLNNMELIRKIYSTLAGTRKDVEVTKEEFVLAAQKFGQVTPMEVDILFQLADLYEPRGRMTLADIERIAPLEEGTLPFNLAEAQRQKASGDSARPVLLQVAESAYRFGLGSVAGAVGATAVYPIDLVKTRMQNQRSTGSFVGELMYKNSFDCFKKVLRYEGFFGLYRGLLPQLLGVAPEKAIKLTVNDFVRDKFMHKDGSVPLAAEILAGGCAGGSQVIFTNPLEIVKIRLQVAGEITTGPRVSALSVVRDLGFFGIYKGAKACFLRDIPFSAIYFPCYAHVKASFANEDGQVSPGSLLLAGAIAGMPAASLVTPADVIKTRLQVAARAGQTTYSGVIDCFRKILREEGPKALWKGAGARVFRSSPQFGVTLLTYELLQRWFYIDFGGVKPMGSEPVPKSRINLPAPNPDHVGGYKLAVATFAGIENKFGLYLPLFKPSVSTSKAIGGGP

SEQ ID NO: 178694 - DNA, 2028 bp, Artificial Sequence
  derived and/or modified sequence
atggccgcagccaaggtggccctgacaaaacgcgcagacccagccgagcttaggactatcttcctcaaatatgccagtatcgagaagaatggcgagtttttcatgtcaccgaatgacttcgtcactcggtatctgaatattttcggcgaatcacagcccaaccctaagaccgttgagttgttatccggggtcgtggaccagaccaaagacggactcatcagctttcaggagttcgttgcgttcgaatctgtgctttgcgcaccagatgcattgtttatggtggcctttcagctgttcgataaagccggcaaaggggaagtgactttcgaagacgttaagcaggtgttcgggcagacaactattcatcagcatattccttttaactgggattctgaatttgtccaattgcacttcggcaaagaaaggaagcggcacttgacttatgcggaattcacacagttcctactagagatccaactggaacatgctaagcaggcgtttgtgcagcgggataacgctcgcacaggccgtgttacagccatcgatttccgtgatatcatggtgactatccggccacacgttcttaccccatttgtagaagagtgcctcgttgccgcagccggcggaactacctcccaccaggtgtctttttcgtactttaacgggttcaacagcctgctcaacaacatggagctgattagaaaaatctattcgacacttgcaggaacaagaaaagacgtcgaggtgacaaaggaagaatttgtcttggctgcccaaaagttcggccaagtaacaccaatggaagttgatatcctgttccaacttgctgatctttacgagccccgcgggagaatgaccttagccgatatcgaaagaattgccccattggaagaaggtaccttacccttcaacttggctgaggcccagcgccagaaagccagcggagacagtgccaggcctgtgcttctccaagtagccgagagcgcatataggttcgggcttggctcagtggcaggagccgtcggagccaccgcagtttatccaattgatttagttaaaactcgaatgcaaaaccagcgatctaccgggagcttcgtgggagaacttatgtacaagaactccttcgactgttttaagaaggttctgcgctacgagggattcttcggtctgtatcgaggcttgctccctcagctgcttggtgtagccccagagaaggcaattaagcttaccgtcaatgactttgttcgggataaattcatgcataaagacggtagcgttcccctggccgcagagattttggcaggcggttgcgccggtggttctcaggtgattttcactaacccactcgagatagtcaaaattaggctgcaagtagcaggagaaatcacaacaggaccccgcgtttctgccctttctgtggttcgggacttggggttcttcggtatttacaagggcgccaaggcctgctttctccgagacattccgttctcagcaatttacttcccgtgttatgcccatgttaaggcctccttcgctaatgaggacggacaagtgtccccaggcagtttgttactggccggagcgatagcaggaatgcccgcagcttccttggtgaccccagccgatgtcattaagacacgactgcaggtggcagcacgcgctggccagacgacttactcaggtgtaatcgattgtttcagaaaaattttgcgtgaagaaggccctaaggccctttggaaaggcgcaggagcacgcgtatttagatcttcaccccagttcggggtgacactcttgacctacgaactcttgcagaggtggttttatatcgactttgggggtgtcaagccaatgggatctgagcctgtgccaaaatcccggattaatttgcctgcccccaacccagaccacgtaggaggatacaagctggccgtggccacatttgccggaatcgaaaataaatttggcttatatctccccctgtttaaacccagcgtatctacttctaaagctattggcgggggcccctag

SEQ ID NO: 178695 - DNA, 2028 bp, Artificial Sequence
  derived and/or modified sequence
atggctgctgccaaggtggccctgaccaagagagctgaccctgctgagctgcggaccatcttcctgaagtatgccagcattgagaagaatggagagttcttcatgagccccaatgactttgtgacccgctacctgaacatctttggagagagccagcccaaccccaagacagtggagctgctgagcggcgtggtggaccagaccaaggatggcctcatctccttccaggagtttgtggcctttgaatctgtgctgtgtgccccagatgccctcttcatggtggccttccagctgtttgacaaggccggcaagggggaggtgacctttgaagatgtgaagcaggtgtttggccagaccaccatccaccagcacatccccttcaactgggacagcgagtttgtgcagctgcactttgggaaggagaggaagaggcacctgacctatgcagagttcacccagttcctgctggagatccagctggagcacgccaagcaggcctttgtgcagagggacaatgccaggacaggccgggtgacagccatcgacttccgggacatcatggtgaccatccggccccacgtgctgaccccatttgtggaggagtgcctggtggccgctgctgggggcaccaccagccaccaggtgtccttctcctacttcaacggcttcaacagcctgctgaacaacatggagctgatcaggaagatctacagcaccctggccggcaccaggaaggatgtggaggtgaccaaggaggagtttgtgctggccgcccagaagtttggccaggtgacccccatggaggtggacatcctcttccagctggccgacctgtatgagccccggggccgcatgaccctggccgacatcgagagaattgcccccctggaggagggcaccctgcccttcaacctggccgaggcccagaggcagaaggccagcggggacagcgcccggcctgtgctgctgcaggtggccgagagcgcctaccgcttcggcctgggctctgtggccggggctgtgggcgccacagctgtgtaccccatcgacctggtgaagaccaggatgcagaaccagaggagcacaggcagctttgtgggggagctgatgtacaagaacagctttgactgcttcaagaaggtgctgcgctatgagggcttcttcggcctgtaccggggcctgctgccccagctgctgggcgtggcccctgagaaggccatcaagctgactgtgaatgactttgtgcgggacaagttcatgcacaaggatggctctgtgcccctggccgctgagatcctggccggcggctgtgccggcggcagccaggtgatcttcaccaaccccctggagatcgtgaagatccggctgcaggtggccggggagatcaccaccggcccccgggtgtctgccctgtctgtggtgcgggacctgggcttcttcggcatctacaagggggccaaggcctgcttcctgcgggacatccccttcagcgccatctacttcccctgctacgcccacgtgaaggccagctttgccaatgaagatggccaggtgtccccaggcagcctgctgctggccggggccatcgccggcatgcctgctgccagcctggtgaccccagcagatgtgatcaagacccggctgcaggtggccgcccgggccggccagaccacctacagcggcgtgattgactgcttcaggaagatcctgcgggaggagggccccaaggccctgtggaagggggccggggcccgggtcttccgcagcagcccccagtttggagtgaccctgctgacctatgagctgctgcagcgctggttctacatcgactttggaggagtgaagcccatgggcagcgagcctgtgcccaagagccgcatcaacctgcctgcccccaacccagaccacgtgggcggctacaagctggccgtggccacctttgctggcatcgagaacaagtttggcctgtacctgcccctcttcaagcccagcgtgtccaccagcaaggccatcggcggcggcccctag

SEQ ID NO: 178696 - DNA, 2028 bp, Artificial Sequence
  derived and/or modified sequence
atggccgccgccaaggtggccctgaccaagcgggccgaccccgccgaactgcgaaccattttccttaaatatgcaagtatagaaaagaatggggaattcttcatgagcccaaacgattttgttacccgctacctgaacattttcggtgagagccagcccaacccaaagacagtggagctactgagcggtgtcgtcgaccagactaaggatggtctcatcagctttcaggagtttgtggcctttgagagcgtactgtgcgcacctgatgcactgttcatggtggctttccagttgtttgataaagcggggaagggggaggtcacctttgaagacgtcaaacaggtgtttggccagacgacaattcatcaacatattcctttcaactgggattctgaattcgtccagttacactttggcaaggagcgcaagcggcaccttacgtatgcagagttcacacagtttctgctggaaattcaactggagcacgcaaaacaagcatttgttcaaagggataatgcccgcacaggccgcgtaactgcgatcgacttccgcgacattatggtcaccatcagacctcacgtcctgaccccctttgtcgaggagtgtttggtagccgccgccggcggaacaacgagccaccaggttagcttcagctattttaatgggttcaacagtctgttgaataatatggaacttatcagaaaaatctacagcacattagcaggaacccggaaggacgtagaggttacaaaagaggagtttgtattagctgcccaaaaatttggacaggtgacccctatggaggttgacatcctgtttcagttggccgacctatacgagcccagagggcgcatgacgctagctgacatcgagagaatcgctccactcgaagagggcactctgcccttcaacctggcggaagcccagagacaaaaggcatccggcgattctgccagacctgtgctgctgcaagtcgctgagagcgcgtaccggtttggtctcgggagtgtggccggagccgtcggtgccacggcggtgtacccgatcgacttagtcaagactagaatgcaaaatcagagaagcaccggctcttttgtcggcgagttgatgtacaaaaacagctttgattgctttaagaaggtgcttcgctacgaagggttctttgggctgtatcggggactgctgccccagctgttgggagtggcccccgagaaggctattaagctgacggtcaatgattttgtcagggataagtttatgcataaggatggtagtgtcccactggccgccgagattttggccggtggttgcgccggcggaagccaggtgatcttcactaatccactagaaattgttaaaattagactccaggtggcaggcgagattactacagggccaagggtgagcgccctctctgtggtccgggatcttggctttttcggtatttataaaggggctaaggcgtgcttccttcgggacattccattctctgccatctattttccctgttatgcccatgtcaaagctagttttgctaacgaggatgggcaggtcagtcccgggagcctcttactggctggcgccatagcagggatgccagcggccagcctcgtcactcccgccgatgttatcaagactcgtttgcaggtcgcagctagggcgggtcaaaccacttattcaggcgtaatcgattgcttcaggaaaattcttcgggaggagggtcccaaggcactgtggaaaggagctggagcaagagtgttcagatcctcgccccaatttggggtgaccctgctgacatatgagcttttgcagcggtggttctacatagactttggaggtgttaagcccatgggctctgagcccgtgcccaaatcaaggatcaatttgcccgctcctaacccagaccacgtcggcggctataagctcgctgtggctacattcgctggtatcgagaacaaatttggcctgtaccttcctctgtttaagccctcagtgtctactagcaaggctattgggggagggccctag

SEQ ID NO: 178697 - DNA, 2028 bp, Artificial Sequence
  derived and/or modified sequence
atggccgcagccaaagtcgcactcaccaagagggccgatccggcagagcttaggaccatttttctcaaatacgcttcaattgaaaagaatggcgaattcttcatgagtcccaatgactttgtcacccgttatcttaatattttcggagagagccagcctaatcctaaaaccgtcgaattgctgagtggagtcgtggatcagacgaaggacggcctgatatctttccaagagttcgtcgcatttgaatcagtgctctgcgctcctgacgctctttttatggtggcttttcagctgtttgataaagccggaaagggggaggtgaccttcgaggatgttaagcaggtgttcggccagacgactatccaccagcatatccccttcaactgggactctgagttcgtgcagctgcacttcgggaaggagagaaaacgccaccttacctacgccgaattcacccagtttctgctggaaattcaattggagcatgccaagcaggccttcgtgcagagagataacgccagaaccggcagagtgacagcgattgacttccgcgacattatggttacaatccggccacatgtgctcaccccctttgtggaagaatgcttggtcgccgctgccggtggcactacatctcaccaggtttctttttcctacttcaatggctttaactctctgctgaacaacatggaactcattagaaagatttactccacactggctggtacccgaaaggatgtggaggttactaaggaagaattcgttcttgctgcacagaagtttggacaggtgactcccatggaggtggatattctgtttcaattggcagatctctatgaaccccgaggccgaatgactctggccgatattgaaaggatcgctcctctcgaagaggggactctccctttcaacctggcagaggcccagagacagaaggcaagcggcgactccgcacggccagtgctcctgcaggttgcagagtcagcctatcgcttcggcctgggcagcgtggctggcgctgttggggctactgcggtgtacccaatcgatcttgtcaaaacacgaatgcagaatcaaagatccaccggatcctttgttggggagctgatgtataagaattcattcgattgtttcaaaaaagtgctgcggtatgaaggctttttcggactgtatcgcggattacttccgcagctgttaggagtggcaccggagaaagccattaaactgacggtaaatgacttcgtgagggataagtttatgcataaggatgggagtgtgccactggctgctgaaattctcgcgggtgggtgtgctggaggctctcaggtcatcttcacgaatcctttagagatcgtaaagatccgccttcaggttgcaggcgaaataactaccggtcctcgagtgtcagccctgtctgtcgtcagggaccttggattcttcgggatatataagggtgcaaaagcgtgctttcttcgggatatccctttttctgccatctactttccatgctacgctcacgtcaaggcatctttcgcaaacgaggacggacaggtcagtcctggaagtctcctcctggctggagctatcgcaggaatgcctgcagcctccctcgtgactcctgcggatgttattaagactagactgcaggtggccgcaagggctggccagacaacttacagcggcgtgatcgattgttttagaaaaattctgagggaagagggtcctaaagccttgtggaagggagccggagccagagtgttccggtcttctccccagtttggggtcacgctactgacctatgaactgctgcagagatggttttacatcgactttgggggtgtcaagccgatgggcagcgagcctgtgcccaagtcccgtattaacttacccgctcctaaccccgaccacgtagggggatataagttggcagtagccaccttcgcaggcattgagaacaagtttggcctgtacctgcctttgttcaaaccttccgtgtctaccagcaaagctatcggtggcggtccctag

SEQ ID NO: 178698 - DNA, 3136 bp, Artificial Sequence
  derived and/or modified sequence
ggccaggaacgcacgctgcctggccgtatcgccgcccccaccgccgccgccgccgggactagaagtgagccgcccgggtcccaaacgccagccagccagtcagtgggtcccgcagtcgcccgcaaccggggcgaatcatggcggccgccaaggtggctttaaccaagagagcagatccagctgagcttagaacaatatttttgaagtatgcaagcattgagaaaaacggtgaatttttcatgtcccccaatgactttgtcactcgatacttgaacatttttggagaaagccagcctaatccaaagactgtggaacttttaagtggagtggtggatcagaccaaagatggattaatatcttttcaagaatttgttgcctttgaatctgtcctgtgtgcccctgatgctttgtttatggtagcctttcagctgtttgacaaagctggcaaaggagaagtaacttttgaggatgttaagcaagtttttggacagaccacaattcatcaacatattccatttaactgggattcagaatttgtgcaactacattttggaaaagaaagaaaaagacacctgacatatgcggaatttactcagtttttattggaaatacaactggagcacgcaaagcaagcctttgtgcaacgggacaatgctaggactgggagagtcacagccatcgacttccgagacatcatggtcaccatccgcccccatgtcttgactccttttgtagaagaatgtctagtagctgctgctggaggtaccacatcccatcaagttagtttctcctattttaatggatttaattcgctccttaacaacatggaactcattagaaagatctatagcactctggctggcaccaggaaagatgttgaagtgactaaggaggagtttgttctggcagctcagaaatttggtcaggttacacccatggaagttgacatcttgtttcagttagcagatttatatgagccaaggggacgtatgaccttagcagacattgaacggattgctcctctggaagagggaactctgccctttaacttggctgaggcccagaggcagaaggcctcaggtgattcagctcgaccagttcttctacaagttgcagagtcggcctacaggtttggtctgggttctgttgctggagctgttggagccactgctgtgtatcctatcgatcttgtaaaaactcgaatgcagaaccaacgatcaactggctcttttgtgggagaactcatgtataaaaacagctttgactgttttaagaaagtgctacgctatgaaggcttctttggactgtatagaggtctgttgccacagttattgggagttgccccagagaaggccataaaacttacagtgaacgattttgtgagggataaatttatgcacaaagatggttcggtcccacttgcagcagaaattcttgctggaggctgcgctggaggctcccaggtgattttcacaaatcctttagaaatcgtcaagatccgtttgcaagtggcaggagaaatcaccactggtcctcgagtcagtgctctgtctgtcgtgcgggacctggggttttttgggatctacaagggtgccaaagcatgctttctgcgggacattcctttctcggccatctactttccgtgctatgctcatgtgaaggcttcctttgcaaatgaagatgggcaggttagcccaggaagcctgctcttagctggtgccatagctggtatgcctgcagcatctttagtgacccctgctgatgttatcaagacgagattacaggtggctgcccgggctggccaaaccacttacagcggagtgatagactgctttagaaagatactgcgtgaagaaggaccaaaagctctgtggaagggagctggtgctcgtgtatttcgatcctcaccccagtttggtgtaactttgctgacttacgaattgctacagcgatggttctacattgattttggaggagtaaaacccatgggatcagagccagttcctaaatccaggatcaacctgcctgccccgaatcctgatcacgttgggggctacaaactggcagttgctacatttgcagggattgaaaacaaatttggactttacctacctctcttcaagccatcagtatctacctcaaaggctattggtggaggcccataggaagatcagccctgggatagtgctgtctttttgtgggtactgcagtaaagaacatccctcctgggaatgaagcaatgcttcatcccttttacgtccatctcttgtttaaattcaagtccaggcttttttatcatgtgaaatcattcattttctgggtgttttcttaaccagatcattgtgaaattattcataattattatttggccctctgcccagaaacctttgtttgcatctgaaaattgatgggatttggtcaacactaacatgatttggggaaaggagcaagtcagaatagaaattagtactcccctccttgaactaggattgtagtcccaaagaggctactgtaaggcaatcatggtgctcagagcagtgtttcgtgtgtgttttaaactggtaggaaactaggtgcatatttataaaaataaaaaacactgggagaaatgaaaaaatatatatcaaatatattcagcctggcttcaaattgtaagcatgcacaaattctgtctctggattatattatgaagcttttatgtgaaacatgtttctttgtaatgaaaaccacattggagatgtttagtaatcatattgttactggtaccaagactactagggaaatgcctttgtactttagggaagtacttttggcattttactgtacagacagaaaaaactgagatgtagcccctctcctggaagtgctaattttgaaaaactgctcatatgatgtacatgtactgattactgcctattttaataaacactcttgaaaaatgcatgttgccctgttgctgcctgccctattctcctcatctccccatcattggtacccacttgcttttaaaatccactttatcttgaataatgtaagacaaatatgttctgacataagtatttaattcatgttgccttgcataatggtcagaggcgcatgaatttgtgaaggtggaaataaactatttgtaaagtga

SEQ ID NO: 178699 - DNA, 2028 bp, Artificial Sequence
  derived and/or modified sequence
atggccgccgccaaggtggccctgaccaagagagccgaccccgccgagctgagaaccatcttcctgaagtacgccagcatcgagaagaacggcgagttcttcatgagccccaacgacttcgtgaccagatacctgaacatcttcggcgagagccagcccaaccccaagaccgtggagctgctgagcggcgtggtggaccagaccaaggacggcctgatcagcttccaggagttcgtggccttcgagagcgtgctgtgcgcccccgacgccctgttcatggtggccttccagctgttcgacaaggccggcaagggcgaggtgaccttcgaggacgtgaagcaggtgttcggccagaccaccatccaccagcacatccccttcaactgggacagcgagttcgtgcagctgcacttcggcaaggagagaaagagacacctgacctacgccgagttcacccagttcctgctggagatccagctggagcacgccaagcaggccttcgtgcagagagacaacgccagaaccggcagagtgaccgccatcgacttcagagacatcatggtgaccatcagaccccacgtgctgacccccttcgtggaggagtgcctggtggccgccgccggcggcaccaccagccaccaggtgagcttcagctacttcaacggcttcaacagcctgctgaacaacatggagctgatcagaaagatctacagcaccctggccggcaccagaaaggacgtggaggtgaccaaggaggagttcgtgctggccgcccagaagttcggccaggtgacccccatggaggtggacatcctgttccagctggccgacctgtacgagcccagaggcagaatgaccctggccgacatcgagagaatcgcccccctggaggagggcaccctgcccttcaacctggccgaggcccagagacagaaggccagcggcgacagcgccagacccgtgctgctgcaggtggccgagagcgcctacagattcggcctgggcagcgtggccggcgccgtgggcgccaccgccgtgtaccccatcgacctggtgaagaccagaatgcagaaccagagaagcaccggcagcttcgtgggcgagctgatgtacaagaacagcttcgactgcttcaagaaggtgctgagatacgagggcttcttcggcctgtacagaggcctgctgccccagctgctgggcgtggcccccgagaaggccatcaagctgaccgtgaacgacttcgtgagagacaagttcatgcacaaggacggcagcgtgcccctggccgccgagatcctggccggcggctgcgccggcggcagccaggtgatcttcaccaaccccctggagatcgtgaagatcagactgcaggtggccggcgagatcaccaccggccccagagtgagcgccctgagcgtggtgagagacctgggcttcttcggcatctacaagggcgccaaggcctgcttcctgagagacatccccttcagcgccatctacttcccctgctacgcccacgtgaaggccagcttcgccaacgaggacggccaggtgagccccggcagcctgctgctggccggcgccatcgccggcatgcccgccgccagcctggtgacccccgccgacgtgatcaagaccagactgcaggtggccgccagagccggccagaccacctacagcggcgtgatcgactgcttcagaaagatcctgagagaggagggccccaaggccctgtggaagggcgccggcgccagagtgttcagaagcagcccccagttcggcgtgaccctgctgacctacgagctgctgcagagatggttctacatcgacttcggcggcgtgaagcccatgggcagcgagcccgtgcccaagagcagaatcaacctgcccgcccccaaccccgaccacgtgggcggctacaagctggccgtggccaccttcgccggcatcgagaacaagttcggcctgtacctgcccctgttcaagcccagcgtgagcaccagcaaggccatcggcggcggcccctag

SEQ ID NO: 178700 - protein, 301 aa, Artificial Sequence
  derived and/or modified sequence
MKSNPAIQAAIDLTAGAAGGTACVLTGQPFDTMKVKMQTFPDLYRGLTDCCLKTYSQVGFRGFYKGTSPALIANIAENSVLFMCYGFCQQVVRKVAGLDKQAKLSDLQNAAAGSFASAFAALVLCPTELVKCRLQTMYEMETSGKIAKSQNTVWSVIKSILRKDGPLGFYHGLSSTLLREVPGYFFFFGGYELSRSFFASGRSKDELGPVPLMLSGGVGGICLWLAVYPVDCIKSRIQVLSMSGKQAGFIRTFINVVKNEGITALYSGLKPTMIRAFPANGALFLAYEYSRKLMMNQLEAY

SEQ ID NO: 178701 - protein, 133 aa, Artificial Sequence
  derived and/or modified sequence
MKSNPAIQAAIDLTAGAAGGTACVLTGQPFDTMKVKMQTFPDLYRGLTDCCLKTYSQVGFRGFYKGTSPALIANIAENSVLFMCYGFCQQVVRKVAGLDKQAKLSTVWSVIKSILRKDGPLGFYHGLSSTLLR

SEQ ID NO: 178702 - protein, 241 aa, Artificial Sequence
  derived and/or modified sequence
MKSNPAIQAAIDLTAGAAGGTACVLTGQPFDTMKVAGLDKQAKLSDLQNAAAGSFASAFAALVLCPTELVKCRLQTMYEMETSGKIAKSQNTVWSVIKSILRKDGPLGFYHGLSSTLLREVPGYFFFFGGYELSRSFFASGRSKDELGPVPLMLSGGVGGICLWLAVYPVDCIKSRIQVLSMSGKQAGFIRTFINVVKNEGITALYSGLKPTMIRAFPANGALFLAYEYSRKLMMNQLEAY

SEQ ID NO: 178703 - DNA, 906 bp, Artificial Sequence
  derived and/or modified sequence
atgaagagcaaccccgccatacaagccgccattgacctaactgccggagctgcgggtggtaccgcgtgcgtgctgaccggccagcccttcgacaccatgaaagtcaagatgcagaccttccccgacctgtaccggggcttgactgactgctgtctcaaaacctattcgcaggtgggattcaggggtttctataaggggacctcaccagccctgattgctaacatcgctgagaacagtgttttgttcatgtgctacggcttttgccagcaggtggtacgcaaagttgccgggctagacaaacaagctaagttgtctgacctgcaaaatgcggcagccggcagcttcgcttcggcttttgctgcgctggttctttgcccaaccgagttggttaaatgtcgattgcagacaatgtacgagatggagaccagtgggaaaatcgctaagagccagaacacagtctggtccgtaattaagtcgatcctgcgaaaggatggcccgctagggttctaccacgggctgagctctactctccttagagaagtgcctggttactttttcttttttggtggttacgaactgtcaagaagcttcttcgcgtcaggtcgctcaaaggacgagctgggtccagtacctctcatgctttccgggggagtgggtggaatctgtctttggctggcagtgtaccccgtcgattgtataaagtcccgaatccaggtactcagtatgagcggaaagcaagccggcttcattcggacattcattaatgtggtcaagaatgagggaattacagccctttactcgggcctcaagcctacgatgattcgtgcattcccagccaacggcgccttgttcctagcttatgagtattcccgaaaactcatgatgaaccagctggaggcttactag

SEQ ID NO: 178704 - DNA, 402 bp, Artificial Sequence
  derived and/or modified sequence
atgaagagcaatcccgcaattcaagccgcaatcgatctcacagcaggagctgctggtggaaccgcgtgcgtcctcaccggccaaccattcgataccatgaaggtgaagatgcagacctttcctgacctttatcggggcctgacagactgctgcctcaagacctacagtcaggtgggcttcaggggattttataagggcacctctccggccctgatagccaatatcgcagagaactcagtactcttcatgtgttacggattctgccaacaggtggttcggaaagtcgccgggctggacaagcaggctaaactgtcaacagtgtggagcgtaatcaagtctatcctgagaaaagatgggcccctcggtttctatcatggcctgtcaagcactttacttaggtag

SEQ ID NO: 178705 - DNA, 402 bp, Artificial Sequence
  derived and/or modified sequence
atgaagtcgaatcccgccatccaggctgcaatagacctgactgccggagccgctggtggtacagcatgcgtcctgacaggccagccttttgatacgatgaaggtgaaaatgcaaacatttccagatttgtaccggggactcaccgactgctgtctcaagacgtactctcaggtcggctttcgtggtttctacaagggaacatcccccgcgctgatcgccaatattgccgaaaactcagtactgtttatgtgttacggcttctgtcagcaagtggtacgtaaagtcgccgggctggacaagcaggcgaagttatcaaccgtgtggtccgtcatcaagtccatcctcaggaaggacgggcccctggggttctaccacggcctctcatccaccttattgcggtag

SEQ ID NO: 178706 - DNA, 906 bp, Artificial Sequence
  derived and/or modified sequence
atgaagtctaaccccgctattcaagctgcaatcgatctcacagcaggagccgcaggtggaaccgcttgtgttctgaccggacaaccattcgacacaatgaaggtaaaaatgcagacgtttcccgacctgtatagggggctgacagattgctgcctcaaaacttactctcaagtgggattccgtggtttctacaaggggacgtctcctgcgctaatcgctaacatagccgaaaactccgtcctattcatgtgttatggattttgccagcaggtggtacgcaaggtagccgggctcgataagcaagccaaactgagcgatttacaaaatgcagcagctggttccttcgccagcgcattcgccgctcttgtgctctgccctaccgagcttgttaagtgcagactgcagaccatgtacgaaatggaaacttctggcaagatagcaaagtctcagaacacagtctggtcagttattaagagcatactgaggaaagacgggccgctcgggttttaccacggactttctagcacgctgctgcgcgaagtgcccggctatttctttttttttggaggttatgagttgtcacggagcttcttcgctagcggcaggtccaaggacgagctggggcccgttccattaatgctctccggaggcgttggcgggatctgtctctggctggctgtttacccggtggactgtataaagtcacgaattcaggtcctttcaatgagtggtaaacaggctggctttatccgcacattcatcaacgttgtgaagaatgaaggaataacagccctgtattccggactgaaaccgactatgatccgggccttccctgcaaacggggctctgttccttgcatatgagtattcccgcaagcttatgatgaaccagctggaggcttactag

SEQ ID NO: 178707 - DNA, 726 bp, Artificial Sequence
  derived and/or modified sequence
atgaagtctaatcccgcaatccaggctgctatcgacctgacagcaggtgccgccggggggaccgcatgcgtgctgactggacagcccttcgacaccatgaaagtggctgggctggacaaacaagccaagctgagcgatttacagaatgccgccgctgggtcttttgcctctgcttttgcggccttagtcctctgtccgacagaactagtaaaatgcaggctccaaaccatgtacgagatggaaaccagcggcaaaatagccaagtcacaaaacaccgtgtggtccgtaattaagtcaatcctccgaaaggatggtcctctcggcttttatcatggcttgtcgtctactttactccgcgaagtcccagggtatttcttctttttcgggggttacgaactgagccgcagcttcttcgcgagcggacggagcaaagacgaactgggacccgtaccactgatgctttcggggggtgtgggcgggatctgtctttggctcgcagtctaccccgttgactgcatcaaatcaagaatacaagttttgtctatgtctggcaaacaggccgggtttatccgcacttttattaatgtcgtgaaaaatgaaggcataacagccttgtacagtggcctcaagccaactatgattagggcattccccgcgaatggcgcgttattcctggcatacgagtatagccgaaaattgatgatgaatcagctcgaggcatattag

SEQ ID NO: 178708 - DNA, 906 bp, Artificial Sequence
  derived and/or modified sequence
atgaagagcaacccagccatccaggccgccatcgacctgacagctggagctgctgggggcacagcctgtgtgctgaccggccagccctttgacaccatgaaggtgaagatgcagaccttcccagacctgtaccggggcctgacagactgctgcctgaagacctacagccaggtgggcttccggggcttctacaagggcaccagccctgccctgattgccaacattgctgaaaattctgtgctcttcatgtgctacggcttctgccagcaggtggtgaggaaggtggccggcctggacaagcaggccaagctgagtgacctgcagaatgctgctgctggcagctttgccagcgcctttgctgccctggtgctgtgccccacagagctggtgaagtgccgcctgcagaccatgtatgagatggagaccagcggcaagatcgccaagagccagaacacagtgtggagcgtcatcaagagcatcctgaggaaggatggccccctgggcttctaccacggcctgagcagcaccctgctgcgggaggtgcccggctacttcttcttcttcggcggctatgagctgagccgctccttctttgccagcggccgcagcaaggatgagctgggccctgtgcccctgatgctgtctggaggagtgggcggcatctgcctgtggctggccgtgtaccctgtggactgcatcaagagccgcatccaggtgctgtccatgtctgggaagcaggccggcttcatccgcaccttcatcaacgtggtgaagaatgaaggcatcacagccctgtacagcggcctgaagcccaccatgatccgggccttccctgccaacggggccctcttcctggcctatgagtacagcaggaagctgatgatgaaccagctggaggcctactag

SEQ ID NO: 178709 - DNA, 402 bp, Artificial Sequence
  derived and/or modified sequence
atgaagagcaacccagccatccaggccgccatcgacctgacagctggagctgctgggggcacagcctgtgtgctgaccggccagccctttgacaccatgaaggtgaagatgcagaccttcccagacctgtaccggggcctgacagactgctgcctgaagacctacagccaggtgggcttccggggcttctacaagggcaccagccctgccctgattgccaacattgctgaaaattctgtgctcttcatgtgctacggcttctgccagcaggtggtgaggaaggtggccggcctggacaagcaggccaagctgagcacagtgtggagcgtcatcaagagcatcctgaggaaggatggccccctgggcttctaccacggcctgagcagcaccctgctgaggtag

SEQ ID NO: 178710 - DNA, 726 bp, Artificial Sequence
  derived and/or modified sequence
atgaagagcaacccagccatccaggccgccatcgacctgacagctggagctgctgggggcacagcctgtgtgctgaccggccagccctttgacaccatgaaggtggccggcctggacaagcaggccaagctgagtgacctgcagaatgctgctgctggcagctttgccagcgcctttgctgccctggtgctgtgccccacagagctggtgaagtgccgcctgcagaccatgtatgagatggagaccagcggcaagatcgccaagagccagaacacagtgtggagcgtcatcaagagcatcctgaggaaggatggccccctgggcttctaccacggcctgagcagcaccctgctgcgggaggtgcccggctacttcttcttcttcggcggctatgagctgagccgctccttctttgccagcggccgcagcaaggatgagctgggccctgtgcccctgatgctgtctggaggagtgggcggcatctgcctgtggctggccgtgtaccctgtggactgcatcaagagccgcatccaggtgctgtccatgtctgggaagcaggccggcttcatccgcaccttcatcaacgtggtgaagaatgaaggcatcacagccctgtacagcggcctgaagcccaccatgatccgggccttccctgccaacggggccctcttcctggcctatgagtacagcaggaagctgatgatgaaccagctggaggcctactag

SEQ ID NO: 178711 - DNA, 906 bp, Artificial Sequence
  derived and/or modified sequence
atgaagagcaaccccgccatccaggccgccatcgacctgaccgccggggccgctggcggcaccgcctgcgtgttaactgggcagccttttgacacgatgaaggtaaagatgcagacttttccggatctgtaccgcggtttgacagactgttgcttgaaaacatactcccaagttggctttagaggtttctacaagggcaccagtcccgccctgattgctaacatcgccgagaattccgtgctgtttatgtgctacggcttctgccagcaggttgttaggaaagtggccgggttggataagcaagctaagttgagcgatcttcagaatgcagccgccggatcattcgcttccgcctttgccgcactggtgctctgccccacagaactggttaaatgtaggcttcagaccatgtatgagatggagacaagcggaaagatcgctaaatcccagaatacagtctggagcgtgatcaaatctatactacggaaggacggtccattgggcttctatcatggcctctcttcgaccctactccgggaggtgcccggatacttttttttttttggaggctatgagttgtcaaggagtttcttcgccagtggacgctcaaaagatgagctgggtccggttcctctgatgctttctggtggggtcggagggatatgtctgtggttagctgtatacccagtggattgcatcaagtcccggatacaggtacttagcatgtctgggaagcaagcgggattcatccgtacctttatcaatgtagtgaagaacgagggcatcacagcactgtacagcggtctgaagccaaccatgattcgagcgttccccgccaacggtgccctgttcctggcttatgaatatagtcgaaaacttatgatgaaccagctggaagcctactag

SEQ ID NO: 178712 - DNA, 402 bp, Artificial Sequence
  derived and/or modified sequence
atgaagagcaaccccgccatccaggccgccatcgacctgaccgccggcgcagccggagggaccgcctgtgtgttaacgggtcaaccattcgatactatgaaagtaaagatgcagacctttcctgacctctatcgcggactgaccgattgctgtctcaaaacgtacagccaagtgggcttcagaggattttataaggggacatctccagccttgatcgcaaatatagctgagaattctgtgcttttcatgtgttacggattttgccagcaagttgttaggaaggtggcggggctggataagcaggcaaagctctcaacagtttggagcgttatcaagagcatactccgcaaagacggccctcttggcttttaccacggattgtcctccacccttctgcggtag

SEQ ID NO: 178713 - DNA, 402 bp, Artificial Sequence
  derived and/or modified sequence
atgaagagcaaccccgccatccaggccgccatcgacctgaccgccggggcggcaggcggcactgcgtgtgtcttaactgggcagccatttgacaccatgaaagtcaagatgcagacttttcctgatttgtatagaggcttgactgactgctgccttaagacttactcccaggtggggtttcggggcttctataaggggacatctcccgctttaattgcgaatattgcagagaactctgtgctgtttatgtgttacggattctgtcaacaggtagtacggaaggttgctggcctggataaacaggcaaaactgtcaaccgtctggagtgtaattaaatcgattctgcgaaaagacggccctcttggattttaccacggcttatcgagtaccctcctccgatag

SEQ ID NO: 178714 - DNA, 906 bp, Artificial Sequence
  derived and/or modified sequence
atgaagagcaaccccgccatccaggccgccatcgacctgaccgccggtgcggcgggcggtaccgcctgtgtgctgacaggccaaccattcgacacaatgaaggtgaagatgcaaacattccccgacctctaccgcgggcttactgattgctgtcttaagacctacagtcaagtaggctttcgcggcttttacaagggcacatctccagccctgattgctaatatcgccgaaaacagtgtgctgttcatgtgttatggcttctgccagcaggtagtacgcaaagtcgcaggactggacaaacaggccaaactcagcgacctccagaacgccgcagcgggctcctttgcgtccgcattcgccgcgctggtgctttgccctactgagctggtgaagtgtcgtctacaaacgatgtacgaaatggagaccagcgggaagattgccaagtcccagaacaccgtctggtctgtgatcaagtctatcctgcgcaaagatggccccctagggttctaccatgggctttccagtactctgctacgtgaagtgccagggtactttttcttctttggtggctatgaactgagcagaagcttcttcgcctccggaagatccaaagatgaattagggccagtgcccctcatgctgtccggcggcgttggtggaatctgtctgtggctggctgtgtacccagtagattgcattaaaagcaggattcaggtactgtccatgtctgggaagcaggcaggcttcattagaactttcattaacgtcgttaaaaatgagggaattactgctttgtactctggtctaaaacctacaatgattcgcgccttccccgcaaatggagctctcttcctggcatacgagtatagtaggaaattgatgatgaaccagctggaggcttactag

SEQ ID NO: 178715 - DNA, 726 bp, Artificial Sequence
  derived and/or modified sequence
atgaagagcaaccccgccatccaggccgccatcgacctgaccgccggagccgctggcggaaccgcttgcgtactcactggacagcctttcgacacaatgaaagtggccggcctggataagcaagccaagttatccgatttacagaacgccgccgccggctcttttgcgagcgcttttgccgccctggtcttatgtcctaccgaactggttaagtgcaggctgcagaccatgtacgaaatggagaccagtggcaagatcgcaaagagtcagaacaccgtgtggagcgtgataaaaagcattctgcgtaaggacggaccactcgggttctaccatggtttatcttctacactactcagagaggttccaggctactttttttttttcggtggttacgagctttccagaagcttttttgccagcggaagaagcaaggatgaacttggccccgttcctcttatgttgagcggcggcgtgggcggtatatgcttatggctggcagtatacccagtagactgcattaagagccgcattcaagtcctgtcaatgagcggcaaacaggctgggtttattaggactttcattaatgttgttaagaacgagggcatcacggccctgtatagcggcttgaagccaacgatgatccgcgcctttcctgccaatggagccctgttcctggcctacgagtatagtcgaaagttgatgatgaatcaactcgaagcttattag

SEQ ID NO: 178716 - DNA, 906 bp, Artificial Sequence
  derived and/or modified sequence
atgaagagtaaccccgcaatccaagccgctatagatcttacagccggagcagcaggaggtaccgcatgcgtgctgaccggccagcccttcgatacaatgaaagtcaagatgcagacttttcctgacttatatcggggtttgacggactgctgcctcaagacatacagccaggtaggattcaggggcttctacaaaggtacctctcccgcattaatagctaacatcgccgagaatagtgtcctgttcatgtgctatggtttttgccaacaggtggtccgcaaagtggctgggctggacaagcaagctaaactgtctgacctgcaaaacgcagctgcgggatcctttgcttccgcatttgccgcactagttctatgtcccactgaacttgttaagtgccgcctccagacaatgtacgagatggagactagcggaaagatagccaaaagtcaaaacaccgtgtggagtgtaatcaaatcaatcctccggaaggatggcccactaggtttctaccatgggttgagtagtacgctgctgagggaggtcccaggatactttttcttctttgggggttatgaactctcacgatccttttttgctagcggtaggagtaaagacgaactggggccagttccactcatgctgtctggaggagttggaggtatctgcctctggctcgccgtctatccagtggattgtatcaaaagccggatccaggtgctgtccatgagcgggaagcaagccggattcatcagaaccttcattaatgtggttaagaacgagggtatcacggccctctattcaggactcaaaccaacaatgatccgtgcttttcccgctaacggagcactatttctggcctacgagtattcaagaaaactcatgatgaaccaactggaagcttactag

SEQ ID NO: 178717 - DNA, 402 bp, Artificial Sequence
  derived and/or modified sequence
atgaagagtaatcccgcaatccaggccgctatcgacctcaccgctggtgcagcaggaggcactgcgtgcgttctcacaggccagcctttcgacaccatgaaggttaagatgcagaccttccccgacctgtacagaggcttaacggattgttgcctgaaaacttatagtcaagttggcttcagagggttctataaagggactagcccagctctaatcgcaaacatagctgaaaactccgtcctgttcatgtgctacggattctgccagcaggttgtgcggaaggttgctggcctggataagcaagccaaactgtcaactgtgtggtctgtgatcaagtcaatcttgaggaaagacggtcctctcggtttttatcacggtctgtccagcactttactgaggtag

SEQ ID NO: 178718 - DNA, 402 bp, Artificial Sequence
  derived and/or modified sequence
atgaagtcaaatcctgccatccaagctgccatcgatcttacggccggtgccgcaggcggaactgcatgtgtgctcactggacagccgtttgacacaatgaaggtgaagatgcagacgtttcccgacctgtatagaggccttacagactgttgcctgaaaacatactctcaagttggcttcagggggttctataagggcacttcccctgctctcatcgcgaacattgcagagaacagcgtgctgtttatgtgctacggcttctgtcagcaggttgtcagaaaggttgcaggtctcgacaagcaagctaagctgtcaactgtatggagcgtaataaaatcgatcctccgtaaggatggccctctgggcttctaccatggcttatcctccaccctcctgagatag

SEQ ID NO: 178719 - DNA, 906 bp, Artificial Sequence
  derived and/or modified sequence
atgaaatctaatccagctatacaagccgctatagacttgactgccggagcagccggtgggacggcctgcgtcctcactggtcaacctttcgatacgatgaaagtgaaaatgcagacatttcccgatctgtacaggggactgaccgattgctgtttgaagacctatagtcaagtgggcttccgcggattctataaaggcacctctcctgctctcatagccaacatcgccgaaaattccgttctttttatgtgctatggcttctgtcagcaagtggtccggaaggtggccggtttggataaacaggccaaactgtccgacttgcagaacgcagccgcagggagcttcgcgagcgcattcgcggctctggttctgtgtcccaccgaactggtgaaatgcagactccaaactatgtatgaaatggagacttccggcaaaatagccaaaagccagaatacagtctggtccgtgattaaatccattttgagaaaggacggcccacttggtttttaccacggtctttcatctaccctgttgcgagaggtgcctggctattttttctttttcggcggatacgagctgtcgaggagcttttttgcgagcggaagaagcaaagacgagctcggccctgtgccgctcatgttgtccggtggggtcgggggaatctgtttgtggctggccgtgtacccagtggattgcatcaagagcaggatccaggtgttatccatgagcggaaaacaagcagggtttattcggacattcatcaacgtggttaagaatgaaggcatcacagcactctatagtggattgaagcccacaatgatcagagcatttccagcaaatggagccctattcctagcatatgaatacagcaggaagcttatgatgaaccagctagaagcctactag

SEQ ID NO: 178720 - DNA, 726 bp, Artificial Sequence
  derived and/or modified sequence
atgaagagcaatcccgctattcaggctgccatagacctcacagctggggctgctgggggaaccgcgtgtgtgctcacagggcagcctttcgatacaatgaaggtcgccggactggacaaacaggctaagctgtcggacctgcagaatgcagccgcaggctccttcgcctctgctttcgcagctctcgtgctgtgccctaccgaactggttaaatgtagacttcagactatgtacgaaatggagaccagcggcaagattgccaagtcacaaaacactgtatggagcgtgatcaagagcattctgcggaaagatggccctctgggattctaccatggcctgtctagcacgctgctgcgggaggtgcccggttacttttttttctttggaggttatgaattatcccgttctttttttgcctctggcaggagtaaagatgagttgggccctgtgcccttgatgttgagcggaggcgtcggaggcatatgcctttggctcgcagtgtacccggtggattgcatcaagtcgcgtatacaggttctctctatgtcggggaaacaggctggattcattcgtacctttattaacgtagtcaaaaacgagggcattacagctctatatagcgggctgaagccaaccatgatacgggcatttcctgcgaacggcgctctgtttctggcatacgagtatagccgaaaactgatgatgaatcaactggaggcgtactag

SEQ ID NO: 178721 - DNA, 1586 bp, Artificial Sequence
  derived and/or modified sequence
gggcgctcctgagcttcgcggggccgcagtccgggatgcctgcgcgaagggaggggcgaagggccggccgttgccgacgtgggtgttaagtggccgccccagccggcgacccggagccgagagcgggcggcggagcctgagctggacgcggccacgccggcgcggcgggatatgtggtgcctgtcataagctccagagagctgccttccacaagaccagcagaagagtgggcaaacatgaaatccaatcctgctatccaggctgccattgacctcacagcgggggctgcaggaggtacagcatgtgtactgaccgggcagccctttgacacaatgaaagtgaagatgcagacgttccctgacctgtaccggggcctcaccgactgctgcctgaagacttactcccaggtgggcttccgtggcttctacaagggtaccagtccagcactaatcgccaacatcgctgagaactcagtcctcttcatgtgctacggcttctgccagcaggtggtgcggaaagtggctggattggacaagcaggcaaagctgagtgatctgcagaatgcagccgccggttccttcgcctctgcctttgctgcactggtgctctgccccacggagctcgtgaagtgccggctgcagaccatgtatgagatggagacatcagggaagatagccaagagccagaatacagtgtggtctgtcatcaaaagtattcttaggaaagatggccccttggggttctaccatggactctcaagcactttacttcgagaagtaccaggctatttcttcttcttcggtggctatgaactgagccggtccttttttgcatcagggagatcaaaagatgaattaggccctgtacctttgatgttaagtggtggagttggtgggatttgcctctggcttgcggtatacccagtggattgtatcaaatccagaattcaagttctttccatgtctggaaaacaggcaggatttatcagaacctttataaatgttgtgaaaaatgaaggaataacggccttatattctggactgaaacctactatgattcgagcattccctgccaatggagcactctttttggcctacgaatatagcaggaagttgatgatgaaccagttggaagcatactgaagtgtcttggtgggcctgagccaagcacaggtgtttgaggactacagttcatctcagggtttcttggagtacaagaccagtgtgaagttattctgatttcttgggaattttgctttttgtcttcccttctaccctacatcttaaactttatggaagaacctctattttgcatcatatcatttctgtccataattgtactgaaatagaaaagtgaccgctcttgctcttggtaaaatatagagtggtcagtagccttatgcacctaattcaaaaggtggaatatagttctgtcagggcttttacgtaaacctccacttgtacatgcaatttggacagttatgtgttgagggaaatacagtttggtaccttgtttatttcaaatatcagaaaaacccagaggtgatcatttctcatgaagatgcttataaatggttgcttaaccca

SEQ ID NO: 178722 - DNA, 1166 bp, Artificial Sequence
  derived and/or modified sequence
gggcgctcctgagcttcgcggggccgcagtccgggatgcctgcgcgaagggaggggcgaagggccggccgttgccgacgtgggtgttaagtggccgccccagccggcgacccggagccgagagcgggcggcggagcctgagctggacgcggccacgccggcgcggcgggatatgtggtgcctgtcataagctccagagagctgccttccacaagaccagcagaagagtgggcaaacatgaaatccaatcctgctatccaggctgccattgacctcacagcgggggctgcaggaggtacagcatgtgtactgaccgggcagccctttgacacaatgaaagtgaagatgcagacgttccctgacctgtaccggggcctcaccgactgctgcctgaagacttactcccaggtgggcttccgtggcttctacaagggtaccagtccagcactaatcgccaacatcgctgagaactcagtcctcttcatgtgctacggcttctgccagcaggtggtgcggaaagtggctggattggacaagcaggcaaagctgagtacagtgtggtctgtcatcaaaagtattcttaggaaagatggccccttggggttctaccatggactctcaagcactttacttcgagaagtaccaggctatttcttcttcttcggtggctatgaactgagccggtccttttttgcatcagggagatcaaaagatgaattaggccctgtacctttgatgttaagtggtggagttggtgggatttgcctctggcttgcggtatacccagtggattgtatcaaatccagaattcaagttctttccatgtctggaaaacaggcaggatttatcagaacctttataaatgttgtgaaaaatgaaggaataacggccttatattctggactgaaacctactatgattcgagcattccctgccaatggagcactctttttggcctacgaatatagcaggaagttgatgatgaaccagttggaagcatactgaagtgtcttggtgggcctgagccaagcacaggtgtttgaggactacagttcatctcagggtttcttggagtacaagaccagtgtgaagttattctgatttcttgggaattttgctttttgtcttcccttctaccctacatcttaaactttatggaagaacctc

SEQ ID NO: 178723 - DNA, 468 bp, Artificial Sequence
  derived and/or modified sequence
ggatatgtggtgcctgtcataagctccagagagctgccttccacaagaccagcagaagagtgggcaaacatgaaatccaatcctgctatccaggctgccattgacctcacagcgggggctgcaggaggtacagcatgtgtactgaccgggcagccctttgacacaatgaaagtgaagatgcagacgttccctgacctgtaccggggcctcaccgactgctgcctgaagacttactcccaggtgggcttccgtggcttctacaagggtaccagtccagcactaatcgccaacatcgctgagaactcagtcctcttcatgtgctacggcttctgccagcaggtggtgcggaaagtggctggattggacaagcaggcaaagctgagtacagtgtggtctgtcatcaaaagtattcttaggaaagatggccccttggggttctaccatggactctcaagcactttacttcga

SEQ ID NO: 178724 - DNA, 2738 bp, Artificial Sequence
  derived and/or modified sequence
ggggcgctcctgagcttcgcggggccgcagtccgggatgcctgcgcgaagggaggggcgaagggccggccgttgccgacgtgggtgttaagtggccgccccagccggcgacccggagccgagagcgggcggcggagcctgagctggacgcggccacgccggcgcggcgggatatgtggtgcctgtcataagctccagagagctgccttccacaagaccagcagaagagtgggcaaacatgaaatccaatcctgctatccaggctgccattgacctcacagcgggggctgcaggaggtacagcatgtgtactgaccgggcagccctttgacacaatgaaagtgaagatgcagacgttccctgacctgtaccggggcctcaccgactgctgcctgaagacttactcccaggtgggcttccgtggcttctacaagggtaccagtccagcactaatcgccaacatcgctgagaactcagtcctcttcatgtgctacggcttctgccagcaggtggtgcggaaagtggctggattggacaagcaggcaaagctgagtgatctgcagaatgcagccgccggttccttcgcctctgcctttgctgcactggtgctctgccccacggagctcgtgaagtgccggctgcagaccatgtatgagatggagacatcagggaagatagccaagagccagaatacagtgtggtctgtcatcaaaagtattcttaggaaagatggccccttggggttctaccatggactctcaagcactttacttcgagaagtaccaggctatttcttcttcttcggtggctatgaactgagccggtccttttttgcatcagggagatcaaaagatgaattaggccctgtacctttgatgttaagtggtggagttggtgggatttgcctctggcttgcggtatacccagtggattgtatcaaatccagaattcaagttctttccatgtctggaaaacaggcaggatttatcagaacctttataaatgttgtgaaaaatgaaggaataacggccttatattctggactgaaacctactatgattcgagcattccctgccaatggagcactctttttggcctacgaatatagcaggaagttgatgatgaaccagttggaagcatactgaagtgtcttggtgggcctgagccaagcacaggtgtttgaggactacagttcatctcagggtttcttggagtacaagaccagtgtgaagttattctgatttcttgggaattttgctttttgtcttcccttctaccctacatcttaaactttatggaagaacctctattttgcatcatatcatttctgtccataattgtactgaaatagaaaagtgaccgctcttgctcttggtaaaatatagagtggtcagtagccttatgcacctaattcaaaaggtggaatatagttctgtcagggcttttacgtaaacctccacttgtacatgcaatttggacagttatgtgttgagggaaatacagtttggtaccttgtttatttcaaatatcagaaaaacccagaggtgatcatttctcatgaagatgcttataaatggttgcttaacccattctagatgtagggtctgcttaatgtgtgtacttttctaagtggtggcacgtgcctgtaatcccagctactcaggaggctgaggcaggagaatcgcttgaacccgggaggcagaggttgcagtgaactgagattgtgccactgcactccagactgggtgacacagcgagacttcatctcaaaaaaaaaaagaaaagaaaagcaattgtacttcactatgccatatgtatgtattcactgaccaaaaattcactgaccaaccaaccaaactccacacttcatctgatcccccatagacttggggatggacagctgttctttggccatatggtataagaggatcattcttgtcactacttaagttagcctcatcattttgtgctgctccaacaccagcagggtatctcccaataaagtgttcctaagcagcctgtatactgagtgcaagcaggctatcaattttaataatagtccataccatgtatgtgtttctgtcagcagaatgtacatgttgtacaaaacctccaggttccttaagctttttgctgtccatgaatcctctgtggcaactgtaatcacagagccagaagccagagggccagggatatgagaggctgacaaacatcaggggacatctggggaggagatccctgtcatgtctcttgtgccatggagctattatggctggtcttccatttgctttttctttaagtgaaaaccatttttctactttgcttttctctccatacttaaatggtcagtagctactgagtggtgctttatctgaataggcctggatcgaagtaaaatagaaatgggactggctttccacaggaagtaaactgcttcagagcccacagtcccctgctcagtgtccggaaagaagtcagtcatccctgttggcagtaaatcttcccacaggccgtccattagagatttaactagatatgttcaatagaaagagtctgaggcaagtggaaatgaggaacggaaacttaggttgggagaatattttttttttattcattctgtttgcttaattcagagtacagtttgtgctatttcatatctgtactccaggcagaaatataacttgaaaatactgtgtctaaagaaatttcagtgttctatcattaaattatttacttaata

SEQ ID NO: 178725 - DNA, 1562 bp, Artificial Sequence
  derived and/or modified sequence
gttaagtggccgccccagccggcgacccggagccgagagcgggcggcggagcctgagctggacgcggccacgccggcgcggcgggatatgtggtgcctgtcataagctccagagagctgccttccacaagaccagcagaagagtgggcaaacatgaaatccaatcctgctatccaggctgccattgacctcacagcgggggctgcaggaggtacagcatgtgtactgaccgggcagccctttgacacaatgaaagtggctggattggacaagcaggcaaagctgagtgatctgcagaatgcagccgccggttccttcgcctctgcctttgctgcactggtgctctgccccacggagctcgtgaagtgccggctgcagaccatgtatgagatggagacatcagggaagatagccaagagccagaatacagtgtggtctgtcatcaaaagtattcttaggaaagatggccccttggggttctaccatggactctcaagcactttacttcgagaagtaccaggctatttcttcttcttcggtggctatgaactgagccggtccttttttgcatcagggagatcaaaagatgaattaggccctgtacctttgatgttaagtggtggagttggtgggatttgcctctggcttgcggtatacccagtggattgtatcaaatccagaattcaagttctttccatgtctggaaaacaggcaggatttatcagaacctttataaatgttgtgaaaaatgaaggaataacggccttatattctggactgaaacctactatgattcgagcattccctgccaatggagcactctttttggcctacgaatatagcaggaagttgatgatgaaccagttggaagcatactgaagtgtcttggtgggcctgagccaagcacaggtgtttgaggactacagttcatctcagggtttcttggagtacaagaccagtgtgaagttattctgatttcttgggaattttgctttttgtcttcccttctaccctacatcttaaactttatggaagaacctctattttgcatcatatcatttctgtccataattgtactgaaatagaaaagtgaccgctcttgctcttggtaaaatatagagtggtcagtagccttatgcacctaattcaaaaggtggaatatagttctgtcagggcttttacgtaaacctccacttgtacatgcaatttggacagttatgtgttgagggaaatacagtttggtaccttgtttatttcaaatatcagaaaaacccagaggtgatcatttctcatgaagatgcttataaatggttgcttaacccattctagatgtagggtctgcttaatgtgtgtacttttctaagtggttgattattttttatttttttgatacagagtctcactctgtcacccagactggagtgcagtggcacgatctcggctcactgcaacctccgcctcctgggttcaagcgattctctcacctcagcctcctgagtagctgggattacaggtacgcgccaccatgtccagctaattttttttggtattttttgtagagac

SEQ ID NO: 178726 - DNA, 906 bp, Artificial Sequence
  derived and/or modified sequence
atgaagagcaaccccgccatccaggccgccatcgacctgaccgccggcgccgccggcggcaccgcctgcgtgctgaccggccagcccttcgacaccatgaaggtgaagatgcagaccttccccgacctgtacagaggcctgaccgactgctgcctgaagacctacagccaggtgggcttcagaggcttctacaagggcaccagccccgccctgatcgccaacatcgccgagaacagcgtgctgttcatgtgctacggcttctgccagcaggtggtgagaaaggtggccggcctggacaagcaggccaagctgagcgacctgcagaacgccgccgccggcagcttcgccagcgccttcgccgccctggtgctgtgccccaccgagctggtgaagtgcagactgcagaccatgtacgagatggagaccagcggcaagatcgccaagagccagaacaccgtgtggagcgtgatcaagagcatcctgagaaaggacggccccctgggcttctaccacggcctgagcagcaccctgctgagagaggtgcccggctacttcttcttcttcggcggctacgagctgagcagaagcttcttcgccagcggcagaagcaaggacgagctgggccccgtgcccctgatgctgagcggcggcgtgggcggcatctgcctgtggctggccgtgtaccccgtggactgcatcaagagcagaatccaggtgctgagcatgagcggcaagcaggccggcttcatcagaaccttcatcaacgtggtgaagaacgagggcatcaccgccctgtacagcggcctgaagcccaccatgatcagagccttccccgccaacggcgccctgttcctggcctacgagtacagcagaaagctgatgatgaaccagctggaggcctactag

SEQ ID NO: 178727 - DNA, 402 bp, Artificial Sequence
  derived and/or modified sequence
atgaagagcaaccccgccatccaggccgccatcgacctgaccgccggcgccgccggcggcaccgcctgcgtgctgaccggccagcccttcgacaccatgaaggtgaagatgcagaccttccccgacctgtacagaggcctgaccgactgctgcctgaagacctacagccaggtgggcttcagaggcttctacaagggcaccagccccgccctgatcgccaacatcgccgagaacagcgtgctgttcatgtgctacggcttctgccagcaggtggtgagaaaggtggccggcctggacaagcaggccaagctgagcaccgtgtggagcgtgatcaagagcatcctgagaaaggacggccccctgggcttctaccacggcctgagcagcaccctgctgagatag

SEQ ID NO: 178728 - DNA, 726 bp, Artificial Sequence
  derived and/or modified sequence
atgaagagcaaccccgccatccaggccgccatcgacctgaccgccggcgccgccggcggcaccgcctgcgtgctgaccggccagcccttcgacaccatgaaggtggccggcctggacaagcaggccaagctgagcgacctgcagaacgccgccgccggcagcttcgccagcgccttcgccgccctggtgctgtgccccaccgagctggtgaagtgcagactgcagaccatgtacgagatggagaccagcggcaagatcgccaagagccagaacaccgtgtggagcgtgatcaagagcatcctgagaaaggacggccccctgggcttctaccacggcctgagcagcaccctgctgagagaggtgcccggctacttcttcttcttcggcggctacgagctgagcagaagcttcttcgccagcggcagaagcaaggacgagctgggccccgtgcccctgatgctgagcggcggcgtgggcggcatctgcctgtggctggccgtgtaccccgtggactgcatcaagagcagaatccaggtgctgagcatgagcggcaagcaggccggcttcatcagaaccttcatcaacgtggtgaagaacgagggcatcaccgccctgtacagcggcctgaagcccaccatgatcagagccttccccgccaacggcgccctgttcctggcctacgagtacagcagaaagctgatgatgaaccagctggaggcctactag

SEQ ID NO: 178729 - protein, 2725 aa, Artificial Sequence
  derived and/or modified sequence
MEQTDCKPYQPLPKVKHEMDLAYTSSSDESEDGRKPRQSYNSRETLHEYNQELRMNYNSQSRKRKEVEKSTQEMEFCETSHTLCSGYQTDMHSVSRHGYQLEMGSDVDTETEGAASPDHALRMWIRGMKSEHSSCLSSRANSALSLTDTDHERKSDGENGFKFSPVCCDMEAQAGSTQDVQSSPHNQFTFRPLPPPPPPPHACTCARKPPPAADSLQRRSMTTRSQPSPAAPAPPTSTQDSVHLHNSWVLNSNIPLETRHFLFKHGSGSSAIFSAASQNYPLTSNTVYSPPPRPLPRSTFSRPAFTFNKPYRCCNWKCTALSATAITVTLALLLAYVIAVHLFGLTWQLQPVEGELYANGVSKGNRGTESMDTTYSPIGGKVSDKSEKKVFQKGRAIDTGEVDIGAQVMQTIPPGLFWRFQITIHHPIYLKFNISLAKDSLLGIYGRRNIPPTHTQFDFVKLMDGKQLVKQDSKGSDDTQHSPRNLILTSLQETGFIEYMDQGPWYLAFYNDGKKMEQVFVLTTAIEIMDDCSTNCNGNGECISGHCHCFPGFLGPDCARDSCPVLCGGNGEYEKGHCVCRHGWKGPECDVPEEQCIDPTCFGHGTCIMGVCICVPGYKGEICEEEDCLDPMCSNHGICVKGECHCSTGWGGVNCETPLPVCQEQCSGHGTFLLDAGVCSCDPKWTGSDCSTELCTMECGSHGVCSRGICQCEEGWVGPTCEERSCHSHCTEHGQCKDGKCECSPGWEGDHCTIAHYLDAVRDGCPGLCFGNGRCTLDQNGWHCVCQVGWSGTGCNVVMEMLCGDNLDNDGDGLTDCVDPDCCQQSNCYISPLCQGSPDPLDLIQQSQTLFSQHTSRLFYDRIKFLIGKDSTHVIPPEVSFDSRRACVIRGQVVAIDGTPLVGVNVSFLHHSDYGFTISRQDGSFDLVAIGGISVILIFDRSPFLPEKRTLWLPWNQFIVVEKVTMQRVVSDPPSCDISNFISPNPIVLPSPLTSFGGSCPERGTIVPELQVVQEEIPIPSSFVRLSYLSSRTPGYKTLLRILLTHSTIPVGMIKVHLTVAVEGRLTQKWFPAAINLVYTFAWNKTDIYGQKVWGLAEALVSVGYEYETCPDFILWEQRTVVLQGFEMDASNLGGWSLNKHHILNPQSGIIHKGNGENMFISQQPPVISTIMGNGHQRSVACTNCNGPAHNNKLFAPVALASGPDGSVYVGDFNFVRRIFPSGNSVSILELSTSPAHKYYLAMDPVSESLYLSDTNTRKVYKLKSLVETKDLSKNFEVVAGTGDQCLPFDQSHCGDGGRASEASLNSPRGITVDRHGFIYFVDGTMIRKIDENAVITTVIGSNGLTSTQPLSCDSGMDITQVRLEWPTDLAVNPMDNSLYVLDNNIVLQISENRRVRIIAGRPIHCQVPGIDHFLVSKVAIHSTLESARAISVSHSGLLFIAETDERKVNRIQQVTTNGEIYIIAGAPTDCDCKIDPNCDCFSGDGGYAKDAKMKAPSSLAVSPDGTLYVADLGNVRIRTISRNQAHLNDMNIYEIASPADQELYQFTVNGTHLHTLNLITRDYVYNFTYNSEGDLGAITSSNGNSVHIRRDAGGMPLWLVVPGGQVYWLTISSNGVLKRVSAQGYNLALMTYPGNTGLLATKSNENGWTTVYEYDPEGHLTNATFPTGEVSSFHSDLEKLTKVELDTSNRENVLMSTNLTATSTIYILKQENTQSTYRVNPDGSLRVTFASGMEIGLSSEPHILAGAVNPTLGKCNISLPGEHNANLIEWRQRKEQNKGNVSAFERRLRAHNRNLLSIDFDHITRTGKIYDDHRKFTLRILYDQTGRPILWSPVSRYNEVNITYSPSGLVTFIQRGTWNEKMEYDQSGKIISRTWADGKIWSYTYLEKSVMLLLHSQRRYIFEYDQPDCLLSVTMPSMVRHSLQTMLSVGYYRNIYTPPDSSTSFIQDYSRDGRLLQTLHLGTGRRVLYKYTKQARLSEVLYDTTQVTLTYEESSGVIKTIHLMHDGFICTIRYRQTGPLIGRQIFRFSEEGLVNARFDYSYNNFRVTSMQAVINETPLPIDLYRYVDVSGRTEQFGKFSVINYDLNQVITTTVMKHTKIFSANGQVIEVQYEILKAIAYWMTIQYDNVGRMVICDIRVGVDANITRYFYEYDADGQLQTVSVNDKTQWRYSYDLNGNINLLSHGKSARLTPLRYDLRDRITRLGEIQYKMDEDGFLRQRGNDIFEYNSNGLLQKAYNKASGWTVQYYYDGLGRRVASKSSLGQHLQFFYADLTNPIRVTHLYNHTSSEITSLYYDLQGHLIAMELSSGEEYYVACDNTGTPLAVFSSRGQVIKEILYTPYGDIYHDTYPDFQVIIGFHGGLYDFLTKLVHLGQRDYDVVAGRWTTPNHHIWKQLNLLPKPFNLYSFENNYPVGKIQDVAKYTTDIRSWLELFGFQLHNVLPGFPKPELENLELTYELLRLQTKTQEWDPGKTILGIQCELQKQLRNFISLDQLPMTPRYNDGRCLEGGKQPRFAAVPSVFGKGIKFAIKDGIVTADIIGVANEDSRRLAAILNNAHYLENLHFTIEGRDTHYFIKLGSLEEDLVLIGNTGGRRILENGVNVTVSQMTSVLNGRTRRFADIQLQHGALCFNIRYGTTVEEEKNHVLEIARQRAVAQAWTKEQRRLQEGEEGIRAWTEGEKQQLLSTGRVQGYDGYFVLSVEQYLELSDSANNIHFMRQSEIGRR

SEQ ID NO: 178730 - DNA, 8178 bp, Artificial Sequence
  derived and/or modified sequence
atggaacagactgactgcaagccatatcagcctttgcccaaagttaaacacgagatggacctggcatatacttctagcagtgacgagtctgaagatggacgcaagcctcggcagtcttacaactccagggaaaccttacacgagtacaaccaggaacttaggatgaactacaactcacagtctaggaaacgtaaagaggttgagaaatctacacaagagatggaattttgtgaaacaagccacactctctgcagcggttatcagaccgatatgcattcagtttcgcgacatggctaccagctagaaatggggagcgacgtcgacacagaaaccgaaggcgctgcctctccggaccacgcactccgcatgtggataagaggaatgaaatctgaacactcaagttgtttaagtagcagggctaatagcgccctgtctctaaccgatacagaccatgaaaggaagagcgatggcgaaaatggctttaaattctcacctgtgtgttgtgacatggaggcccaagcgggttccacccaggatgtccaatccagtccccacaaccagttcaccttccgcccactgcccccacctcccccaccgccacatgcttgtacttgcgccagaaagccccctcccgctgctgacagcctccagaggcggagcatgacaacaagatcccaaccctctcctgcggcacccgctccgccaacatccacccaagactcagtgcacctgcataattcatgggtgctgaactccaatatccccctcgaaacgcggcattttctcttcaagcatgggtcaggatcatcagcaatcttcagcgcagcaagccaaaactatcctcttacatcaaatacggtctattcccccccaccccgacccttaccccgttctaccttcagtcgaccagctttcacttttaataagccctaccggtgctgcaattggaaatgtacggctctgagtgccaccgcgattactgtgacgcttgccctcctgttggcctatgtgatcgccgtgcacctcttcggcctcacgtggcagctgcagccggtcgagggagaactctacgccaacggagtttccaaagggaatcgaggaaccgaatccatggacacaacatattcccctattggaggtaaggtgtctgacaagagcgagaagaaggtgtttcaaaagggcagagccatagataccggtgaagtcgacatcggggctcaggtaatgcaaaccattccgcctggcctgttttggaggtttcaaataacgatccaccaccccatctatctgaagttcaacattagtctggcaaaggattctctgttgggcatctacggacgtagaaacatcccacctacccatacccagttcgactttgtcaaactgatggatggtaagcagttagtgaaacaggacagtaaaggttcggatgacactcagcatagcccgcgtaacctgatactgaccagccttcaggagaccggatttatcgaatacatggatcagggaccgtggtatctggccttctataatgacggcaaaaagatggaacaggtcttcgttttaaccaccgcaatcgagatcatggatgattgcagtacaaattgcaatggaaatggcgaatgcatctccgggcattgtcattgttttccaggctttctgggacctgattgcgctcgggatagctgcccagtgctgtgcggtggaaacggtgagtacgagaaaggccattgcgtgtgtcgtcacggctggaaagggcctgaatgcgacgtcccagaagaacagtgtatcgacccgacttgctttggacacggcacgtgcataatgggcgtgtgtatatgcgttcccggatataagggagagatctgtgaggaagaggactgcctggatccaatgtgttcaaatcatggtatctgcgtgaaaggcgagtgtcattgcagtacaggctggggtggggtcaattgcgaaacaccactcccggtgtgtcaggaacagtgcagcggccatggaacttttctccttgacgcgggagtctgctcttgcgaccctaaatggacagggtctgactgttctaccgagctgtgcactatggagtgtggctcacatggggtgtgtagtcgtggcatttgtcaatgtgaagaaggctgggttgggccaacctgcgaggaacggtcttgtcatagccactgtaccgagcatggccaatgcaaagacggcaagtgcgaatgttctccgggttgggaaggcgatcactgcaccattgcccactacctggatgcagtaagggacggttgcccgggactgtgctttggaaacggacgttgtacactggaccagaatggatggcactgtgtttgtcaggtcgggtggtccggaaccggctgtaatgttgtgatggagatgctgtgtggcgacaacctggataacgatggagacgggctcactgattgcgttgatcctgattgctgtcaacagagcaattgttatatctcacccctttgtcaagggagtcccgaccctctagacctgattcaacagtctcaaacactgttttcccagcatacttctaggcttttctatgatcggatcaagtttctaattgggaaggactctacccacgtgattccgcctgaggtttcctttgattccaggcgggcatgcgtgatcagaggacaggtggtcgcaattgatggcaccccactggttggcgtgaatgtcagcttcttacaccactccgattatggctttaccatcagccggcaagatggaagctttgacctcgtggctataggaggcatttcagtaatcctgattttcgatcgctcgcccttcctcccagagaagaggaccctctggttaccctggaatcagtttatcgtggtggagaaggtgaccatgcagcgcgtcgtgagtgaccctccctcctgcgacatttctaatttcatatcccccaatccaatcgtgctgccaagcccattaacaagcttcgggggttcctgtcctgaaagaggcactattgtcccggagctgcaggtggtgcaggaggagatccctatcccgtcctccttcgtgagactctcctatctgagtagcaggacccccggttataagaccctcttgcgtatcctcctgacacactccaccatccccgtcgggatgattaaggtccacctcacggttgcagtggagggtcgtctcacccagaaatggttccctgccgcaatcaatcttgtctatactttcgcctggaacaaaactgatatctacggacaaaaagtgtggggactggctgaggctctcgtgagcgtgggctacgagtacgaaacatgtccagatttcatactgtgggagcagcggaccgtcgtgctgcaggggtttgaaatggacgccagtaacctggggggttggagtctgaacaaacaccacatcctcaatccacagtcagggattatacataagggaaatggggagaatatgttcatcagccagcagcctccggtgataagcaccatcatgggcaacggtcaccagcgcagcgtagcgtgtaccaattgtaatgggcctgcacataacaataaactgttcgccccagtcgctctggcctccgggccagacggaagcgtatacgtgggtgatttcaacttcgtgaggcgcattttcccatcaggtaacagcgttagtatattagaattatccacatccccagcccataagtattacctggccatggatcctgtgtcggagtctctgtacctatcagatactaacactaggaaggtgtataagctgaaaagcttagtcgaaactaaggatctatcgaagaatttcgaagtcgtcgcaggcactggggatcagtgcttgccctttgatcaatctcactgcggcgacggcggtagagccagtgaagcctctctgaacagtccacgtggaatcaccgtcgatcgacacggctttatttacttcgtggacggtacaatgattcgaaagattgacgagaacgccgttattactaccgtgataggatctaatggattgacctctacacaacccctgtcttgcgatagcggcatggacattacacaggttcgcctcgaatggcctactgatctggcagtgaatccaatggataactcgctgtacgtattagataataatattgtgctgcagatcagtgaaaatcgaagggttagaattatagctggcaggcccatccactgtcaggtgccaggtatcgatcactttttagtctctaaggtagccatccacagtacccttgagagcgctagagctatcagcgtttcccacagtggactgttatttattgccgaaactgatgagaggaaggtcaatcgtatccaacaagtgacaaccaacggagaaatctatataatagccggagcccctaccgactgtgactgcaagatcgacccaaactgcgattgcttctccggagacggcggatacgctaaggatgccaagatgaaggctccatcctcgcttgctgtctcaccggatggtactctctacgtggctgacctggggaatgtgagaatccgcaccatctctcgcaaccaggctcacctcaacgatatgaatatctacgaaatcgcttcacctgccgaccaggagctgtatcagttcaccgtaaatggcacacacctacacactctgaatctaataactcgggactacgtgtacaactttacctacaattctgagggagatctcggagcgatcacgagtagtaatggaaacagcgttcatatacgtagagatgccggtggtatgcccctgtggctggtagtgcctggtggacaagtttactggctcactatcagtagcaatggagtgctgaaacgtgtttcagcccaaggttataatcttgctctcatgacatacccagggaatacgggcctgctagccaccaaatccaatgagaacggctggaccactgtatatgagtacgatccggagggccacctcacaaatgcaacattccccacaggggaagtgagctcgttccactccgacttagaaaagctgactaaagtcgaacttgatacatctaatagagaaaacgtcctgatgagtacaaaccttacagcgacatctacgatctatatcctgaaacaggagaatacccaaagtacataccgcgtcaatccagacggatcactgagggtaactttcgcctctggcatggagatcgggctgtccagcgaaccacatattctggccggagccgtaaacccgactcttggcaaatgcaatatcagccttcccggtgagcacaacgcaaatctaatcgagtggaggcagaggaaggaacagaacaaaggcaatgtcagcgccttcgaacggcgtctgagagcccataatcggaacctacttagcatagatttcgatcatattaccaggacaggaaagatttatgatgaccatagaaagtttactttacgaatcctgtacgatcagaccggaaggccaattctctggagcccagtgtccagatacaatgaggttaatatcacttactctccctcagggctagtgacttttattcagcgaggaacctggaacgagaaaatggaatacgatcaatctgggaaaattataagtcggacctgggcggacggaaaaatctggagctacacttacttagagaagagcgtgatgctgcttctgcacagccagaggcgatatatcttcgaatatgaccagcctgattgcctgctctccgtcactatgcctagcatggtccggcatagtttacaaacaatgctgtccgttggttattacagaaatatatatactcccccagactcaagcactagcttcatacaggactacagccgggacggtcggcttctacaaacgctgcaccttggcaccggaagaagagtgctgtacaaatatacaaaacaagctcgtttgtctgaggtgctgtacgataccacccaagttaccttaacctatgaggaatcctcaggggttataaagactatccatctgatgcacgatgggttcatctgtacaatcagatacagacagactggcccactgattggcagacaaattttccggttctcagaagaggggcttgtcaatgcccgtttcgactattcctacaacaactttcgggtgacctctatgcaagccgttatcaacgaaacccctttgcctatcgacctgtacaggtatgtcgacgtctccgggaggacagaacaattcgggaagttctccgttataaactacgacctgaaccaggtgattacaactacagtcatgaaacacacaaaaatcttctcagccaacggccaggtaattgaagtccagtatgagatactgaaggccatcgcttattggatgaccatccagtatgataacgtcggccgaatggtaatttgtgatataagggtaggcgtggatgccaacattaccagatatttctatgagtacgacgccgatggacagctgcagactgtgagcgtcaacgacaagacacagtggaggtattcctacgatttgaatgggaatatcaatttgctaagccacggaaagagtgcgagactgacccctttgcgatacgatctgagagaccggataacgcgtttgggagaaatccagtacaagatggacgaggatggctttctccggcagcgcggtaatgacattttcgagtacaactccaacggactccttcagaaggcatataataaggcctctggctggacggtgcagtactattatgacggtttagggagaagagtcgccagcaagagctccctcggacaacacctgcaattcttctacgcggacttgaccaatcccatccgcgtcacgcacttgtacaaccatacatcctcagagattacctcattgtactacgatctgcagggtcacctgatcgcaatggaattgtccagtggtgaggaatattatgtcgcctgtgacaatactggcacaccccttgctgtgttctcatcacgcggacaggtaattaaagagatattgtacaccccctatggggacatttaccacgatacataccccgatttccaggtcatcatagggtttcacgggggactctacgacttcctcaccaaacttgtacatctcggccaaagggactacgacgttgtggccggaaggtggactacccccaaccaccacatttggaagcagctgaatctgttgccaaagccgttcaatttatattcgttcgagaacaactaccccgtcgggaaaatacaggacgtggctaagtatactaccgacatacggtcttggctggaattatttggcttccaactacacaatgtgttgccaggttttccgaagcccgagctagagaacctggagcttacctatgagcttctccgtctgcagacaaagacccaagagtgggaccccggaaaaactatactgggaatccagtgcgagctgcaaaagcagttgaggaattttattagcctggaccagctgccaatgaccccccgatacaatgacggcagatgtctcgaagggggtaagcagcctcggttcgcggcagttccatctgtgttcggcaagggcattaaatttgccatcaaagatggcatcgtgacagccgatatcattggggttgctaatgaggatagccgcagactggcggctatcctgaataacgcacattatctggaaaacctgcatttcacgatcgagggtcgcgatacccactatttcataaagctgggctccttggaagaggaccttgtgcttatcggaaacaccggtgggagacggatcctggagaacggtgtaaatgttaccgtgtcccagatgaccagtgttctcaacggtagaactcgcaggtttgctgatatccagctgcaacatggtgcactctgttttaacatccggtacggcacaactgtggaggaggaaaagaatcatgtgttagaaatcgctaggcaacgggctgtcgcccaggcctggacgaaggagcagcggagactgcaggaaggcgaggagggtataagggcctggaccgagggtgaaaagcagcagcttttgtcaacagggagagtgcagggatacgacggctactttgtgctgtccgtagagcagtaccttgagctcagtgactcagccaacaatatacatttcatgcgtcagtccgagattggtagacgctac

SEQ ID NO: 178731 - DNA, 8178 bp, Artificial Sequence
  derived and/or modified sequence
atggagcagacagactgtaaaccataccagccgctgccgaaagtgaagcacgagatggatcttgcttacacaagtagcagtgacgagagtgaggacggaagaaaacccagacagtcttataatagtagggagacgctccatgagtataaccaagaactgcgaatgaactataactcacaatctagaaagaggaaggaggtggaaaagagtacccaggaaatggagttctgcgaaacttcccataccctttgctccgggtaccagacagatatgcactccgtctctcgacatggttaccagcttgagatgggcagtgatgtcgacacagagacagagggtgcagcctcacctgaccacgccctgagaatgtggataagaggaatgaagtcagaacactcgtcttgcttgtcctcccgggccaactcagcactcagtcttaccgatactgaccatgagcgtaagtccgatggcgaaaacggcttcaaatttagccctgtgtgttgtgacatggaagctcaggccggatctacccaggatgttcagtcctcgcctcacaatcaattcacatttcgccctctgccaccaccaccccctccacctcatgcttgcacctgcgctcggaagcccccccccgcggccgacagcctgcagcgcagaagcatgaccactcgttcccaacctagcccagcagctcccgcacctccaactagcactcaggacagtgttcatcttcataacagctgggtcctcaatagtaatatacctttggaaactcgccactttctgttcaagcacggatccggctcaagtgcgattttcagcgctgcatcacagaactatccacttacttctaacactgtgtacagccccccaccacggcccctgcccaggtccactttcagtcgccctgctttcactttcaataaaccttatagatgctgtaactggaagtgtactgctctctcagccacagccataaccgtgactcttgcactcctattggcttacgttatagcagtgcacctctttggactgacttggcagcttcagcccgttgagggggaactctatgcgaacggggtgagcaaggggaatcgaggaacagaaagtatggataccacttactcaccaatagggggcaaggttagtgacaagagtgagaagaaggtgttccaaaaaggccgcgccatcgacactggcgaggtcgacatcggagcacaggtcatgcagacgatcccccccggtctattttggaggtttcagatcaccatccaccaccctatttatctcaaattcaacatctctttagcaaaggattctctgttaggcatctacggccgcagaaacataccaccgactcacacccagtttgatttcgtgaaattgatggacggcaagcagctggttaaacaagatagcaagggctccgacgacactcagcacagcccccggaatctgatactgaccagcttgcaagagaccggcttcattgaatacatggaccagggaccttggtatctggctttttataacgacggcaaaaagatggaacaggtttttgtactaactaccgcaatcgagatcatggatgactgttcgactaactgcaatgggaatggggagtgcatatctggacactgccattgcttccctggtttcctcggacctgattgcgccagggactcctgtccggtactatgcgggggcaacggagagtacgaaaaaggtcattgtgtgtgccggcatggctggaagggccctgaatgtgatgtgccagaagaacaatgtatcgatcccacttgtttcggccacggcacgtgcattatgggtgtctgcatatgtgttcctggatacaagggagagatctgcgaagaggaggactgccttgatcctatgtgctctaatcacggtatctgcgttaagggagaatgtcattgctccactggctggggtggagttaattgtgagacaccactgcccgtatgtcaggagcagtgcagtgggcacggaacttttctcctcgacgctggggtgtgttcttgtgaccctaaatggacaggcagtgattgtagcaccgaattatgcacaatggagtgcggctcccacggtgtttgctctaggggaatctgtcagtgtgaagagggctgggtcggccccacctgcgaggaacgctcatgtcactctcattgcaccgagcacggccagtgcaaggatggcaaatgcgaatgctcgcccgggtgggagggtgatcattgcaccattgctcactatttggatgccgtgagagacggctgccccggactgtgctttggtaacggcagatgcacattggatcaaaatggctggcattgtgtctgccaggtgggctggagcggcactggctgcaatgtggtgatggagatgctgtgtggcgacaatttggacaacgacggggatggtttgacagattgtgttgatcctgactgctgccaacagtccaattgctatatttcccctttgtgccagggcagccccgaccccctcgacctcatccagcagtctcagacccttttcagtcagcacaccagccgccttttttacgatcggatcaagtttctgattgggaaggacagcactcacgtgatcccacccgaggtcagcttcgactcgaggagagcctgcgtgattagaggccaggtcgtcgctatagacggcacaccgctcgtgggcgtcaatgtgtctttcttgcaccactccgattacggctttactatttccagacaggatgggagttttgatttagtcgctattggcgggatcagcgtcattctcatatttgacagatctccgttcctacccgaaaaacgaaccctctggctgccgtggaatcagtttatagtcgtagagaaggtaaccatgcagcgagtcgtatctgacccacccagttgtgacatatctaacttcattagtccaaatccgattgtgctgccctcccctcttacatcattcggcgggagctgtcctgagaggggcacgatcgtgcctgaactccaggtagtgcaagaagaaattcccataccttccagttttgtgagactctcttatctcagctcccgcactccaggctataagactctgctgcgcatactcctgacacacagcacgatcccagttgggatgatcaaagtccatctgaccgtcgccgtcgaaggacgtctgacccagaagtggttcccagcagcaatcaacctcgtatacacttttgcatggaacaagacagacatttatggacagaaagtatggggacttgccgaagcgctggtgtcggtgggatacgagtacgaaacttgtcctgatttcatcttatgggagcagcgaaccgtggtgttgcagggtttcgaaatggacgcatccaatcttggtgggtggtccctcaacaaacaccacatcctgaatccccagagcggtatcattcacaaggggaatggagagaatatgtttatctcccagcagccaccagttattagtacgattatgggtaacggacatcagcgatccgtggcatgcacgaactgcaacgggcctgcccacaataataaactatttgcccctgtcgcacttgcaagcggcccggatgggtcagtctatgtgggcgactttaattttgtgcgccgcatatttcccagtgggaatagcgtaagtatcttagagctttctacatcacccgctcacaagtattatctcgcaatggacccagtctctgagtctctttatctgagcgacacaaatacgagaaaggtgtataagctgaaaagcctcgtagaaacaaaggatctgtctaagaattttgaggtggtagctggtaccggtgatcaatgtctgcccttcgatcagtcacactgcggagatggtggacgagcatccgaggcaagcctgaatagccctagggggatcacagtcgatagacatgggtttatttattttgtcgacggaaccatgatacgcaaaatcgacgaaaacgccgtgattacaactgtgataggcagcaacgggcttacctccacacaaccgctgtcttgcgattctggcatggacatcacgcaggtacgtctagaatggccgactgacttggccgtgaatcctatggacaactccttgtacgtgctagacaacaatattgtactgcagatctctgagaataggcgcgtgcggataatcgctggacgaccaattcactgccaggttcccggaatagatcactttctcgtgtccaaggtagcaatacattccactcttgagtccgcgcgcgccatttctgtgagtcacagtgggcttttgttcatcgcagagacagatgagaggaaggtaaaccgaatccagcaagtgaccactaatggggagatctacatcatcgcgggagcacccaccgactgcgactgcaaaatcgatcctaactgtgactgcttttctggagacggtggctacgcaaaggacgccaaaatgaaggcccccagttctctagctgtcagcccggacggcactttgtatgtggcagatctcggcaatgtacgtattagaactatcagcaggaaccaggcccatttgaatgacatgaatatttatgagatagcgtcacctgctgaccaggaactgtaccagttcacagttaatggaactcatcttcataccctcaacctcatcaccagagactacgtttataatttcacttataactctgagggagatctgggagccatcacaagttcgaatggcaactccgtccatataaggcgggacgccggcgggatgcctctgtggctagtagtgccgggtgggcaggtctactggctgacaatttctagtaacggcgtgctcaaacgagtgagcgcgcagggctacaatcttgcccttatgacttacccaggaaacacagggctcctggccacgaaatccaatgaaaatggatggacaaccgtgtacgaatacgaccctgaaggacacctaactaatgccacatttcctaccggtgaagtctctagcttccactccgatctcgaaaaactgaccaaagtggaactggatacctccaaccgggagaatgttctgatgagcacaaatctgactgcgacatctaccatatacatacttaagcaagagaacacacaatccacttaccgggttaatccagatggatctttgcgggtgacattcgcttcaggcatggaaatcgggttatcctctgaaccccacatactggctggcgcagtgaatcccactcttggcaaatgcaacattagccttccgggggagcacaacgctaacctcattgagtggcgacagcgcaaagagcagaataaggggaacgtttccgcatttgaacgaagacttcgggcacataaccgcaatctcctgagtatagattttgatcatattaccaggaccggaaaaatatatgacgatcatcgtaaatttacgctgagaatcctgtatgatcaaactggccgacccattctttggtcacctgtttctagatacaatgaggtcaatatcacgtacagtcccagcggcctcgttaccttcatccagaggggaacctggaacgagaaaatggaatatgaccagtccggcaaaattatctcgcgcacctgggccgacgggaaaatttggagctatacctacctggagaagtctgtgatgctcctgctgcatagccagcgccggtacatcttcgaatacgatcagccagattgccttctcagtgtgaccatgccgagtatggtacgtcactcactgcagactatgctgagcgtcggatattaccgcaacatttacactccacccgattcctctacttcattcatccaagattactctcgggacgggcgtctccttcaaacactgcatttagggactggccgtagggtactgtataagtataccaaacaggccaggttgagcgaagttctatacgacacgactcaagtcacgctgacctatgaagagagctcaggggtaataaagacgatccatctgatgcacgacgggtttatatgtaccatccggtaccgtcagaccggtccgcttatagggcgccagattttccgattttcggaagaagggctggttaatgcgagatttgactacagctataataacttcagggtgacctccatgcaagcagtgattaatgaaacacctcttccaatcgatctatacaggtatgtcgatgtgagcggcagaacggaacagttcggaaaattttccgtaatcaactatgatttgaaccaagtgattacgaccacagtgatgaaacacacaaaaatctttagcgctaacgggcaggtcattgaggtgcagtatgaaattttaaaggcgatcgcctactggatgaccatacaatatgacaacgttgggaggatggtcatctgtgatataagagtgggagtcgacgccaacattaccaggtatttctacgagtatgatgccgacggccagttacagaccgtgagcgtaaacgacaagacccagtggagatacagctacgatttgaatgggaacataaacctattgagccacggcaaatcagctagactaactcctttacgctatgacctcagggacagaatcacacgactcggagagatccaatacaagatggacgaggatggtttcttaagacagcgcggcaatgacatctttgaatacaacagtaatgggctgctacagaaagcatacaataaagctagtgggtggacagttcaatattattatgacggtctaggtcgaagggtagcttctaagagctctctgggacagcaccttcaattcttttacgcagacctgaccaatcccatccgggttacacacctctataatcatacttccagcgaaatcacgtccctgtattatgacctgcaggggcatctgattgctatggagctctcttctggagaagaatactacgtcgcttgcgacaatactggaactccactggccgtgttctctagtagaggccaggttattaaggaaattctttacaccccctacggcgacatctatcacgatacttatccagatttccaagtgatcatcggattccatggtggactctacgattttctgaccaaactggtgcaccttggccagcgggactatgacgtagtggctgggcgctggaccacacctaaccaccatatttggaaacagctgaaccttttacctaagcctttcaacctgtactcattcgagaacaattatccggtgggcaagatacaagacgtggcgaaatacacgacagatatcaggagttggcttgagctctttggctttcaattacataatgtgttgccaggctttccaaagcctgagttggagaatttggagttaacatacgagctgcttcgcctgcagaccaaaactcaagaatgggatcccggcaaaaccatcctcggcatccagtgcgaactccagaagcagctgcggaacttcatcagcctagatcagctaccaatgactccacgctataacgacggaagatgcctggaaggaggaaaacagccccgctttgcggccgtgccgtccgtgtttggcaagggcatcaagtttgccatcaaagatggaattgtaactgcggacattataggagttgccaacgaagacagtcgaaggttggccgcaatcttgaataatgctcactatctcgagaacctgcacttcaccattgagggacgcgacacacactattttatcaagctgggatccctggaggaagacctagttctgattggcaatacggggggcaggcgcatcctggaaaacggggttaatgtgactgtgtcccagatgacctcagtgctgaatggccggactagacgatttgctgacattcagctgcagcacggcgccctttgctttaacataagatatgggacaaccgtcgaggaggaaaagaaccacgtgctagaaatcgcccgtcagagagctgtggcccaggcctggacaaaggagcagcgccgcctgcaagagggggaagaaggaatacgcgcgtggaccgagggcgagaagcaacagctcctcagtaccggaagggtgcaaggctatgacggatatttcgtgctgagcgttgagcagtacctggagctgtctgattccgctaataacatccacttcatgcgccagtctgagattgggaggagatag

SEQ ID NO: 178732 - DNA, 8178 bp, Artificial Sequence
  derived and/or modified sequence
atggagcagacagattgcaaaccatatcaacccctccctaaagtcaagcacgaaatggacttagcttacacaagttcctccgacgagagtgaggacggaaggaaacctcgccagtcctataatagccgggaaacactccacgaatacaaccaagaacttcggatgaactataattcccagtctcgaaaaaggaaggaggtcgagaaatccacccaagagatggaattctgcgaaactagccacaccttatgctcaggctatcaaacagacatgcattccgttagcagacacggatatcaactcgagatggggagcgatgtagatactgagaccgagggcgcagcgtcccctgatcacgctcttaggatgtggattcgcggcatgaaatctgagcattcctcctgtctttccagtcgtgctaacagcgccctctcccttacagacaccgaccatgagcggaagagtgatggagaaaatggattcaagttcagtccagtatgctgtgacatggaagcacaagcgggtagcactcaagatgttcagtcctcgccccataaccagttcacattcagaccacttccccccccaccaccacctcctcacgcatgtacatgtgcccgcaaaccccctcccgcagccgatagcttgcagcgccgctccatgacgacacgaagccaaccaagccccgcagcccctgcacccccaacatccacccaagactccgtacacttacataacagttgggttttgaacagtaatatccccctcgaaaccaggcattttcttttcaaacatggcagtggaagttccgctatcttctctgcagcctcccagaactacccactcacaagtaacaccgtttattcccctccaccccgaccattgcccaggagcactttttcccgtcctgcatttacattcaacaaaccatatcggtgctgtaattggaagtgcaccgccttgagcgctacagcaatcacagtcaccctggccttgttattagcatacgtgattgccgtgcatctgttcggcttgacatggcagctacagcccgtagaaggagaactgtatgccaatggcgtttccaaaggaaacaggggtacagaatcaatggacacgacctactcaccgatcgggggtaaagtgagtgataaatcagaaaaaaaagtattccaaaagggccgcgccatagacactggagaagtcgatattggtgcccaagtgatgcagactattccaccgggtctcttctggaggttccagatcaccattcatcatccaatatatcttaagttcaatatatctctggccaaagacagtctgctcgggatttacggcagaagaaacattccccctacccacactcaattcgatttcgttaagcttatggatggaaaacagctcgtgaaacaggatagcaaaggttcggacgacacacagcacagcccccgtaatcttatcctcacctccctccaggagacaggctttattgaatatatggatcaaggaccctggtacctggctttttacaacgacggaaagaaaatggagcaagtgtttgtgctaaccacagcaatcgagatcatggacgattgttccaccaactgcaatggaaatggagaatgcatcagcggacattgtcactgcttccccggcttcctcggaccagactgtgctcgggatagttgcccagttttatgtggaggaaatggtgagtacgagaagggacactgcgtttgcaggcacggctggaaaggaccagagtgcgacgtgccagaggagcaatgtattgaccctacatgttttggacatggcacctgtatcatgggagtctgtatctgtgtgccgggctataaaggagaaatttgtgaggaggaggattgcttggacccgatgtgctctaatcacgggatttgcgtgaagggagaatgtcactgtagtacaggttggggcggagtcaattgtgagacacccctgcccgtgtgccaggagcagtgctcagggcatggaaccttcctcttagatgctggggtctgttcttgtgatcccaaatggacagggagcgactgcagtaccgaactgtgtacaatggaatgtgggtcgcacggtgtatgttcaagaggtatctgccagtgcgaggaagggtgggtggggcccacctgcgaggagcgctcctgtcatagtcattgcacagaacacgggcagtgtaaagacggtaaatgtgaatgttcaccaggatgggagggagatcactgtacaattgcacactatttagacgctgtgcgcgacggctgtcctggactatgtttcggtaatggccgctgtactttagatcaaaatggttggcactgtgtgtgtcaggtaggatggtccggtactggatgcaacgtagtaatggagatgctgtgcggggacaacctcgacaacgacggagacggcttaacggactgtgtggaccccgattgctgccaacagagtaattgttatatatcacccctctgtcagggaagcccggaccctctcgatttaatccagcaaagtcagaccttgttcagccagcacaccagccggttgttctatgatagaatcaagttcctaataggcaaagattccacccacgttatcccaccggaagtttctttcgatagcaggagggcttgcgtaattagaggacaagtcgtggctatagatgggacccccctcgtcggtgtgaacgtatccttcctccaccacagtgactacggctttaccatctctcgacaggacggtagttttgacctagtggccattggcggaatttctgtgatcctcatcttcgatcggtccccattcttaccagagaagagaaccttgtggctgccctggaatcagtttatcgtggttgaaaaagtgaccatgcagcgggttgtgtcagatcccccttcctgcgatattagcaactttatctcgcccaatcctattgttctgccctctccactcaccagcttcggtggctcctgccctgagcgcgggacaatcgtaccagaactccaggtggtccaagaagagataccgatcccttcctcatttgttcgacttagctatttatctagtagaactcctgggtacaagaccttgttgagaatccttcttactcattctaccattcctgtgggtatgattaaggtgcacctcaccgtggctgtggagggacgcctgacccaaaagtggtttccggccgccatcaatttagtgtatacgtttgcttggaataaaactgatatctacgggcaaaaagtctgggggctcgctgaagcactagtgtcagtaggttacgaatacgaaacttgccctgatttcatactgtgggagcagaggactgtggtgctgcaaggttttgaaatggatgcttccaacctgggggggtggagtctgaataagcaccatatactgaacccccaatctggcataattcataaaggcaacggcgagaacatgtttattagccagcaacctccagttatttcaaccatcatgggtaacggacaccagcgtagcgtcgcctgcaccaactgtaacggaccagcccacaacaacaaattattcgctccggtcgccttggctagcggacctgacggcagcgtctacgtcggcgacttcaatttcgttcggcggatctttccatctggtaactccgtgtctatcctcgagctgtctacatcccctgcacacaagtactaccttgccatggacccggtgtccgaaagtctatacctgtcggatacgaatacccgaaaagtatacaaactaaaatcattggttgaaacaaaagacctctctaaaaattttgaagtggtggctgggactggggaccagtgtctaccttttgaccagagccactgcggcgacggtggtcgtgcctcagaagccagtttgaactctcctcgtggtatcactgtggatcgccatggcttcatatattttgtagacgggactatgataagaaagattgatgagaatgcagttatcaccactgttattggctccaatggtttaacctcgactcagcctttgtcctgtgatagcggaatggatattacgcaggtgagattagaatggccaacagacctcgccgtaaacccaatggacaatagtctatatgttctggacaacaacattgtgctgcagatatctgaaaaccgcagagtgcgcattatcgctggaaggccaatccactgccaggtcccaggtatagatcacttcctcgtgtccaaagtcgcaatacattccacactcgagtctgctagagccattagtgtgtcccactcaggactcctctttattgctgaaacggatgagagaaaagtgaatcggattcaacaagttactactaatggtgaaatttatatcattgctggggcccctactgattgtgactgtaagatcgaccccaactgcgattgcttttctggagacgggggctacgcaaaagatgctaagatgaaagctcccagtagtttggccgtttcgcctgatggcacactgtatgtggcagacttaggaaacgtcaggatccggacaattagcagaaatcaagcccatctgaacgatatgaacatttatgaaatcgcatctcccgccgatcaggaattgtatcagttcaccgtgaatggcactcatctgcacaccttgaatctcattacaagagactacgtatataattttacttataatagcgagggcgatttaggagcaatcacatcatcaaatggcaatagtgtgcacattcgcagggatgctggaggtatgcccctatggctggtggtaccaggcggacaggtgtactggttgacaatttcatccaacggggttctaaaacgggtttcagctcagggatataacctcgccctcatgacctaccctggaaacacaggactgctagctacgaaatccaacgagaacggatggactactgtatatgaatatgaccccgaagggcacctgacaaacgcaacttttcccacgggtgaggtctcttccttccactctgacctggaaaaacttacgaaggtcgaacttgatacctccaatcgcgaaaatgtactcatgagcacgaaccttaccgccactagcacaatatacattctgaagcaagaaaatacccagagtacctatagggttaatcccgacggcagccttagagttacattcgcctctggcatggaaattggactaagcagtgaacctcacatactggccggcgccgtgaatccaacgttgggaaaatgtaacatcagcctgccaggcgaacataatgcgaacctcatcgagtggcgtcaacgcaaagaacaaaataaagggaacgtttctgcctttgagcgtcggttgagagcacataataggaacctgttgtctattgatttcgatcacataacccgcaccggtaaaatctacgatgatcaccgcaaatttacactgagaatcttatatgaccaaacaggtagacccatactgtggagccccgtctctagatataacgaagtcaacattacctacagcccttccggcctcgtcacctttattcagaggggtacctggaatgaaaagatggaatatgatcaaagcggaaaaatcatctctcggacatgggcagacggaaaaatttggagttacacatacctggagaaatctgtgatgcttctgctgcattcacagagaaggtacatatttgaatacgatcagccagattgcctcctgagcgtgaccatgccctccatggtgcgccacagtttacagacaatgctgagtgtcggctactatcgcaatatctatactccaccagattccagcacgagcttcatccaggactattcgagagatggaagactcctccagaccctgcatctgggtactggtcgccgcgtgctatacaaatatactaaacaggccagattgtcggaggtgctgtacgataccacccaagtaaccctaacttatgaagaatcatccggcgtcataaagacgatccacctcatgcacgatggctttatttgcacaattagatacaggcagaccggccccctgatcgggcgccaaatttttagattctcagaagagggccttgtcaacgctagattcgactactcctataacaatttccgagtaactagtatgcaggcagtgattaatgagacacctctcccaattgatttataccgatatgtggatgtgtccggccgcaccgagcagtttgggaaattcagcgttatcaactatgacctaaaccaggttatcacaaccacagtgatgaaacatacaaagatattctcagcaaacggacaggtaattgaagtccaatacgaaattttgaaagcgattgcctactggatgactatccaatatgacaacgttggccgaatggtcatctgtgacatcagagttggtgttgatgcaaacataactcgctatttttatgaatatgacgctgacggacagcttcagacagtgagcgtgaatgacaagacacaatggagatatagctacgacctaaacggcaacattaacctcctctcacatggaaagtccgcccgacttacgccccttcgctacgatctccgagatcgcatcacgaggctgggcgaaattcaatacaaaatggacgaagatggattcctcagacaacgcggaaatgacatattcgagtacaattctaacgggctccttcagaaggcgtataataaggcatccggctggaccgttcaatactactatgacggattgggtcgtcgggtcgcgagcaaaagctcactaggacaacatctgcaattcttttatgctgatcttaccaaccctatacgcgtgacccacctctacaaccacactagttccgagattacatcattatactacgatctgcaaggtcatttgatcgctatggagttgagcagcggcgaagagtattacgttgcatgcgacaacactggaacgcccctggctgtcttttcttctcgaggacaggtgattaaagagatcctgtacacgccatacggggacatatatcacgacacttatcctgacttccaggtgataatcgggttccacggaggactttacgacttcctaacaaagctggtgcacttgggccaacgcgattacgacgtagtagcagggagatggacaacccctaaccaccatatctggaagcaactgaatcttttaccaaaaccttttaatctctatagcttcgaaaataactaccccgtcggtaagattcaagatgtggcaaagtacacgacagacattcgcagctggctcgagctttttggatttcaactccacaatgttctgcccgggtttcccaagccagagttagagaatctcgagctaacttacgaactgctgcggttgcaaactaaaacccaggaatgggatcctggcaaaacgatacttggcattcagtgcgaactccagaaacagctacgcaattttatatccctagaccagctacccatgaccccacgttacaacgacggacgctgtctggagggcggaaagcagccacgcttcgccgcagtgccttcggttttcgggaagggaattaaattcgccataaaagacggtattgtgactgctgatatcataggtgtggccaacgaagacagtcgccgactggccgcgatactcaacaatgctcactatctggaaaacctgcactttacgattgaggggagagatacacactattttattaaacttgggagcctggaggaggacctcgtgctaataggcaataccggtggcagaaggatcttggagaatggggtgaacgtgactgtgagccagatgactagcgtcttgaacggcaggacccggagatttgcggacatacagctgcagcacggagcgctgtgctttaatatacgttacggaactacagtggaggaagagaagaatcacgttttggagatcgccagacagagagctgtggctcaagcttggactaaggaacagagacgactgcaagagggggaggaaggcattagggcttggaccgaaggggaaaagcaacagttgctgagcactggaagagttcagggttacgacggttatttcgtattatcagtggaacagtatcttgaattatccgactccgccaacaatattcactttatgagacagtcagaaatcggtaggcgctag

SEQ ID NO: 178733 - DNA, 8178 bp, Artificial Sequence
  derived and/or modified sequence
atggagcagaccgactgcaagccctaccagcccctgcccaaggtgaagcacgagatggacctggcctacaccagcagcagcgacgagagcgaggacggcagaaagcccagacagagctacaacagcagagagaccctgcacgagtacaaccaggagctgagaatgaactacaacagccagagcagaaagagaaaggaggtggagaagagcacccaggagatggagttctgcgagaccagccacaccctgtgcagcggctaccagaccgacatgcacagcgtgagcagacacggctaccagctggagatgggcagcgacgtggacaccgagaccgagggcgccgccagccccgaccacgccctgagaatgtggatcagaggcatgaagagcgagcacagcagctgcctgagcagcagagccaacagcgccctgagcctgaccgacaccgaccacgagagaaagagcgacggcgagaacggcttcaagttcagccccgtgtgctgcgacatggaggcccaggccggcagcacccaggacgtgcagagcagcccccacaaccagttcaccttcagacccctgccccccccccccccccccccccacgcctgcacctgcgccagaaagcccccccccgccgccgacagcctgcagagaagaagcatgaccaccagaagccagcccagccccgccgcccccgccccccccaccagcacccaggacagcgtgcacctgcacaacagctgggtgctgaacagcaacatccccctggagaccagacacttcctgttcaagcacggcagcggcagcagcgccatcttcagcgccgccagccagaactaccccctgaccagcaacaccgtgtacagccccccccccagacccctgcccagaagcaccttcagcagacccgccttcaccttcaacaagccctacagatgctgcaactggaagtgcaccgccctgagcgccaccgccatcaccgtgaccctggccctgctgctggcctacgtgatcgccgtgcacctgttcggcctgacctggcagctgcagcccgtggagggcgagctgtacgccaacggcgtgagcaagggcaacagaggcaccgagagcatggacaccacctacagccccatcggcggcaaggtgagcgacaagagcgagaagaaggtgttccagaagggcagagccatcgacaccggcgaggtggacatcggcgcccaggtgatgcagaccatcccccccggcctgttctggagattccagatcaccatccaccaccccatctacctgaagttcaacatcagcctggccaaggacagcctgctgggcatctacggcagaagaaacatcccccccacccacacccagttcgacttcgtgaagctgatggacggcaagcagctggtgaagcaggacagcaagggcagcgacgacacccagcacagccccagaaacctgatcctgaccagcctgcaggagaccggcttcatcgagtacatggaccagggcccctggtacctggccttctacaacgacggcaagaagatggagcaggtgttcgtgctgaccaccgccatcgagatcatggacgactgcagcaccaactgcaacggcaacggcgagtgcatcagcggccactgccactgcttccccggcttcctgggccccgactgcgccagagacagctgccccgtgctgtgcggcggcaacggcgagtacgagaagggccactgcgtgtgcagacacggctggaagggccccgagtgcgacgtgcccgaggagcagtgcatcgaccccacctgcttcggccacggcacctgcatcatgggcgtgtgcatctgcgtgcccggctacaagggcgagatctgcgaggaggaggactgcctggaccccatgtgcagcaaccacggcatctgcgtgaagggcgagtgccactgcagcaccggctggggcggcgtgaactgcgagacccccctgcccgtgtgccaggagcagtgcagcggccacggcaccttcctgctggacgccggcgtgtgcagctgcgaccccaagtggaccggcagcgactgcagcaccgagctgtgcaccatggagtgcggcagccacggcgtgtgcagcagaggcatctgccagtgcgaggagggctgggtgggccccacctgcgaggagagaagctgccacagccactgcaccgagcacggccagtgcaaggacggcaagtgcgagtgcagccccggctgggagggcgaccactgcaccatcgcccactacctggacgccgtgagagacggctgccccggcctgtgcttcggcaacggcagatgcaccctggaccagaacggctggcactgcgtgtgccaggtgggctggagcggcaccggctgcaacgtggtgatggagatgctgtgcggcgacaacctggacaacgacggcgacggcctgaccgactgcgtggaccccgactgctgccagcagagcaactgctacatcagccccctgtgccagggcagccccgaccccctggacctgatccagcagagccagaccctgttcagccagcacaccagcagactgttctacgacagaatcaagttcctgatcggcaaggacagcacccacgtgatcccccccgaggtgagcttcgacagcagaagagcctgcgtgatcagaggccaggtggtggccatcgacggcacccccctggtgggcgtgaacgtgagcttcctgcaccacagcgactacggcttcaccatcagcagacaggacggcagcttcgacctggtggccatcggcggcatcagcgtgatcctgatcttcgacagaagccccttcctgcccgagaagagaaccctgtggctgccctggaaccagttcatcgtggtggagaaggtgaccatgcagagagtggtgagcgacccccccagctgcgacatcagcaacttcatcagccccaaccccatcgtgctgcccagccccctgaccagcttcggcggcagctgccccgagagaggcaccatcgtgcccgagctgcaggtggtgcaggaggagatccccatccccagcagcttcgtgagactgagctacctgagcagcagaacccccggctacaagaccctgctgagaatcctgctgacccacagcaccatccccgtgggcatgatcaaggtgcacctgaccgtggccgtggagggcagactgacccagaagtggttccccgccgccatcaacctggtgtacaccttcgcctggaacaagaccgacatctacggccagaaggtgtggggcctggccgaggccctggtgagcgtgggctacgagtacgagacctgccccgacttcatcctgtgggagcagagaaccgtggtgctgcagggcttcgagatggacgccagcaacctgggcggctggagcctgaacaagcaccacatcctgaacccccagagcggcatcatccacaagggcaacggcgagaacatgttcatcagccagcagccccccgtgatcagcaccatcatgggcaacggccaccagagaagcgtggcctgcaccaactgcaacggccccgcccacaacaacaagctgttcgcccccgtggccctggccagcggccccgacggcagcgtgtacgtgggcgacttcaacttcgtgagaagaatcttccccagcggcaacagcgtgagcatcctggagctgagcaccagccccgcccacaagtactacctggccatggaccccgtgagcgagagcctgtacctgagcgacaccaacaccagaaaggtgtacaagctgaagagcctggtggagaccaaggacctgagcaagaacttcgaggtggtggccggcaccggcgaccagtgcctgcccttcgaccagagccactgcggcgacggcggcagagccagcgaggccagcctgaacagccccagaggcatcaccgtggacagacacggcttcatctacttcgtggacggcaccatgatcagaaagatcgacgagaacgccgtgatcaccaccgtgatcggcagcaacggcctgaccagcacccagcccctgagctgcgacagcggcatggacatcacccaggtgagactggagtggcccaccgacctggccgtgaaccccatggacaacagcctgtacgtgctggacaacaacatcgtgctgcagatcagcgagaacagaagagtgagaatcatcgccggcagacccatccactgccaggtgcccggcatcgaccacttcctggtgagcaaggtggccatccacagcaccctggagagcgccagagccatcagcgtgagccacagcggcctgctgttcatcgccgagaccgacgagagaaaggtgaacagaatccagcaggtgaccaccaacggcgagatctacatcatcgccggcgcccccaccgactgcgactgcaagatcgaccccaactgcgactgcttcagcggcgacggcggctacgccaaggacgccaagatgaaggcccccagcagcctggccgtgagccccgacggcaccctgtacgtggccgacctgggcaacgtgagaatcagaaccatcagcagaaaccaggcccacctgaacgacatgaacatctacgagatcgccagccccgccgaccaggagctgtaccagttcaccgtgaacggcacccacctgcacaccctgaacctgatcaccagagactacgtgtacaacttcacctacaacagcgagggcgacctgggcgccatcaccagcagcaacggcaacagcgtgcacatcagaagagacgccggcggcatgcccctgtggctggtggtgcccggcggccaggtgtactggctgaccatcagcagcaacggcgtgctgaagagagtgagcgcccagggctacaacctggccctgatgacctaccccggcaacaccggcctgctggccaccaagagcaacgagaacggctggaccaccgtgtacgagtacgaccccgagggccacctgaccaacgccaccttccccaccggcgaggtgagcagcttccacagcgacctggagaagctgaccaaggtggagctggacaccagcaacagagagaacgtgctgatgagcaccaacctgaccgccaccagcaccatctacatcctgaagcaggagaacacccagagcacctacagagtgaaccccgacggcagcctgagagtgaccttcgccagcggcatggagatcggcctgagcagcgagccccacatcctggccggcgccgtgaaccccaccctgggcaagtgcaacatcagcctgcccggcgagcacaacgccaacctgatcgagtggagacagagaaaggagcagaacaagggcaacgtgagcgccttcgagagaagactgagagcccacaacagaaacctgctgagcatcgacttcgaccacatcaccagaaccggcaagatctacgacgaccacagaaagttcaccctgagaatcctgtacgaccagaccggcagacccatcctgtggagccccgtgagcagatacaacgaggtgaacatcacctacagccccagcggcctggtgaccttcatccagagaggcacctggaacgagaagatggagtacgaccagagcggcaagatcatcagcagaacctgggccgacggcaagatctggagctacacctacctggagaagagcgtgatgctgctgctgcacagccagagaagatacatcttcgagtacgaccagcccgactgcctgctgagcgtgaccatgcccagcatggtgagacacagcctgcagaccatgctgagcgtgggctactacagaaacatctacaccccccccgacagcagcaccagcttcatccaggactacagcagagacggcagactgctgcagaccctgcacctgggcaccggcagaagagtgctgtacaagtacaccaagcaggccagactgagcgaggtgctgtacgacaccacccaggtgaccctgacctacgaggagagcagcggcgtgatcaagaccatccacctgatgcacgacggcttcatctgcaccatcagatacagacagaccggccccctgatcggcagacagatcttcagattcagcgaggagggcctggtgaacgccagattcgactacagctacaacaacttcagagtgaccagcatgcaggccgtgatcaacgagacccccctgcccatcgacctgtacagatacgtggacgtgagcggcagaaccgagcagttcggcaagttcagcgtgatcaactacgacctgaaccaggtgatcaccaccaccgtgatgaagcacaccaagatcttcagcgccaacggccaggtgatcgaggtgcagtacgagatcctgaaggccatcgcctactggatgaccatccagtacgacaacgtgggcagaatggtgatctgcgacatcagagtgggcgtggacgccaacatcaccagatacttctacgagtacgacgccgacggccagctgcagaccgtgagcgtgaacgacaagacccagtggagatacagctacgacctgaacggcaacatcaacctgctgagccacggcaagagcgccagactgacccccctgagatacgacctgagagacagaatcaccagactgggcgagatccagtacaagatggacgaggacggcttcctgagacagagaggcaacgacatcttcgagtacaacagcaacggcctgctgcagaaggcctacaacaaggccagcggctggaccgtgcagtactactacgacggcctgggcagaagagtggccagcaagagcagcctgggccagcacctgcagttcttctacgccgacctgaccaaccccatcagagtgacccacctgtacaaccacaccagcagcgagatcaccagcctgtactacgacctgcagggccacctgatcgccatggagctgagcagcggcgaggagtactacgtggcctgcgacaacaccggcacccccctggccgtgttcagcagcagaggccaggtgatcaaggagatcctgtacaccccctacggcgacatctaccacgacacctaccccgacttccaggtgatcatcggcttccacggcggcctgtacgacttcctgaccaagctggtgcacctgggccagagagactacgacgtggtggccggcagatggaccacccccaaccaccacatctggaagcagctgaacctgctgcccaagcccttcaacctgtacagcttcgagaacaactaccccgtgggcaagatccaggacgtggccaagtacaccaccgacatcagaagctggctggagctgttcggcttccagctgcacaacgtgctgcccggcttccccaagcccgagctggagaacctggagctgacctacgagctgctgagactgcagaccaagacccaggagtgggaccccggcaagaccatcctgggcatccagtgcgagctgcagaagcagctgagaaacttcatcagcctggaccagctgcccatgacccccagatacaacgacggcagatgcctggagggcggcaagcagcccagattcgccgccgtgcccagcgtgttcggcaagggcatcaagttcgccatcaaggacggcatcgtgaccgccgacatcatcggcgtggccaacgaggacagcagaagactggccgccatcctgaacaacgcccactacctggagaacctgcacttcaccatcgagggcagagacacccactacttcatcaagctgggcagcctggaggaggacctggtgctgatcggcaacaccggcggcagaagaatcctggagaacggcgtgaacgtgaccgtgagccagatgaccagcgtgctgaacggcagaaccagaagattcgccgacatccagctgcagcacggcgccctgtgcttcaacatcagatacggcaccaccgtggaggaggagaagaaccacgtgctggagatcgccagacagagagccgtggcccaggcctggaccaaggagcagagaagactgcaggagggcgaggagggcatcagagcctggaccgagggcgagaagcagcagctgctgagcaccggcagagtgcagggctacgacggctacttcgtgctgagcgtggagcagtacctggagctgagcgacagcgccaacaacatccacttcatgagacagagcgagatcggcagaagatag

SEQ ID NO: 178734 - DNA, 8178 bp, Artificial Sequence
  derived and/or modified sequence
atggagcagaccgattgcaagccttaccagcctcttccaaaggtgaaacacgagatggacctcgcttatacatccagttctgacgaaagcgaggatggtcgtaaaccgaggcagtcttacaactcaagagaaacgttacatgaatataatcaggaactgcgcatgaattataacagccagagcagaaaacgaaaagaagttgagaagtccacacaagagatggagttctgtgaaacttctcacacactgtgttccggatatcaaacggatatgcattcggtgtctcggcacggctaccaactcgagatgggctcagatgtcgacaccgaaacagagggcgctgcctctcccgaccacgccctgcgtatgtggattagggggatgaaatctgagcactcttcctgcctcagctctcgagccaactcagccttgagtctgactgacaccgaccatgagcgcaagagcgacggtgaaaatggatttaaatttagtcctgtgtgctgcgatatggaggcgcaggcaggctccacccaagatgtgcagtcgagcccacacaatcagtttaccttcagacccctacctccacctccaccccccccacatgcctgtacatgcgctaggaaacctcctccagctgccgattccttgcaacgtagaagcatgacaacccgatcacaaccatcccctgcggcgcctgctccccccacaagcacccaggatagcgtgcacctccataactcctgggttctgaattcgaatatccctcttgagacgcggcatttcctctttaagcatggatccggtagctctgctatcttttcagcagcctctcagaattatcctctcacctctaatacggtctacagccctccccctcggcctcttcctcgctcaactttctctagacctgccttcactttcaataagccctatcgctgttgcaattggaagtgtacagccctaagcgccacggcgatcactgtgaccctggctctcctgctggcatacgtgattgcagtgcacctattcggcttgacttggcaactccaacctgtggagggagagctgtatgccaacggggtctcgaagggtaaccggggcacggagagcatggataccacctattcccccattggcggtaaagtgagcgataagagcgagaagaaagtgttccagaaaggaagggcaatagacactggagaggttgatataggcgctcaagtgatgcagaccattccaccaggtctattctggaggtttcagataactatccaccaccccatttatttgaagttcaacatcagccttgccaaagacagcctcctcggtatttacggccggaggaatattccccccacacacactcagttcgacttcgtcaaattaatggacggcaagcaactcgtaaaacaggacagcaaaggctctgatgacacacaacatagcccaagaaacctcattctgacatccctacaggaaacggggttcatagagtacatggatcagggtccatggtacctggccttttataacgatggaaagaaaatggaacaggtgtttgtgctgacgaccgccatcgagatcatggacgactgtagcacaaactgtaatggcaacggagagtgcatatctggccactgtcactgtttcccgggcttcctgggccccgattgcgcacgggatagctgtccggtgctgtgtggtgggaacggcgaatacgagaagggccactgtgtgtgtcgccacggctggaaagggcccgagtgtgacgttccggaagagcaatgtatcgatccaacctgtttcggccacggcacgtgcattatgggggtttgtatctgcgttcccggttataaaggggagatttgtgaggaggaagattgcctagatccaatgtgctctaaccacggcatatgtgtcaaaggggaatgccactgctccactggctggggcggcgttaattgtgaaaccccactgcctgtgtgccaagaacagtgctccggtcatggtacatttctcttagatgccggggtctgctcttgtgatcctaagtggacgggcagcgactgtagcaccgagctctgtactatggagtgcggatcgcatggggtatgcagtagaggaatctgtcagtgcgaggaagggtgggttgggcctacatgtgaggaaaggtcctgccacagtcactgcacagagcacggccagtgcaaggatggcaaatgcgagtgtagccctggttgggagggagaccattgcactattgctcactacctcgatgctgtgcgggacggctgtcccggcctgtgtttcggtaatgggcggtgcactttggatcagaacgggtggcactgcgtttgtcaggtggggtggtccggaacagggtgcaacgtggtgatggaaatgctttgtggcgataacctcgacaacgatggagatgggttgactgattgcgtggatcccgattgttgtcagcagtccaactgctatatctcgcctctgtgtcagggatctccagacccgctcgatctgatacaacaaagccagacattgttctcccagcacacatctaggttgttttatgatcgtatcaagttcctgatcgggaaagactccacacatgtcattcctcctgaggtgtcctttgattcgagaagagcttgcgttatccgcggacaggttgtggctatcgatggcacacctctggtgggcgtgaatgtgtccttcctccaccatagcgattatggatttactatttcgaggcaggacggatctttcgacctggtcgcgatcggtggcatctctgtcatccttatatttgacaggtccccttttcttcctgagaagagaaccttgtggctcccctggaatcagtttattgtggtggagaaggtgacaatgcagagagtagtgtccgatccgccaagttgtgacatctcaaattttatttcgcccaaccctattgtgctcccatcacccctgacgagtttcggtggctcttgccccgaaaggggcacaatcgttcctgagctgcaggtcgtgcaggaggaaatccccatccccagcagctttgtgcgcctgtcgtatctgtccagtaggacccctggctataaaactctccttaggattctgctgacacatagcaccatcccagttgggatgataaaggtgcatctgaccgtagctgtcgaggggcgccttacccagaagtggtttcctgcagcgattaatctcgtgtatacatttgcttggaacaagaccgacatctacggccagaaagtgtggggacttgccgaagcactggtgtcggtgggctatgaatacgagacatgtccagacttcatcctctgggaacagcgcactgtggtgctgcaaggctttgaaatggacgcctctaacctcggcgggtggagccttaataagcatcacattctgaatcctcaatcgggcatcatacacaagggaaacggcgagaatatgttcatcagccaacagcctcccgtcatctctaccataatggggaacggacatcaacggtctgttgcatgtaccaattgcaacggaccagctcataataataagttgttcgctcccgtcgcgcttgcatctggccctgatggttctgtgtacgtgggcgacttcaatttcgtccggcgaattttcccgtcagggaattcagtctctattttggagctcagcacctctcccgctcacaagtattatctcgccatggacccagtcagcgaatccctgtacctgagcgacaccaacacccgcaaagtgtataagcttaaatctctcgtagagacaaaagacctgagcaaaaacttcgaggtggtagccggtacaggcgaccaatgcctgccttttgaccagagtcattgtggcgacgggggacgagcgagtgaagcctccctgaatagtccccgtggaataaccgttgatcggcacggcttcatttacttcgtagatggtactatgatcaggaagatcgatgagaacgccgtgataaccaccgtgattggttccaacggcctcacctccacccagcccctgagttgcgatagtgggatggacattactcaggtgagactggagtggcctaccgatctggcagttaacccaatggacaattcactctatgtgctcgacaataacattgtgctgcaaatctcagaaaatcgtcgggtccgcataatagccgggcgcccaattcattgtcaggtccccggaatcgaccactttctggtgagcaaggttgcaatacattctactcttgagagcgctagagcaatatctgtatcccacagcgggctgctgtttattgcagagactgatgaaaggaaagtaaaccgcatccagcaagtgacgacgaacggcgagatttatatcatcgccggcgccccaactgactgcgattgtaaaatcgatcctaactgcgattgcttcagcggagatggagggtatgcgaaggacgccaaaatgaaagcaccaagttctctagcagtgtcccccgacggtaccctgtacgttgctgacctcggtaacgttagaatcaggacaatttcccgcaatcaggcgcacctgaatgatatgaacatctacgagatcgcatcaccagcggatcaggaactctatcagtttacagtgaatggcacccacttgcatacgctgaacctaatcacccgcgactacgtgtacaatttcacttataacagtgagggtgacctgggcgctatcacttcatcaaacgggaatagtgtgcatatccgacgtgacgcaggcggcatgccactttggttagtggtgccggggggccaggtctactggctgacaatctccagcaacggcgttctgaaacgggtcagcgcgcaaggctacaacctggccctgatgacctaccctggtaatactgggctgctggccactaaatcgaatgagaacgggtggaccactgtgtatgaatacgaccccgaagggcacctcacaaacgccacctttcccacaggggaggtctcctccttccattccgacctcgagaaattgactaaagtggaactcgatacctctaacagggaaaacgtcctgatgtcaacaaacctaaccgccacgtctactatttacattctcaagcaagaaaatactcaaagtacttaccgggtgaacccagacggaagcctccgagtgacttttgcaagtggcatggagatcgggctgagttcagagccccacattttggccggcgcagtcaacccaactctggggaaatgtaatatctccctgcccggtgagcacaacgctaatctcatcgagtggcgccagcggaaagaacagaataaaggaaatgtgagtgccttcgagcggcgtctacgggcacataatcgaaatcttctttctatcgacttcgatcacattacgcgaactggcaagatttatgacgaccacagaaagttcaccctgagaatcctgtatgaccagacaggacgccccatcctatggtcacctgtcagcaggtacaatgaagtgaacataacatactcgccatcaggcctggtaactttcatccaacggggcacctggaatgaaaaaatggaatacgatcagtctggtaaaattatctcccgaacgtgggctgatgggaaaatctggagctacacatacctcgaaaaaagtgtaatgctgcttctgcattcccagcgacgttacatctttgagtatgatcagccagattgtttgctgtctgtgaccatgcctagcatggtccggcactcgttgcagaccatgctgtctgtgggatactaccgaaatatctatacccctccagactcttctacaagtttcatccaagactattctcgggatggtcgcctactgcaaaccctacacctcggaaccggccgcagagttctatacaaatacactaagcaggctcgactatccgaggtgctctacgacactactcaggtgaccctcacatacgaagagagctctggcgtcatcaagaccatccacctgatgcatgacggattcatatgtacgatacggtaccgtcaaactgggcccttaattggccgccaaatcttcagatttagtgaggaaggcctggtaaatgccaggttcgattattcatacaataactttagagtgacctcaatgcaggctgtgatcaacgaaactcctctccctatagatttgtatagatatgtggacgttagcgggcgaaccgaacagttcggcaagtttagtgtgatcaattatgacttaaatcaggtaatcaccactacagtcatgaagcacaccaagattttttctgctaacggccaagtgattgaggtccagtatgagattcttaaggcaatcgcttattggatgaccatacagtacgataacgtgggcagaatggtcatatgcgacatcagagtgggagtggacgccaacataacccgatacttctacgagtacgacgcagacggtcagctccaaacagtgagcgtgaacgataagacgcaatggaggtacagctacgacttaaatggcaatatcaaccttcttagtcacgggaagtccgccaggttaacacctcttagatacgatctccgagatcgcatcactcggctgggagagattcagtacaagatggatgaggatggatttctccgacagagaggaaatgacatattcgagtacaactccaatggcctgctgcagaaagcgtataacaaagccagtgggtggacggtacagtattactacgatggtctgggccggcgcgttgcttctaagtcatcactcggccagcatctccagtttttctacgccgacctgaccaatcctattagagttacccacttgtacaaccacacttctagcgaaattacaagcctctattacgaccttcagggccaccttatcgccatggaactgtcttcaggagaggagtactacgttgcctgcgataataccgggacacctctcgctgtcttctcctcccgggggcaggtgattaaggaaattttgtacaccccatacggggacatttaccacgatacatatccagacttccaggtgattattggatttcatggggggctatatgacttcctcacgaagctcgtgcaccttggccagagggactacgacgtggtggcaggacggtggacaacccccaatcatcacatttggaaacaattaaacctgctgcccaagcccttcaacctatactcctttgaaaataactacccagtcggaaagatccaggatgtcgcgaaatacacaactgacattaggtcatggttggagctgtttggatttcaactgcacaatgtcctgcccggctttccgaagccagagcttgagaatttagagctgacctatgagctcctacgcctgcagactaaaacacaggagtgggacccagggaaaacaatacttgggatccaatgcgagttacagaaacagttacgcaattttatcagcttagaccagctgcctatgaccccacgctacaatgacggtcgctgtctggagggaggcaaacaaccccgtttcgctgccgtgccaagcgttttcggaaaagggattaaatttgccataaaagatgggatcgtcaccgcggacattatcggggtagcaaatgaagatagcaggcgcctggccgccatcctgaataatgcacactatttggagaacttgcatttcacaattgaaggtagagacacccactattttataaagctgggctcactcgaggaagacttggttctcatcggcaacacaggtggacgacgaatcctggaaaatggcgttaacgtcactgtttcccaaatgactagtgtactgaatggacgcacaagacggtttgccgacatacagctgcaacacggagcactatgtttcaacattcggtacggaacaacagtggaagaggaaaagaaccatgtgctggagatagccagacaacgggcagttgctcaagcctggactaaagagcaaaggcgccttcaggaaggagaggaaggcattcgggcatggactgaaggcgagaagcagcagctcctgagcacaggtcgcgtacagggttatgatgggtacttcgttctcagtgtggagcaatatcttgagctctctgatagcgcaaataatatacactttatgcgccagtccgaaatcggccggcgctag

SEQ ID NO: 178735 - DNA, 8178 bp, Artificial Sequence
  derived and/or modified sequence
atggagcagacagactgcaagccctaccagcccctgcccaaggtgaagcatgagatggacctggcctacaccagcagcagtgatgaaagtgaagatggcaggaagccccggcagagctacaacagccgggagaccctgcacgagtacaaccaggagctgaggatgaactacaacagccagagcaggaagaggaaggaggtggagaagagcacccaggagatggagttctgtgagaccagccacaccctgtgcagcggctaccagacagacatgcacagcgtgtccagacatggctaccagctggagatgggcagtgatgtggacacagaaacagaaggagctgccagcccagaccacgccctgaggatgtggatccggggcatgaagtctgagcacagcagctgcctgagcagccgggccaacagcgccctgagcctgacagacacagaccacgagaggaagagtgatggagaaaatggcttcaagttcagccctgtgtgctgtgacatggaggcccaggccggcagcacccaggatgtgcagagcagcccccacaaccagttcaccttccggcccctgcccccacctcctcctcctcctcatgcctgcacctgtgccaggaagcccccacctgctgctgacagcctgcagaggaggtccatgaccaccaggagccagcccagccctgctgccccagccccacccaccagcacccaggacagcgtgcacctgcacaacagctgggtgctgaacagcaacatccccctggagaccaggcacttcctgttcaagcacggcagcggcagcagcgccatcttctctgctgccagccagaactaccccctgaccagcaacacagtgtacagccccccaccccggcccctgcccaggagcaccttcagcaggcctgccttcaccttcaacaagccctaccgctgctgcaactggaagtgcacagccctgagcgccacagccatcaccgtgaccctggccctgctgctggcctacgtgattgctgtgcacctgtttggcctgacctggcagctgcagcctgtggagggggagctgtatgccaatggagtgtccaaaggaaacagaggaacagagagcatggacaccacctacagccccatcggcggcaaggtgtctgacaagtctgagaagaaggtgttccagaagggccgggccatcgacacaggagaggtggacatcggggcccaggtgatgcagaccatccccccaggcctcttctggaggttccagatcaccatccaccaccccatctacctgaagttcaacatcagcctggccaaggacagcctgctgggcatctatggaagaagaaacatcccccccacccacacccagtttgattttgtgaagctgatggatggcaagcagctggtgaagcaggacagcaagggcagtgatgacacccagcacagccccaggaacctgatcctgaccagcctgcaggagaccggcttcatcgagtacatggaccagggcccctggtacctggccttctacaatgatggcaagaagatggagcaggtgtttgtgctgaccacagccatcgagatcatggatgactgcagcaccaactgcaatggaaatggagagtgcatcagcggccactgccactgcttccctggcttcctgggccctgactgtgcccgggacagctgccctgtgctgtgtggcggcaatggagaatatgagaagggccactgtgtgtgccgccacggctggaagggcccagaatgtgatgtgcctgaggagcagtgcatcgaccccacctgcttcggccacggcacctgcatcatgggcgtgtgcatctgtgtgcccggctacaagggggagatctgtgaggaggaggactgcctggaccccatgtgcagcaaccacggcatctgtgtgaagggggagtgccactgcagcacaggctggggcggcgtgaactgtgagacccccctgcctgtgtgccaggagcagtgcagcggccacggcaccttcctgctggatgctggggtgtgcagctgtgaccccaagtggacaggcagtgactgcagcacagagctgtgcaccatggagtgtggcagccacggcgtgtgcagccggggcatctgccagtgtgaggagggctgggtgggccccacctgtgaggagaggagctgccacagccactgcacagaacatggccagtgcaaggatggaaaatgtgagtgcagccctggctgggagggggaccactgcaccatcgcccactacctggatgctgtgagagatggctgccccggcctgtgctttggaaatggccgctgcaccctggaccagaatggctggcactgtgtgtgccaggtgggctggagcggcaccggctgcaatgtggtgatggagatgctgtgtggggacaacctggacaatgatggagatggcctgacagactgtgtggaccctgactgctgccagcagagcaactgctacatcagccccctgtgccagggcagcccagaccccctggacctgatccagcagagccagaccctcttcagccagcacaccagccgcctcttctatgaccgcatcaagttcctgattggcaaggacagcacccacgtgatccccccagaggtgtcctttgacagccggcgggcctgtgtgatccggggccaggtggtggccattgatggcacccccctggtgggcgtgaatgtgtccttcctgcaccacagcgactatggcttcaccatcagccggcaggacggcagctttgacctggtggccatcggcggcatcagcgtcatcctgatctttgacaggagccccttcctgcctgagaagaggaccctgtggctgccctggaaccagttcatcgtggtggagaaggtgaccatgcagagggtggtgtctgacccccccagctgtgacatcagcaacttcatcagccccaaccccatcgtgctgcccagccccctgaccagctttggaggcagctgcccagagcggggcaccatcgtgcctgagctgcaggtggtgcaggaggagatccccatccccagcagctttgtgcggctgagctacctgagcagcaggaccccaggctacaagaccctgctgcgcatcctgctgacccacagcaccatccctgtgggcatgatcaaggtgcacctgactgtggccgtggagggccgcctgacccagaagtggttccctgctgccatcaacctggtgtacacctttgcctggaacaagacagacatctacggccagaaggtgtggggcctggccgaggccctggtgtctgtgggctatgaatatgagacctgcccagacttcatcctgtgggagcagaggacagtggtgctgcagggctttgagatggatgccagcaacctgggcggctggagcctgaacaagcaccacatcctgaacccccagagcggcatcatccacaagggaaatggagagaacatgttcatcagccagcagccccctgtgatcagcaccatcatgggaaatggccaccagaggtctgtggcctgcaccaactgcaatggacctgcccacaacaacaagctgtttgcccctgtggccctggccagcggcccagatggctctgtgtatgtgggggacttcaactttgtgcggcgcatcttccccagcggcaacagcgtgtccatcctggagctgagcaccagccctgcccacaagtactacctggccatggaccctgtgtctgagagcctgtacctgagtgacaccaacaccaggaaggtgtacaagctgaagagcctggtggagaccaaggacctgagcaagaactttgaggtggtggccggcaccggggaccagtgcctgccctttgaccagagccactgtggagatggcggccgggccagcgaggccagcctgaacagcccccggggcatcaccgtggacagacatggcttcatctactttgtggatggcaccatgatcaggaagattgatgaaaatgctgtgatcaccaccgtcatcggcagcaatggcctgaccagcacccagcccctgagctgtgacagcggcatggacatcacccaggtgcggctggagtggcccacagacctggccgtgaaccccatggacaacagcctgtatgtgctggacaacaacatcgtgctgcagatcagcgagaacagaagagtgcgcatcatcgccggccggcccatccactgccaggtgcccggcatcgaccacttcctggtgtccaaggtggccatccacagcaccctggagagcgcccgggccatctctgtgagccacagcggcctgctcttcatcgccgagacagatgagaggaaggtgaaccgcatccagcaggtgaccaccaacggggagatctacatcatcgccggggcccccacagactgtgactgcaagattgaccccaactgtgactgcttctctggagatggcggctacgccaaggatgccaagatgaaggcccccagcagcctggccgtgtccccagatggcaccctgtatgtggccgacctgggcaatgtgcgcatccgcaccatcagcaggaaccaggcccacctgaatgacatgaacatctatgagatcgccagccctgctgaccaggagctgtaccagttcaccgtgaatggcacccacctgcacaccctgaacctgatcacccgggactatgtgtacaacttcacctacaacagcgagggggacctgggcgccatcaccagcagcaatggaaacagcgtgcacatcagaagagatgctgggggcatgcccctgtggctggtggtgcctgggggccaggtgtactggctgaccatcagcagcaatggagtgctgaagagggtgtctgcccagggctacaacctggccctgatgacctacccaggcaacacaggcctgctggccaccaagagcaatgaaaatggctggaccaccgtgtatgaatatgaccctgagggccacctgaccaatgccaccttccccaccggggaggtgtcctccttccacagcgacctggagaagctgaccaaggtggagctggacaccagcaaccgggagaatgtgctgatgagcaccaacctgacagccaccagcaccatctacatcctgaagcaggagaacacccagagcacctacagagtgaacccagatggcagcctgcgggtgacctttgccagcggcatggagatcggcctgagcagcgagccccacatcctggccggggctgtgaaccccaccctgggcaagtgcaacatcagcctgcctggagagcacaatgccaacctgattgagtggaggcagaggaaggagcagaacaagggaaatgtgtctgcctttgaaagaaggctgcgggcccacaacagaaacctgctgagcattgactttgaccacatcaccaggacaggcaagatctatgatgaccacaggaagttcaccctgcgcatcctgtatgaccagacaggccggcccatcctgtggagccctgtgagccgctacaatgaggtgaacatcacctacagccccagcggcctggtgaccttcatccagaggggcacctggaatgagaagatggagtatgaccagagcggcaagatcatcagcaggacctgggcagatggcaagatctggagctacacctacctggagaagtctgtgatgctgctgctgcacagccagaggcgctacatctttgaatatgaccagcctgactgcctgctgtctgtgaccatgcccagcatggtgcgccacagcctgcagaccatgctgtctgtgggctactacagaaacatctacaccccaccagacagcagcaccagcttcatccaggactacagcagagatggccgcctgctgcagaccctgcacctgggcaccggccggcgggtgctgtacaagtacaccaagcaggcccggctgtctgaggtgctgtatgacaccacccaggtgaccctgacctatgaggagagcagcggggtcatcaagaccatccacctgatgcatgatggcttcatctgcaccatccgctaccggcagacaggccccctcatcggccggcagatcttccgcttcagcgaggagggcctggtgaatgccaggtttgactacagctacaacaacttccgggtgacctccatgcaggccgtcatcaatgagacccccctgcccatcgacctgtaccgctacgtggatgtgtctggccgcacagagcagtttgggaagttcagcgtcatcaactatgacctgaaccaggtgatcaccaccaccgtgatgaagcacaccaagatcttcagcgccaacggccaggtgattgaggtgcagtatgagatcctgaaggccatcgcctactggatgaccatccagtatgacaacgtgggccgcatggtgatctgtgacatccgggtgggcgtggatgccaacatcacccgctacttctatgaatatgatgctgatggccagctgcagacagtgtctgtgaatgacaagacccagtggagatacagctatgacctgaatggaaacatcaacctgctgagccacggcaagagcgcccggctgacccccctgcgctatgacctgcgggaccgcatcacccggctgggggagatccagtacaagatggatgaagatggcttcctgcggcagagaggaaatgacatctttgagtacaacagcaatggcctgctgcagaaggcctacaacaaggccagcggctggacagtgcagtactactatgatggcctgggcagaagagtggccagcaagagcagcctgggccagcacctgcagttcttctacgccgacctgaccaaccccatccgggtgacccacctgtacaaccacaccagcagcgagatcaccagcctgtactatgacctgcagggccacctgattgccatggagctgagcagtggagaggagtactacgtggcctgtgacaacacaggcacccccctggccgtgttcagcagccggggccaggtgatcaaggagatcctgtacaccccctacggggacatctaccatgacacctacccagacttccaggtgatcatcggcttccacggcggcctgtatgacttcctgaccaagctggtgcacctgggccagagggactatgatgtggtggccggccgctggaccacccccaaccaccacatctggaagcagctgaacctgctgcccaagcccttcaacctgtacagctttgagaacaactaccctgtgggcaagatccaggatgtggccaagtacaccacagacatccgctcctggctggagctgtttggcttccagctgcacaacgtgctgcccggcttccccaagccagagctggagaacctggagctgacctatgagctgctgcggctgcagaccaagacccaggagtgggaccccgggaagaccatcctgggcatccagtgtgagctgcagaagcagctgaggaacttcatcagcctggaccagctgcccatgaccccccgctacaatgatggccgctgcctggagggcggcaagcagcccaggtttgctgctgtgcccagcgtgtttgggaagggcatcaagtttgccatcaaggatggcatcgtgacagctgacatcatcggcgtggccaatgaagacagccggcggctggccgccatcctgaacaatgcccactacctggagaacctgcacttcaccatcgagggccgggacacccactacttcatcaagctgggcagcctggaggaggacctggtgctgattggcaacacaggaggccgccgcatcctggagaatggagtgaatgtgacagtgtcccagatgacctctgtgctgaatggaagaacaagaagatttgctgacatccagctgcagcacggggccctgtgcttcaacatccgctatggcaccaccgtggaggaggagaagaaccacgtgctggagatcgcccggcagagagctgtggcccaggcctggaccaaggagcagaggcggctgcaggagggggaggagggcatccgggcctggacagaaggagagaagcagcagctgctgagcacaggccgggtgcagggctatgatggctactttgtgctgtctgtggagcagtacctggagctgagtgacagcgccaacaacatccacttcatgaggcagagcgagatcggcagaagatag

SEQ ID NO: 178736 - DNA, 12875 bp, Artificial Sequence
  derived and/or modified sequence
gactgcttgcattaaaggacttcctcatcctttttttcatgaaactgagcttgcttaatcagagatggagcaaactgactgcaaaccctaccagcctctaccaaaagtcaagcatgaaatggatctagcttacaccagttcttctgatgagagtgaagatggaagaaaaccaagacagtcatacaactccagggagaccctgcacgagtataaccaggagctgaggatgaattacaatagccagagtagaaagaggaaagaagtagaaaaatctactcaagagatggaattctgtgaaacctctcacactctgtgctctggctaccaaacagacatgcacagcgtttctcggcatggctaccagctagagatgggatctgatgtggacacagagacagaaggtgctgcctcacctgaccatgcactaagaatgtggataaggggaatgaaatcagagcatagttcctgtttgtccagccgggccaactctgcattatccttgactgacactgaccatgaaaggaagtctgatggggaaaatggtttcaaattctctcctgtttgttgtgacatggaggctcaagctgggtctactcaagatgtgcagagcagcccacacaaccagttcaccttcagacccctcccaccgccacctccgcctcctcatgcctgcacctgtgccaggaagccaccccctgcagcggactctcttcagaggagatcaatgactacccgcagccagcccagcccagctgctccagctcccccaaccagcacgcaggattcagtccatctgcataacagctgggtcctgaacagcaacataccattggagaccaggcatttcctgttcaaacatggatctggttcctctgcgatcttcagtgcagccagtcagaactaccctctgacatccaataccgtgtactcgccccctcccaggcctcttcctcgaagcaccttttcccgacctgcctttacctttaacaaaccttacaggtgctgcaactggaagtgcacagcattgagcgccactgcaatcacagtgactttggccttgttactagcctatgtgattgcagtgcatttgttcggcctgacttggcagttgcaaccagttgaaggagagctgtatgcaaatggagttagcaaagggaacagggggaccgagtccatggacactacttactctccaattggaggaaaagtttctgataaatcagagaaaaaagtgtttcagaagggacgggcgatagacactggagaagttgacattggtgcacaggtcatgcagaccattccacctggtttattctggcgtttccagattactatccaccatccaatatatctgaagttcaatatttctttagccaaggactctctgctgggaatttatggcagaagaaacattccacctacacatactcagtttgattttgtaaaactaatggatggcaaacagctggtcaagcaggactccaagggctctgatgatacacagcactcccctcggaacctgatcttaacttcgcttcaggagacaggtttcatagagtatatggatcaaggaccttggtatctggcgttttacaatgatggaaaaaagatggagcaagtattcgtgttaactacagcaattgaaataatggatgactgttcaaccaattgcaatggaaatggagagtgtatctctggccattgtcattgtttcccaggattccttggacctgactgtgctagagattcctgccctgtgctgtgtggtgggaatggagaatacgagaaaggacactgtgtctgccggcatggctggaaggggccagagtgtgacgttccggaagaacaatgcattgatccaacatgctttggccacggcacctgcatcatgggagtctgcatctgtgtgccaggatacaaaggagaaatatgcgaggaagaggactgcctagacccaatgtgttccaaccatggcatctgtgtaaaaggagaatgtcactgttctactggctggggaggagttaactgtgaaacaccacttcctgtatgtcaagagcagtgctcaggacacggaacttttcttctggacgctggagtatgcagctgtgatcccaagtggacaggatctgactgctcaacagagctgtgtaccatggagtgtggtagccatggagtctgctcaagaggaatttgccagtgtgaagaaggctgggtaggaccaacatgtgaggaacgctcctgtcattctcattgtactgagcatggccaatgcaaagatggaaaatgtgagtgtagccctggatgggagggcgaccactgcacaattgctcactacttagatgctgtccgagatggctgcccagggctctgctttggaaatggacgatgtaccctggatcaaaatggttggcactgtgtgtgtcaggtgggttggagtgggacaggctgcaatgttgtcatggaaatgctttgtggagataacttggacaatgatggagatggtttaaccgactgtgtggatcctgactgttgtcaacaaagcaactgttatataagtcctctctgccagggctcaccagatcctcttgacctcattcagcaaagccaaactctcttctctcagcacacttcaagacttttttatgatcgaatcaaattcctcattggcaaggacagtactcatgtcattcctcctgaggtgtcatttgacagcaggcgtgcctgtgtgattcgaggccaagtggtggccatagatggaactcctctagtgggagtgaatgtcagtttcttgcaccacagtgattatgggtttaccatcagccggcaagatggaagctttgacctcgtggccatcggtggcatctctgtcatcttaatcttcgaccgatcccctttcctgcctgagaagagaacactctggttgccttggaatcagtttattgtggtagagaaagtcaccatgcagagagttgtatcagacccgccatcctgcgatatctccaactttatcagcccaaaccctattgtgcttccttcaccgctcacatcatttggagggtcctgtccagagaggggaactattgttcctgagctgcaggttgtacaggaggaaattcccattccctccagctttgtgaggctgagttacctgagcagccgcacccctgggtataaaaccctgctacggatccttctgacacattcaacgattcctgtaggcatgataaaagtacacctcacagtagctgtggaagggcgactcacacagaagtggtttcccgccgcaattaatcttgtctacacatttgcttggaacaagaccgacatctatggacagaaggtttggggcctggcagaggctttggtatctgtgggatatgaatatgaaacgtgccctgactttattctctgggagcaaaggacagtcgttttacaaggttttgagatggatgcttctaacctaggaggctggtctttgaataagcatcacattttgaatcctcaaagtggaatcatacataaagggaatggagaaaatatgttcatttcccagcagcccccagtcatatcaaccataatgggtaatggacaccaaaggagtgtagcctgcaccaactgcaatggcccagcccacaacaacaaactctttgctcctgtcgccttagcttctggccctgatggcagtgtgtatgttggcgacttcaattttgtaaggagaatatttccctcgggaaactccgttagtattttggaattaagcacaagtcctgctcacaaatactatctggctatggaccctgtgtctgaatcactctatctatcagacaccaatactcgcaaagtctacaagttgaaatctcttgtggagacgaaagatctgtccaagaattttgaagtggtggcaggaactggtgatcagtgccttccctttgaccagagtcattgtggagatggtgggagagcatcggaagcttcactgaatagccctcgaggcatcacagttgataggcatggatttatttactttgtggatgggactatgattcgcaaaattgatgagaatgctgtgatcacaactgtaatcggctcaaatggtctgacttccacacaaccactgagctgtgactcaggaatggacatcactcaggtgcgattagagtggccaacagaccttgcagtaaatcctatggacaattcattgtatgtcttggataacaacattgtgctgcaaatttctgagaacaggcgtgttcggatcatcgcaggacgccccattcactgccaggtgccaggcatcgatcatttcctggtcagcaaggtagcaattcactccactctagagtcagcgagggccatcagtgtctcccacagcgggctgctcttcatagctgaaacagacgagaggaaagtaaaccgcattcagcaagtaaccaccaatggggagatctacatcatcgctggtgcccccactgactgtgactgcaaaattgatccaaactgtgactgtttttcaggtgatggtggctatgccaaagatgcaaagatgaaagccccttcctccttagcagtgtcgcctgatggaaccctctatgtggcagacctcggaaatgttcgaattcgtaccatcagcaggaaccaagcccacctgaatgacatgaacatttatgagattgcttcacccgctgatcaggaactgtaccagttcactgtaaatggaacccacctacacaccctgaacttgataacaagggactatgtttataacttcacctacaattctgaaggtgacttgggcgcgattaccagcagcaatggcaattcagtgcacattcgccgtgatgcaggcggaatgccgctatggcttgtggtgcctggcggacaagtatactggctgactataagcagcaatggagtcctgaaaagagtgtcagcccaaggctataatctggccttaatgacctatccaggaaacacagggcttctggctaccaaaagtaacgaaaatggatggacaaccgtttatgagtatgaccccgagggacacctgaccaatgcaacgtttcccactggagaggtcagcagcttccacagtgacctggagaagctgacaaaagtggagctagatacttccaaccgtgaaaatgtcctcatgtcaaccaacttgacggcaactagtaccatatatattttaaaacaagaaaatactcaaagtacctatcgggtgaatccagatggttccctgcgtgtcacttttgccagcgggatggagatcggcctcagctcagagccccacatcctggcaggggcagtcaaccctaccctgggcaaatgcaacatctcattgcccggagagcacaatgcaaacctcatcgagtggcggcagaggaaggagcaaaacaaaggcaatgtttcggcttttgaaaggaggctgagggcccacaacagaaacctactctccatagattttgatcatataacccgcacaggaaagatctatgatgaccatcgaaaattcacccttcgaattctttatgaccagactgggcgacccattctgtggtctcctgtaagcagatataatgaagtgaacatcacatattcaccttcgggattggtgacgtttattcaaagaggaacgtggaatgaaaaaatggaatatgaccagagtgggaaaattatttcaagaacttgggctgatgggaaaatttggagctatacctacttagaaaaatctgtgatgcttctcctacacagccagcggcgttacatctttgagtatgaccaaccagattgtctgctctcagtcaccatgcctagcatggtgcgtcacagcttacaaaccatgctttcagtgggctactaccggaacatctacaccccaccggacagtagcacttcttttatccaagactatagtcgagatggccgattgctacagaccctgcatctggggacagggcgcagagtcttatacaagtacaccaagcaagcaaggctttctgaggttctctatgataccactcaggtcacattaacatatgaagagtcttctggagtgattaagacaatacacctgatgcatgacggattcatctgcacaatcagatacaggcaaacaggacctcttattggacgccagattttcagattcagtgaagaaggccttgtgaatgcacggttcgactacagctacaacaatttccgagtcacaagcatgcaagctgtaatcaatgaaacccctttgcctatagatctttaccgatatgttgatgtctctggcagaacagagcagtttggaaaattcagtgtaattaattacgatttaaatcaggtcataactactacagtgatgaaacacaccaaaatcttcagtgccaatggacaagtcattgaagtccaatatgaaatcctaaaggcaattgcctactggatgaccattcaatatgataatgtgggccgcatggtaatatgtgacataagggtaggagtagatgccaatataacaaggtacttctatgaatacgatgctgatgggcaacttcagactgtttctgtaaatgacaaaacccagtggcgttatagttacgatctgaatggaaacatcaacctcttaagccatgggaagagtgctcgtcttactcctctccgatatgacctccgagaccgcatcaccagattaggagaaattcagtataaaatggatgaagatggctttctgaggcagaggggaaatgatatttttgaatataattctaatggcctgctgcagaaagcctacaataaggcttctggctggactgtgcagtattactatgatgggcttgggcgacgtgtcgcgagtaagtccagcctagggcagcaccttcagttcttttatgcagaccttaccaaccccataagagttactcatttgtacaaccacacaagctcggagattacatctctgtattatgatctccaaggtcaccttattgccatggagttaagcagtggtgaagaatattatgtagcctgtgataatacaggtaccccactagctgtgttcagcagccgaggtcaggtcataaaggagatactatacacaccttatggcgatatctatcatgacacttaccctgactttcaggtcattattggttttcatggaggactctatgatttccttactaaattagtgcacctggggcaaagggattatgatgttgttgctggcagatggacaacgcctaatcatcacatatggaaacagttgaacctccttcctaaaccattcaacctctactcctttgaaaataactacccagttggcaaaattcaagatgttgcaaagtataccacagacatcagaagttggttggagctatttggtttccaattacacaatgtactacctggatttcccaaacctgaattagaaaatttagaattaacttacgagcttctacggcttcagacaaaaactcaagagtgggatcctggaaagactatcctgggcattcagtgtgaactccagaaacagctcaggaatttcatttccttggaccaactacctatgactccccgatacaatgatggacggtgccttgaaggagggaagcaaccaaggtttgctgctgtcccttctgtttttgggaaaggtataaaatttgccatcaaggatggcatagtaacagctgatattataggagtagccaatgaagatagcaggcggcttgctgccattctcaataatgcccattacctggaaaacctacattttaccatagaggggagggacactcactacttcattaagcttgggtctctggaggaagacctggtgctcatcggtaacactggggggaggcggattctggagaatggtgtcaatgtcactgtgtcccagatgacttctgtgttgaatgggaggactagacggtttgcagatattcagctccagcatggagccctgtgcttcaacatccggtatgggacaactgtcgaagaggaaaagaatcacgtgttggagattgccagacagcgcgcagtggcccaggcctggactaaggaacaaagaaggctgcaagagggggaagaggggattagggcatggacagaaggggaaaagcagcagcttttgagcactgggcgggtacaaggttacgatgggtattttgttttgtctgttgagcagtatttagaactttctgacagtgccaataatattcactttatgagacagagcgaaataggcaggaggtaacaaaaatatctctgcctttgcgtcaccaaagactgcctgtttttaaaacataaaatggtttattgtattggttttctagatcagaactctgtatatgtaaatatggaggaaaaacatatccaactgcctttcaatgtgacggaagatggtattttaatattgtttgtttaaactctttaagaaatgacagagatttttagttcttgtgtggcagtattcaaaataacacaagtagaactcaaacagctaaaaacagttttcagaaagcaccactttcaatttgccgagccatgcatatgttccaatatccagaaagaacccaaggttctctatctctattgtgagaagcagtttcatccttaactgttggcagaacttacgggctatttgaataggtggtgcaatagtatctgaaacttgcctttcgaaagactgccagccctttgacgttttccagatctgttataggaaacttaaaaacaggtgtaaaatgtcttcagccaccatctcctagagtgaggacccaattgcccttccttcttgattattcctccttgcttgttaaagtaaatgccatattgttgtgctgtgttttggcgtgtggtggctgggttctgtctaccatgcttccctgtgggtgtggtaaccagactgtatagccgctatttgctcgtgtgtacatgataccaaagcagctggccagcgtgacctctctcacacgacctgttttgactcaattttttactaaaagttgttcagctgtattggtatcatgtaaacatagcttttattaacctgggtaggaatttctcatttatatataggatgtgttttggtcatagtttcacattagtgattcagtatctatacactgacccaatggttttgtgcacatgaacggtaatttacttaaaagtatgattctggtacaaaaacaaacaaaggctttagcaggcatacgtgtctgggatgccgatacatacattaactactactgcagaaattcataagagccaaaaccttaaaaaaatagacctggtacttaagtgaaagtactaaagggaagaccagaccaaacatcacagcagttgctgccacattgtttcagcccacttagatttatctttcaaatgtacaattctgtattgaacatctcccagccatcttcaggaaatcgaatcaagtaaatcctttccaaccgaaaacatttcaactaactatagagaggcagactcatttttactaaaataatttatacagttagttattttcgttctccgtacttacccatttatctttatttaatcgtctctactgcctaggaaaataactattttccaggacgggttatttgttctgcgatcatttaaaatttggagaaaggtcaggattagtgttaatatcagctgcagtttctcaatctctaggaatcctgcagtaaaacaagccccttggtgagctggaagatttgtgcccagtgacaaagagatagtttgtaaaatgctgtgtaattgtaagttaccacaaatgaaaatacatgacagcacaatgtggcccgtagaaaattcccctgagccagcttctgcactttcatcaccgaatctgaacatttgctatgtctgaaggcaaatttatgatggaatgttagtttggattctttccagatgctacctaaatgcagtgtggggtcattgccttgctttgcgatgacagtttctttgaaaatatgcaaagtcataagctcatgttaaggtttttcaagagtctgcctcctactacacaaaggaaagcaagggaaaggaaatgaccctggcaaacagtagggaagggtgtattcaaacatttcattttcaaaaccttcgggttagaataccacttacacatgtattctgagagacagaattcatgaggaactcatctctctttataactggaaacacaccagcttgatatattgctaatccatactaaaatcatattattgggttttttctgaatcaggcctgtattaatggtacagtatttattcagaatggaattctaaaattactaacaaacttgttgaaaatttgaatacctccacaccaacctaaaaatggaccttaagttcctagaacctctgatgttcttttaaattaatggaaaaataatttgtgaactgtatatagagagtgcattcataaatgtgattatgtattttatcacaaatccaaaatgtcaatattagagtctattttgcttatattttaagcaattatacgtttttgcaattcattgatgatgtatcattttcaaactgctttaaatatccattagaaacaaatatttgaagcttttacttaatagtgattaccttgaactgtgcatttctagtttgtaatacgtatttggttggttcgtgcctttagtttgttaaagttacatttgtattatattcaggaaatgcactttttattacttacagctgtggttttaatactgccttgaactattattattctttttacaactcctaaagcttgagggaggaaagaaaaaaaaaacaaaactactaatcagtagtaaatcgaagagaaacattttggcatttcttaagaagaagatggagatattgagtatatcacttcctattcagctgaatagaaagaatgccttcattgacttgcagttctgcagtttaaattattgaaagaacaattcgtttgcatttcctgatgaaagtaaaagcatttttcagagaaacatatgaatttctcatacccagcagacagatggctgacactgcacagccacacaccattcgagtaagttaaagtgagagcatagtagttggactctcctatgaagaacattctgggctggaggcagggaatactccatggttgtttctttttcctacttaagcccattttgtttgtgcttttctgttttgttttgttttcactcttgcactacagtctagagatccaaatgaactgaaaagttcaaagtttaacacatttaaatatgtttacttttagttgtcattctaatcgttattgattagaagcatgactcctgaaggaaagggaaataaatctcaattcatactaacttgcaacaaaacacttttaccatataaataagtatatgatttatttttaacccaaaaaatgtataaaataagtgtgtcctttactgtcaatttatctagaagatctataatatatagactacatatatataatatatacaacatagccaaatgtatgaaaacttgacaatgtataatttggaattcacatgctacctatgtagacaggtatgaaattaagttataattttcatgagacattttcatcactgttgacacagtttcaagcattccatcatgttattttgactctttttcttttttttttctttaaaaatatatttttaactagaccaggccccactataatatcacttaagagagtcagggcaaagtttttgcatttatgaagatgtgttcatgtaagggtgattgtaatggagttcattggtaatagaagcaaaagtacagtaacgaagtattgaaaagaaaattttggagacattggagcatattatatatagcttgtggaaagacataaggctacagatggaatggaacattcctgttttcttgaagaaattcacatacacatagctgacctgactagtacttcagctcttccacagccttctataaaggttctttcttctgcaaagaaaacaaaacaaaacaaaacaaaacaaaaaaaacaaaaaaagcgcaaaaaacaaaaaaacaaaaaaaagcaaagtaaaatttaaaaatacagaaaacaaacaacaaaaaagaattcaaccataaatagtgactattattttcagtgtgtccttcatgtgaaagctattaaggaccaaatatactactgttcataagaagaaattactttctaaacagtaactgaaaatacttagagttaaacttgctgtggattttgtcttggcagttgtcatcttacattatttgtcaaaggaaatgtgtttggcagttaaaaatctttccttagatttagtggtggactttaacctcttaaataaatgttagtatatcagattgtgtccttgaaaaatattttacttgtatgaatcatgacaacgtctaaatctttactattcttctggcaaaagcatcagtaagaaagaaggcgaaaaagagaagtatagcctttatgtcagaaaaacattctttttagctgcttactttctcatgaaaagtaaagatgtttacagtgtatgccaagttttcagtttctgtataacaacaggtagaggttctaatcatattgaaaattgtgttataatggtctgagccatgttgctaggaaacaataggttccaattttgtattcctgctctcctgtgctgaaaagtgactggatactgtacaggttcatgttctctggctgcagttaaatggtcttttgcattttgctctggctttcaggccagaagcatgcatttttctacaagagcatcacaacaacatgctgtaaatatttaaagttaaacattatgtgttgatatttgaaagaaaagtactttgaatatttcatttttaaaaaataaaattgccaatgaaaaa

SEQ ID NO: 178737 - DNA, 8178 bp, Artificial Sequence
  derived and/or modified sequence
atggagcagaccgactgcaagccctaccagcccctgcccaaggtgaaacacgagatggatctggcctacacttcatcgagcgatgagtctgaggacggccgcaaaccccggcagagctataactctagggagaccttacatgagtacaatcaggaactgcgaatgaactacaactctcagtctcggaagagaaaagaagtagagaaatcaacccaagagatggagttttgtgagacaagtcacaccctgtgcagcggataccaaaccgatatgcattctgtctctcgtcatgggtatcaactcgagatgggctctgacgtggacacggaaacagaaggcgccgcctcacctgaccatgctcttcggatgtggatccgtggaatgaaatcagagcactctagttgtctgtcttcacgggctaacagcgccttatctttgaccgacaccgatcatgagcgtaaatcagacggagaaaatggtttcaagttctcccctgtgtgttgtgatatggaggcacaggccggaagtacacaggacgtgcagtcctccccacataaccagtttacctttcggccactgcccccgcccccacctccgcctcacgcgtgcacttgtgcgagaaaacctcccccagcagccgactcactgcaaagacgttctatgacaactcgaagccaaccttcccctgcagcccctgcgcccccgacctccacccaggattcggtgcacctgcataacagctgggtcctgaactctaatatccctctggaaaccaggcactttcttttcaaacatggatctggttcgtccgccattttctctgcagcttcccagaattacccactgacctccaataccgtatactctccacccccccgccccctcccaaggagcaccttttcccgtcccgctttcacctttaataaaccctatcgatgctgtaactggaaatgcaccgccctctcagccactgccatcaccgttaccctggctttactcctggcgtatgtaatagcggtacatcttttcggactgacctggcaactgcagcccgttgagggagagctgtatgccaacggggtgagtaagggaaaccgtggaactgagtcaatggacactacatattcaccaattggcggcaaggtctccgacaaatccgaaaagaaagtgtttcagaaaggtagagcgatcgacacgggggaagttgatataggagctcaagttatgcaaactataccacccgggttgttttggagatttcagattacaattcaccacccaatctatttgaagtttaatatttcattagccaaggatagcctgcttggcatttacggcagacgcaacattccacctacccatacccagtttgattttgttaaattgatggatggtaaacagctggtcaaacaagatagcaagggatcagatgatacacagcacagtcctcggaatctgattctgacatccctgcaggagaccgggttcattgagtacatggaccaaggcccatggtacctggcgttctacaatgatggtaagaagatggagcaggtcttcgttcttactactgcaatagagatcatggacgattgtagtacgaattgcaacgggaatggagaatgcatatcaggtcattgtcactgttttccggggttcctaggccccgattgcgcgcgcgacagttgccctgtgctgtgtggtggcaacggcgagtacgagaaaggacattgcgtgtgccggcatgggtggaaggggcccgagtgtgacgttcctgaagagcaatgtatcgatccaacgtgttttggccacgggacctgcatcatgggggtgtgcatctgcgttcctggctacaaaggagagatctgcgaagaggaggactgtttagatcctatgtgtagcaaccatgggatttgtgtaaaaggggaatgtcattgtagcacagggtggggcggggtcaactgcgagacacccttacctgtttgtcaggaacagtgttccgggcacggaaccttcctgctagacgccggcgtttgcagctgcgatccaaagtggacagggtccgattgttccaccgaactctgcaccatggagtgcggatcgcatggggtgtgctctcgcgggatatgccagtgtgaggaggggtgggttgggccaacgtgcgaggagcgctcctgccacagccactgtaccgagcacggacaatgtaaggatggaaagtgtgagtgtagccccggatgggaaggggatcattgcacaatcgcgcactacctcgatgccgtgcgcgatggctgtccaggcctgtgtttcggcaacgggaggtgcacgttagaccagaacggatggcattgcgtttgccaagttggctggtcaggcacaggctgcaacgtcgtgatggagatgctgtgtggagataatctggacaatgacggcgacgggttgaccgattgcgtggaccctgactgctgccaacaaagcaactgttatatatctcctctctgtcagggttccccggatcctttagacctcatccagcaatcacagacactgttcagtcagcacaccagccgactgttttatgataggatcaaattcctgatcggtaaggactcaacccacgtgatccctccggaggtgagctttgattcgaggcgcgcatgtgtgatccgggggcaggtagtggccatagatggcacacctctcgtgggagttaacgtgtcatttctgcatcacagcgattatggcttcactatcagccgccaggatggtagcttcgatttggtggccatcggaggcattagcgtgattctcatctttgacagatctccttttttgcctgaaaagcgcaccctctggctgccctggaatcaattcatagtggtggagaaagtgacaatgcagcgggtagtatccgacccacctagctgtgatattagcaactttatctctcctaatccaatcgttcttccttctccgctaaccagttttggagggtcttgccctgaacggggtacgatagtaccagaactccaagtcgtccaggaggagattcctattccaagctctttcgttcgactgtcctatctaagctcccgtactcctgggtacaaaacactactgagaatccttcttactcattctacaatacccgtcggcatgattaaggtgcacctgaccgtggctgttgagggcaggctgacccaaaagtggtttcctgccgctatcaacttagtgtacacctttgcatggaataaaacagatatctacggccagaaggtttgggggctggccgaggcccttgtgtctgtggggtacgaatacgaaacctgtcccgattttattctgtgggaacaacggacagtggtgctacagggcttcgagatggatgcaagcaacctggggggatggagtcttaacaaacatcatatcctcaatccgcagtcaggcatcatccataaaggtaatggcgagaacatgttcatcagccagcaaccgcctgtgataagcaccattatggggaacggccaccagagaagcgtggcttgcactaactgtaatggccccgcacataataacaagttgtttgcccctgttgcgctagcaagcggacctgacggctcagtctacgtgggcgatttcaactttgtgcgaaggattttccctagcggcaactcagtttctattctggagttgtctactagtcctgcacataagtattatttagctatggaccctgtatcagagtctctgtacctctctgacactaatacacggaaagtgtataagttgaagtctctggttgaaactaaggacctctctaagaacttcgaagtggtggccggaactggggaccagtgcctacctttcgatcagtctcactgcggagacgggggccgcgcttctgaggctagcttgaactctcctcggggtataactgtagatcgccatggctttatatacttcgtggacggtactatgatccgcaagattgatgaaaacgcagttattacaactgttataggctctaacggactgacaagcacgcaacctctaagttgcgatagcgggatggatatcactcaagtgcgtttggagtggcccacagacctggccgtgaatccaatggacaattccttgtacgtcctggacaacaatattgtgcttcagatctctgagaatcgccgcgtaaggatcattgccggcagaccaatccattgccaggtgcctgggatcgatcatttcttggtgtctaaggttgccatccatagcacattggaatcagctcgtgcaattagcgtgagccactctggccttctttttattgctgagaccgatgagagaaaggtcaatcgcattcagcaagtcacaacaaatggcgagatttacattatcgcaggcgcgcccacggattgtgactgcaagatcgatcctaactgtgactgcttttccggcgacggaggctatgcgaaggatgcaaagatgaaagccccgtctagcttagcagtcagtcccgacggcactttatacgtggcagatctggggaatgtgcgcatcaggaccatcagccgaaaccaggctcatctgaatgacatgaacatctacgagattgcgagccctgctgatcaggagctgtatcaatttacagttaacgggacacacctgcatacattgaatctcataaccagagactacgtgtataactttacctataactccgagggcgacctaggggctatcacctcctcaaacggcaactctgtccacatccgacgtgacgcagggggcatgcccctttggctggttgtgccgggcggccaggtttactggctgactattagtagtaatggagtgctcaagcgggtatccgcccagggatacaatttggccctgatgacctaccctggcaatacaggattgctggctacaaaatctaacgagaacggctggacaactgtgtacgagtacgatccagaaggacaccttaccaatgctacctttccaacaggcgaggtgtcatccttccactccgacttggaaaagctgaccaaagtggaactcgacacttctaatagggagaatgtgcttatgtctacaaacttaactgccacctctacaatctacatcttgaaacaggagaacacgcagtcaacatacagggtgaaccctgacggatctttacgcgtgacctttgctagcggcatggaaattggattatcaagcgagccacatatcttggcgggagctgtgaaccctacgctcggcaagtgcaacatttccctgccaggggagcataatgctaacttaatcgagtggcgtcagagaaaggaacaaaataaagggaacgtttcagcgtttgaacgacgcctcagagcccataatagaaacttactcagtatagattttgatcacattactaggactggcaagatctatgatgaccacagaaaattcactctgcggatcctttatgatcagaccgggcgccccatactctggtcacctgttagccggtataatgaggtcaatattacttatagtccctccggccttgttacgttcatacagaggggaacctggaatgaaaaaatggaatatgaccagtccggcaagattatctctcgtacctgggcagatggtaaaatctggagttacacttaccttgaaaagagtgtaatgctcctgcttcacagccagcggaggtatatcttcgagtacgaccagccagattgccttctgtctgtgactatgccttccatggtgcgacacagcttacagactatgttatcggtgggatactatcggaatatctatacacctccagacagcagtacaagtttcattcaggattactcaagggacgggcgacttctgcaaaccctccatctgggcactgggcgacgcgtgctctacaagtatactaagcaggctcggctgtccgaggtgctctacgacactacacaggttaccttgacatatgaggaaagctctggagtaataaagaccatccatcttatgcatgacggatttatctgcacgatccgttatcggcagacaggcccattaatcggccgacagatctttcggttctccgaggaaggattggtcaacgcccggttcgactattcgtataacaacttcagggtcaccagcatgcaggccgtcataaatgagacgccactgccaatagacctctataggtacgttgatgtgagcggaaggactgaacagttcggaaagtttagcgtaattaactatgacctgaatcaggtgattacgactacagtcatgaagcacaccaaaatctttagcgcaaacgggcaagttatcgaagttcagtatgagatcttaaaagcaatagcctattggatgaccatccagtacgacaacgttggcaggatggttatctgtgatatccgcgtgggagtcgatgccaacattacaaggtacttctatgagtacgatgctgatggacagttgcaaacggtctccgtcaacgacaaaacccagtggaggtactcttacgacttgaatggcaatattaacttgctgagccatggaaagtccgcaagactgaccccactgcgctacgacttaagggatcgtatcactcgcctgggtgagatccagtataagatggacgaagacggctttctgcggcagagggggaacgacattttcgagtacaattccaacgggctgctgcagaaggcttataacaaagccagcgggtggacagtgcagtattattacgatggtctcggaaggcgcgtggcctccaaaagtagcttgggccagcaccttcagtttttctatgcggacctgacaaatcccatccgcgtgactcatctttacaatcacacaagcagcgaaattactagcctgtattacgatctccagggccatctcattgccatggagctgagctctggtgaggagtactacgtggcctgtgacaatacaggaaccccccttgctgtcttctcttctagggggcaggtcattaaggagatcctgtacacaccctatggtgatatctaccacgatacctacccagattttcaggtgattattgggtttcacggtggcctgtatgacttccttaccaagttagtgcacctcggacagcgagattatgacgtcgtcgccgggagatggacaactcctaaccatcacatatggaagcagttgaacctgttaccaaagcccttcaacctgtattcatttgagaataactaccctgtgggtaagatacaggatgtcgccaaatacaccaccgacatccgttcatggctcgagctctttggattccagctgcacaacgtgttgcccggattccccaaaccagagctggagaacctggagctgacctacgaactgctcaggctacagaccaaaactcaggagtgggatcccggcaaaactatacttgggattcagtgcgagcttcagaaacagctcagaaactttattagtctcgatcagctgccgatgaccccccgttacaatgacggcagatgcttggaagggggcaaacagcctaggttcgctgcggtgccatctgtcttcggaaaaggaattaagttcgccataaaagatggcatagtgacagcagacattattggtgtggccaatgaggattctagacgactcgctgccatccttaataacgctcattacctcgagaatttgcactttacgattgaagggagagacacccattatttcatcaagctgggcagcttggaggaggatctagtcttaattggaaatacgggggggaggcggatcttagaaaatggcgtgaatgttacagtctcacagatgacctctgttcttaatggtcgcaccaggagattcgccgacatccagctgcagcacggcgcactttgctttaacataagatatggaacaactgtggaggaagagaagaatcacgtactggaaatcgcacgtcaacgggccgtggctcaagcatggacgaaggagcagagaagattgcaggagggggaggaaggcattcgggcctggacagaaggagagaagcagcagctgctgtctaccggccgggtccagggatatgatggctacttcgtcctgtcagtggaacagtacctggaactgagcgactcggcgaacaacatacattttatgagacagtccgaaatcggaaggcgatag

SEQ ID NO: 178738 - RNA, 8178 nt, Artificial Sequence
  derived and/or modified sequence
auggagcagacagacuguaaaccauaccagccgcugccgaaagugaagcacgagauggaucuugcuuacacaaguagcagugacgagagugaggacggaagaaaacccagacagucuuauaauaguagggagacgcuccaugaguauaaccaagaacugcgaaugaacuauaacucacaaucuagaaagaggaaggagguggaaaagaguacccaggaaauggaguucugcgaaacuucccauacccuuugcuccggguaccagacagauaugcacuccgucucucgacaugguuaccagcuugagaugggcagugaugucgacacagagacagagggugcagccucaccugaccacgcccugagaauguggauaagaggaaugaagucagaacacucgucuugcuuguccucccgggccaacucagcacucagucuuaccgauacugaccaugagcguaaguccgauggcgaaaacggcuucaaauuuagcccuguguguugugacauggaagcucaggccggaucuacccaggauguucaguccucgccucacaaucaauucacauuucgcccucugccaccaccacccccuccaccucaugcuugcaccugcgcucggaagcccccccccgcggccgacagccugcagcgcagaagcaugaccacucguucccaaccuagcccagcagcucccgcaccuccaacuagcacucaggacaguguucaucuucauaacagcuggguccucaauaguaauauaccuuuggaaacucgccacuuucuguucaagcacggauccggcucaagugcgauuuucagcgcugcaucacagaacuauccacuuacuucuaacacuguguacagccccccaccacggccccugcccagguccacuuucagucgcccugcuuucacuuucaauaaaccuuauagaugcuguaacuggaaguguacugcucucucagccacagccauaaccgugacucuugcacuccuauuggcuuacguuauagcagugcaccucuuuggacugacuuggcagcuucagcccguugagggggaacucuaugcgaacggggugagcaaggggaaucgaggaacagaaaguauggauaccacuuacucaccaauagggggcaagguuagugacaagagugagaagaagguguuccaaaaaggccgcgccaucgacacuggcgaggucgacaucggagcacaggucaugcagacgaucccccccggucuauuuuggagguuucagaucaccauccaccacccuauuuaucucaaauucaacaucucuuuagcaaaggauucucuguuaggcaucuacggccgcagaaacauaccaccgacucacacccaguuugauuucgugaaauugauggacggcaagcagcugguuaaacaagauagcaagggcuccgacgacacucagcacagcccccggaaucugauacugaccagcuugcaagagaccggcuucauugaauacauggaccagggaccuugguaucuggcuuuuuauaacgacggcaaaaagauggaacagguuuuuguacuaacuaccgcaaucgagaucauggaugacuguucgacuaacugcaaugggaauggggagugcauaucuggacacugccauugcuucccugguuuccucggaccugauugcgccagggacuccuguccgguacuaugcgggggcaacggagaguacgaaaaaggucauugugugugccggcauggcuggaagggcccugaaugugaugugccagaagaacaauguaucgaucccacuuguuucggccacggcacgugcauuaugggugucugcauauguguuccuggauacaagggagagaucugcgaagaggaggacugccuugauccuaugugcucuaaucacgguaucugcguuaagggagaaugucauugcuccacuggcugggguggaguuaauugugagacaccacugcccguaugucaggagcagugcagugggcacggaacuuuucuccucgacgcugggguguguucuugugacccuaaauggacaggcagugauuguagcaccgaauuaugcacaauggagugcggcucccacgguguuugcucuaggggaaucugucagugugaagagggcugggucggccccaccugcgaggaacgcucaugucacucucauugcaccgagcacggccagugcaaggauggcaaaugcgaaugcucgcccgggugggagggugaucauugcaccauugcucacuauuuggaugccgugagagacggcugccccggacugugcuuugguaacggcagaugcacauuggaucaaaauggcuggcauugugucugccaggugggcuggagcggcacuggcugcaauguggugauggagaugcuguguggcgacaauuuggacaacgacggggaugguuugacagauuguguugauccugacugcugccaacaguccaauugcuauauuuccccuuugugccagggcagccccgacccccucgaccucauccagcagucucagacccuuuucagucagcacaccagccgccuuuuuuacgaucggaucaaguuucugauugggaaggacagcacucacgugaucccacccgaggucagcuucgacucgaggagagccugcgugauuagaggccaggucgucgcuauagacggcacaccgcucgugggcgucaaugugucuuucuugcaccacuccgauuacggcuuuacuauuuccagacaggaugggaguuuugauuuagucgcuauuggcgggaucagcgucauucucauauuugacagaucuccguuccuacccgaaaaacgaacccucuggcugccguggaaucaguuuauagucguagagaagguaaccaugcagcgagucguaucugacccacccaguugugacauaucuaacuucauuaguccaaauccgauugugcugcccuccccucuuacaucauucggcgggagcuguccugagaggggcacgaucgugccugaacuccagguagugcaagaagaaauucccauaccuuccaguuuugugagacucucuuaucucagcucccgcacuccaggcuauaagacucugcugcgcauacuccugacacacagcacgaucccaguugggaugaucaaaguccaucugaccgucgccgucgaaggacgucugacccagaagugguucccagcagcaaucaaccucguauacacuuuugcauggaacaagacagacauuuauggacagaaaguauggggacuugccgaagcgcuggugucggugggauacgaguacgaaacuuguccugauuucaucuuaugggagcagcgaaccgugguguugcaggguuucgaaauggacgcauccaaucuugguggguggucccucaacaaacaccacauccugaauccccagagcgguaucauucacaaggggaauggagagaauauguuuaucucccagcagccaccaguuauuaguacgauuauggguaacggacaucagcgauccguggcaugcacgaacugcaacgggccugcccacaauaauaaacuauuugccccugucgcacuugcaagcggcccggaugggucagucuaugugggcgacuuuaauuuugugcgccgcauauuucccagugggaauagcguaaguaucuuagagcuuucuacaucacccgcucacaaguauuaucucgcaauggacccagucucugagucucuuuaucugagcgacacaaauacgagaaagguguauaagcugaaaagccucguagaaacaaaggaucugucuaagaauuuugaggugguagcugguaccggugaucaaugucugcccuucgaucagucacacugcggagaugguggacgagcauccgaggcaagccugaauagcccuagggggaucacagucgauagacauggguuuauuuauuuugucgacggaaccaugauacgcaaaaucgacgaaaacgccgugauuacaacugugauaggcagcaacgggcuuaccuccacacaaccgcugucuugcgauucuggcauggacaucacgcagguacgucuagaauggccgacugacuuggccgugaauccuauggacaacuccuuguacgugcuagacaacaauauuguacugcagaucucugagaauaggcgcgugcggauaaucgcuggacgaccaauucacugccagguucccggaauagaucacuuucucguguccaagguagcaauacauuccacucuugaguccgcgcgcgccauuucugugagucacagugggcuuuuguucaucgcagagacagaugagaggaagguaaaccgaauccagcaagugaccacuaauggggagaucuacaucaucgcgggagcacccaccgacugcgacugcaaaaucgauccuaacugugacugcuuuucuggagacgguggcuacgcaaaggacgccaaaaugaaggcccccaguucucuagcugucagcccggacggcacuuuguauguggcagaucucggcaauguacguauuagaacuaucagcaggaaccaggcccauuugaaugacaugaauauuuaugagauagcgucaccugcugaccaggaacuguaccaguucacaguuaauggaacucaucuucauacccucaaccucaucaccagagacuacguuuauaauuucacuuauaacucugagggagaucugggagccaucacaaguucgaauggcaacuccguccauauaaggcgggacgccggcgggaugccucuguggcuaguagugccgggugggcaggucuacuggcugacaauuucuaguaacggcgugcucaaacgagugagcgcgcagggcuacaaucuugcccuuaugacuuacccaggaaacacagggcuccuggccacgaaauccaaugaaaauggauggacaaccguguacgaauacgacccugaaggacaccuaacuaaugccacauuuccuaccggugaagucucuagcuuccacuccgaucucgaaaaacugaccaaaguggaacuggauaccuccaaccgggagaauguucugaugagcacaaaucugacugcgacaucuaccauauacauacuuaagcaagagaacacacaauccacuuaccggguuaauccagauggaucuuugcgggugacauucgcuucaggcauggaaaucggguuauccucugaaccccacauacuggcuggcgcagugaaucccacucuuggcaaaugcaacauuagccuuccgggggagcacaacgcuaaccucauugaguggcgacagcgcaaagagcagaauaaggggaacguuuccgcauuugaacgaagacuucgggcacauaaccgcaaucuccugaguauagauuuugaucauauuaccaggaccggaaaaauauaugacgaucaucguaaauuuacgcugagaauccuguaugaucaaacuggccgacccauucuuuggucaccuguuucuagauacaaugaggucaauaucacguacagucccagcggccucguuaccuucauccagaggggaaccuggaacgagaaaauggaauaugaccaguccggcaaaauuaucucgcgcaccugggccgacgggaaaauuuggagcuauaccuaccuggagaagucugugaugcuccugcugcauagccagcgccgguacaucuucgaauacgaucagccagauugccuucucagugugaccaugccgaguaugguacgucacucacugcagacuaugcugagcgucggauauuaccgcaacauuuacacuccacccgauuccucuacuucauucauccaagauuacucucgggacgggcgucuccuucaaacacugcauuuagggacuggccguaggguacuguauaaguauaccaaacaggccagguugagcgaaguucuauacgacacgacucaagucacgcugaccuaugaagagagcucagggguaauaaagacgauccaucugaugcacgacggguuuauauguaccauccgguaccgucagaccgguccgcuuauagggcgccagauuuuccgauuuucggaagaagggcugguuaaugcgagauuugacuacagcuauaauaacuucagggugaccuccaugcaagcagugauuaaugaaacaccucuuccaaucgaucuauacagguaugucgaugugagcggcagaacggaacaguucggaaaauuuuccguaaucaacuaugauuugaaccaagugauuacgaccacagugaugaaacacacaaaaaucuuuagcgcuaacgggcaggucauugaggugcaguaugaaauuuuaaaggcgaucgccuacuggaugaccauacaauaugacaacguugggaggauggucaucugugauauaagagugggagucgacgccaacauuaccagguauuucuacgaguaugaugccgacggccaguuacagaccgugagcguaaacgacaagacccaguggagauacagcuacgauuugaaugggaacauaaaccuauugagccacggcaaaucagcuagacuaacuccuuuacgcuaugaccucagggacagaaucacacgacucggagagauccaauacaagauggacgaggaugguuucuuaagacagcgcggcaaugacaucuuugaauacaacaguaaugggcugcuacagaaagcauacaauaaagcuaguggguggacaguucaauauuauuaugacggucuaggucgaaggguagcuucuaagagcucucugggacagcaccuucaauucuuuuacgcagaccugaccaaucccauccggguuacacaccucuauaaucauacuuccagcgaaaucacgucccuguauuaugaccugcaggggcaucugauugcuauggagcucucuucuggagaagaauacuacgucgcuugcgacaauacuggaacuccacuggccguguucucuaguagaggccagguuauuaaggaaauucuuuacacccccuacggcgacaucuaucacgauacuuauccagauuuccaagugaucaucggauuccaugguggacucuacgauuuucugaccaaacuggugcaccuuggccagcgggacuaugacguaguggcugggcgcuggaccacaccuaaccaccauauuuggaaacagcugaaccuuuuaccuaagccuuucaaccuguacucauucgagaacaauuauccggugggcaagauacaagacguggcgaaauacacgacagauaucaggaguuggcuugagcucuuuggcuuucaauuacauaauguguugccaggcuuuccaaagccugaguuggagaauuuggaguuaacauacgagcugcuucgccugcagaccaaaacucaagaaugggaucccggcaaaaccauccucggcauccagugcgaacuccagaagcagcugcggaacuucaucagccuagaucagcuaccaaugacuccacgcuauaacgacggaagaugccuggaaggaggaaaacagccccgcuuugcggccgugccguccguguuuggcaagggcaucaaguuugccaucaaagauggaauuguaacugcggacauuauaggaguugccaacgaagacagucgaagguuggccgcaaucuugaauaaugcucacuaucucgagaaccugcacuucaccauugagggacgcgacacacacuauuuuaucaagcugggaucccuggaggaagaccuaguucugauuggcaauacggggggcaggcgcauccuggaaaacgggguuaaugugacugugucccagaugaccucagugcugaauggccggacuagacgauuugcugacauucagcugcagcacggcgcccuuugcuuuaacauaagauaugggacaaccgucgaggaggaaaagaaccacgugcuagaaaucgcccgucagagagcuguggcccaggccuggacaaaggagcagcgccgccugcaagagggggaagaaggaauacgcgcguggaccgagggcgagaagcaacagcuccucaguaccggaagggugcaaggcuaugacggauauuucgugcugagcguugagcaguaccuggagcugucugauuccgcuaauaacauccacuucaugcgccagucugagauugggaggagauag

SEQ ID NO: 178739 - RNA, 8178 nt, Artificial Sequence
  derived and/or modified sequence
auggagcagacagauugcaaaccauaucaaccccucccuaaagucaagcacgaaauggacuuagcuuacacaaguuccuccgacgagagugaggacggaaggaaaccucgccaguccuauaauagccgggaaacacuccacgaauacaaccaagaacuucggaugaacuauaauucccagucucgaaaaaggaaggaggucgagaaauccacccaagagauggaauucugcgaaacuagccacaccuuaugcucaggcuaucaaacagacaugcauuccguuagcagacacggauaucaacucgagauggggagcgauguagauacugagaccgagggcgcagcguccccugaucacgcucuuaggauguggauucgcggcaugaaaucugagcauuccuccugucuuuccagucgugcuaacagcgcccucucccuuacagacaccgaccaugagcggaagagugauggagaaaauggauucaaguucaguccaguaugcugugacauggaagcacaagcggguagcacucaagauguucaguccucgccccauaaccaguucacauucagaccacuuccccccccaccaccaccuccucacgcauguacaugugcccgcaaacccccucccgcagccgauagcuugcagcgccgcuccaugacgacacgaagccaaccaagccccgcagccccugcacccccaacauccacccaagacuccguacacuuacauaacaguuggguuuugaacaguaauaucccccucgaaaccaggcauuuucuuuucaaacauggcaguggaaguuccgcuaucuucucugcagccucccagaacuacccacucacaaguaacaccguuuauuccccuccaccccgaccauugcccaggagcacuuuuucccguccugcauuuacauucaacaaaccauaucggugcuguaauuggaagugcaccgccuugagcgcuacagcaaucacagucacccuggccuuguuauuagcauacgugauugccgugcaucuguucggcuugacauggcagcuacagcccguagaaggagaacuguaugccaauggcguuuccaaaggaaacagggguacagaaucaauggacacgaccuacucaccgaucggggguaaagugagugauaaaucagaaaaaaaaguauuccaaaagggccgcgccauagacacuggagaagucgauauuggugcccaagugaugcagacuauuccaccgggucucuucuggagguuccagaucaccauucaucauccaauauaucuuaaguucaauauaucucuggccaaagacagucugcucgggauuuacggcagaagaaacauucccccuacccacacucaauucgauuucguuaagcuuauggauggaaaacagcucgugaaacaggauagcaaagguucggacgacacacagcacagcccccguaaucuuauccucaccucccuccaggagacaggcuuuauugaauauauggaucaaggacccugguaccuggcuuuuuacaacgacggaaagaaaauggagcaaguguuugugcuaaccacagcaaucgagaucauggacgauuguuccaccaacugcaauggaaauggagaaugcaucagcggacauugucacugcuuccccggcuuccucggaccagacugugcucgggauaguugcccaguuuuauguggaggaaauggugaguacgagaagggacacugcguuugcaggcacggcuggaaaggaccagagugcgacgugccagaggagcaauguauugacccuacauguuuuggacauggcaccuguaucaugggagucuguaucugugugccgggcuauaaaggagaaauuugugaggaggaggauugcuuggacccgaugugcucuaaucacgggauuugcgugaagggagaaugucacuguaguacagguuggggcggagucaauugugagacaccccugcccgugugccaggagcagugcucagggcauggaaccuuccucuuagaugcuggggucuguucuugugaucccaaauggacagggagcgacugcaguaccgaacuguguacaauggaaugugggucgcacgguguauguucaagagguaucugccagugcgaggaaggguggguggggcccaccugcgaggagcgcuccugucauagucauugcacagaacacgggcaguguaaagacgguaaaugugaauguucaccaggaugggagggagaucacuguacaauugcacacuauuuagacgcugugcgcgacggcuguccuggacuauguuucgguaauggccgcuguacuuuagaucaaaaugguuggcacugugugugucagguaggaugguccgguacuggaugcaacguaguaauggagaugcugugcggggacaaccucgacaacgacggagacggcuuaacggacuguguggaccccgauugcugccaacagaguaauuguuauauaucaccccucugucagggaagcccggacccucucgauuuaauccagcaaagucagaccuuguucagccagcacaccagccgguuguucuaugauagaaucaaguuccuaauaggcaaagauuccacccacguuaucccaccggaaguuucuuucgauagcaggagggcuugcguaauuagaggacaagucguggcuauagaugggaccccccucgucggugugaacguauccuuccuccaccacagugacuacggcuuuaccaucucucgacaggacgguaguuuugaccuaguggccauuggcggaauuucugugauccucaucuucgaucgguccccauucuuaccagagaagagaaccuuguggcugcccuggaaucaguuuaucgugguugaaaaagugaccaugcagcggguugugucagaucccccuuccugcgauauuagcaacuuuaucucgcccaauccuauuguucugcccucuccacucaccagcuucgguggcuccugcccugagcgcgggacaaucguaccagaacuccaggugguccaagaagagauaccgaucccuuccucauuuguucgacuuagcuauuuaucuaguagaacuccuggguacaagaccuuguugagaauccuucuuacucauucuaccauuccuguggguaugauuaaggugcaccucaccguggcuguggagggacgccugacccaaaagugguuuccggccgccaucaauuuaguguauacguuugcuuggaauaaaacugauaucuacgggcaaaaagucugggggcucgcugaagcacuagugucaguagguuacgaauacgaaacuugcccugauuucauacugugggagcagaggacuguggugcugcaagguuuugaaauggaugcuuccaaccuggggggguggagucugaauaagcaccauauacugaacccccaaucuggcauaauucauaaaggcaacggcgagaacauguuuauuagccagcaaccuccaguuauuucaaccaucauggguaacggacaccagcguagcgucgccugcaccaacuguaacggaccagcccacaacaacaaauuauucgcuccggucgccuuggcuagcggaccugacggcagcgucuacgucggcgacuucaauuucguucggcggaucuuuccaucugguaacuccgugucuauccucgagcugucuacauccccugcacacaaguacuaccuugccauggacccgguguccgaaagucuauaccugucggauacgaauacccgaaaaguauacaaacuaaaaucauugguugaaacaaaagaccucucuaaaaauuuugaagugguggcugggacuggggaccagugucuaccuuuugaccagagccacugcggcgacgguggucgugccucagaagccaguuugaacucuccucgugguaucacuguggaucgccauggcuucauauauuuuguagacgggacuaugauaagaaagauugaugagaaugcaguuaucaccacuguuauuggcuccaaugguuuaaccucgacucagccuuuguccugugauagcggaauggauauuacgcaggugagauuagaauggccaacagaccucgccguaaacccaauggacaauagucuauauguucuggacaacaacauugugcugcagauaucugaaaaccgcagagugcgcauuaucgcuggaaggccaauccacugccaggucccagguauagaucacuuccucguguccaaagucgcaauacauuccacacucgagucugcuagagccauuagugugucccacucaggacuccucuuuauugcugaaacggaugagagaaaagugaaucggauucaacaaguuacuacuaauggugaaauuuauaucauugcuggggccccuacugauugugacuguaagaucgaccccaacugcgauugcuuuucuggagacgggggcuacgcaaaagaugcuaagaugaaagcucccaguaguuuggccguuucgccugauggcacacuguauguggcagacuuaggaaacgucaggauccggacaauuagcagaaaucaagcccaucugaacgauaugaacauuuaugaaaucgcaucucccgccgaucaggaauuguaucaguucaccgugaauggcacucaucugcacaccuugaaucucauuacaagagacuacguauauaauuuuacuuauaauagcgagggcgauuuaggagcaaucacaucaucaaauggcaauagugugcacauucgcagggaugcuggagguaugccccuauggcuggugguaccaggcggacagguguacugguugacaauuucauccaacgggguucuaaaacggguuucagcucagggauauaaccucgcccucaugaccuacccuggaaacacaggacugcuagcuacgaaauccaacgagaacggauggacuacuguauaugaauaugaccccgaagggcaccugacaaacgcaacuuuucccacgggugaggucucuuccuuccacucugaccuggaaaaacuuacgaaggucgaacuugauaccuccaaucgcgaaaauguacucaugagcacgaaccuuaccgccacuagcacaauauacauucugaagcaagaaaauacccagaguaccuauaggguuaaucccgacggcagccuuagaguuacauucgccucuggcauggaaauuggacuaagcagugaaccucacauacuggccggcgccgugaauccaacguugggaaaauguaacaucagccugccaggcgaacauaaugcgaaccucaucgaguggcgucaacgcaaagaacaaaauaaagggaacguuucugccuuugagcgucgguugagagcacauaauaggaaccuguugucuauugauuucgaucacauaacccgcaccgguaaaaucuacgaugaucaccgcaaauuuacacugagaaucuuauaugaccaaacagguagacccauacuguggagccccgucucuagauauaacgaagucaacauuaccuacagcccuuccggccucgucaccuuuauucagagggguaccuggaaugaaaagauggaauaugaucaaagcggaaaaaucaucucucggacaugggcagacggaaaaauuuggaguuacacauaccuggagaaaucugugaugcuucugcugcauucacagagaagguacauauuugaauacgaucagccagauugccuccugagcgugaccaugcccuccauggugcgccacaguuuacagacaaugcugagugucggcuacuaucgcaauaucuauacuccaccagauuccagcacgagcuucauccaggacuauucgagagauggaagacuccuccagacccugcaucuggguacuggucgccgcgugcuauacaaauauacuaaacaggccagauugucggaggugcuguacgauaccacccaaguaacccuaacuuaugaagaaucauccggcgucauaaagacgauccaccucaugcacgauggcuuuauuugcacaauuagauacaggcagaccggcccccugaucgggcgccaaauuuuuagauucucagaagagggccuugucaacgcuagauucgacuacuccuauaacaauuuccgaguaacuaguaugcaggcagugauuaaugagacaccucucccaauugauuuauaccgauauguggauguguccggccgcaccgagcaguuugggaaauucagcguuaucaacuaugaccuaaaccagguuaucacaaccacagugaugaaacauacaaagauauucucagcaaacggacagguaauugaaguccaauacgaaauuuugaaagcgauugccuacuggaugacuauccaauaugacaacguuggccgaauggucaucugugacaucagaguugguguugaugcaaacauaacucgcuauuuuuaugaauaugacgcugacggacagcuucagacagugagcgugaaugacaagacacaauggagauauagcuacgaccuaaacggcaacauuaaccuccucucacauggaaaguccgcccgacuuacgccccuucgcuacgaucuccgagaucgcaucacgaggcugggcgaaauucaauacaaaauggacgaagauggauuccucagacaacgcggaaaugacauauucgaguacaauucuaacgggcuccuucagaaggcguauaauaaggcauccggcuggaccguucaauacuacuaugacggauugggucgucgggucgcgagcaaaagcucacuaggacaacaucugcaauucuuuuaugcugaucuuaccaacccuauacgcgugacccaccucuacaaccacacuaguuccgagauuacaucauuauacuacgaucugcaaggucauuugaucgcuauggaguugagcagcggcgaagaguauuacguugcaugcgacaacacuggaacgccccuggcugucuuuucuucucgaggacaggugauuaaagagauccuguacacgccauacggggacauauaucacgacacuuauccugacuuccaggugauaaucggguuccacggaggacuuuacgacuuccuaacaaagcuggugcacuugggccaacgcgauuacgacguaguagcagggagauggacaaccccuaaccaccauaucuggaagcaacugaaucuuuuaccaaaaccuuuuaaucucuauagcuucgaaaauaacuaccccgucgguaagauucaagauguggcaaaguacacgacagacauucgcagcuggcucgagcuuuuuggauuucaacuccacaauguucugcccggguuucccaagccagaguuagagaaucucgagcuaacuuacgaacugcugcgguugcaaacuaaaacccaggaaugggauccuggcaaaacgauacuuggcauucagugcgaacuccagaaacagcuacgcaauuuuauaucccuagaccagcuacccaugaccccacguuacaacgacggacgcugucuggagggcggaaagcagccacgcuucgccgcagugccuucgguuuucgggaagggaauuaaauucgccauaaaagacgguauugugacugcugauaucauagguguggccaacgaagacagucgccgacuggccgcgauacucaacaaugcucacuaucuggaaaaccugcacuuuacgauugaggggagagauacacacuauuuuauuaaacuugggagccuggaggaggaccucgugcuaauaggcaauaccgguggcagaaggaucuuggagaauggggugaacgugacugugagccagaugacuagcgucuugaacggcaggacccggagauuugcggacauacagcugcagcacggagcgcugugcuuuaauauacguuacggaacuacaguggaggaagagaagaaucacguuuuggagaucgccagacagagagcuguggcucaagcuuggacuaaggaacagagacgacugcaagagggggaggaaggcauuagggcuuggaccgaaggggaaaagcaacaguugcugagcacuggaagaguucaggguuacgacgguuauuucguauuaucaguggaacaguaucuugaauuauccgacuccgccaacaauauucacuuuaugagacagucagaaaucgguaggcgcuag

SEQ ID NO: 178740 - protein, 443 aa, Artificial Sequence
  derived and/or modified sequence
MRLTRKRLCSFLIALYCLFSLYAAYHVFFGRRRQAPAGSPRGLRKGAAPARERRGREQSTLESEEWNPWEGDEKNEQQHRFKTSLQILDKSTKGKTDLSVQIWGKAAIGLYLWEHIFEGLLDPSDVTAQWREGKSIVGRTQYSFITGPAVIPGYFSVDVNNVVLILNGREKAKIFYATQWLLYAQNLVQIQKLQHLAVVLLGNEHCDNEWINPFLKRNGGFVELLFIIYDSPWINDVDVFQWPLGVATYRNFPVVEASWSMLHDERPYLCNFLGTIYENSSRQALMNILKKDGNDKLCWVSAREHWQPQETNESLKNYQDALLQSDLTLCPVGVNTECYRIYEACSYGSIPVVEDVMTAGNCGNTSVHHGAPLQLLKSMGAPFIFIKNWKELPAVLEKEKTIILQEKIERRKMLLQWYQHFKTELKMKFTNILESSFLMNNKS

SEQ ID NO: 178741 - DNA, 1332 bp, Artificial Sequence
  derived and/or modified sequence
atgagactgaccagaaagagactgtgcagcttcctgatcgccctgtactgcctgttcagcctgtacgccgcctaccacgtgttcttcggcagaagaagacaggcccccgccggcagccccagaggcctgagaaagggcgccgcccccgccagagagagaagaggcagagagcagagcaccctggagagcgaggagtggaacccctgggagggcgacgagaagaacgagcagcagcacagattcaagaccagcctgcagatcctggacaagagcaccaagggcaagaccgacctgagcgtgcagatctggggcaaggccgccatcggcctgtacctgtgggagcacatcttcgagggcctgctggaccccagcgacgtgaccgcccagtggagagagggcaagagcatcgtgggcagaacccagtacagcttcatcaccggccccgccgtgatccccggctacttcagcgtggacgtgaacaacgtggtgctgatcctgaacggcagagagaaggccaagatcttctacgccacccagtggctgctgtacgcccagaacctggtgcagatccagaagctgcagcacctggccgtggtgctgctgggcaacgagcactgcgacaacgagtggatcaaccccttcctgaagagaaacggcggcttcgtggagctgctgttcatcatctacgacagcccctggatcaacgacgtggacgtgttccagtggcccctgggcgtggccacctacagaaacttccccgtggtggaggccagctggagcatgctgcacgacgagagaccctacctgtgcaacttcctgggcaccatctacgagaacagcagcagacaggccctgatgaacatcctgaagaaggacggcaacgacaagctgtgctgggtgagcgccagagagcactggcagccccaggagaccaacgagagcctgaagaactaccaggacgccctgctgcagagcgacctgaccctgtgccccgtgggcgtgaacaccgagtgctacagaatctacgaggcctgcagctacggcagcatccccgtggtggaggacgtgatgaccgccggcaactgcggcaacaccagcgtgcaccacggcgcccccctgcagctgctgaagagcatgggcgcccccttcatcttcatcaagaactggaaggagctgcccgccgtgctggagaaggagaagaccatcatcctgcaggagaagatcgagagaagaaagatgctgctgcagtggtaccagcacttcaagaccgagctgaagatgaagttcaccaacatcctggagagcagcttcctgatgaacaacaagagctag

SEQ ID NO: 178742 - DNA, 1332 bp, Artificial Sequence
  derived and/or modified sequence
atgaggctcacacgcaaacgactgtgttcgttcctcattgctctgtattgcttgttctcactctatgccgcatatcatgtgttcttcgggcggcggcgccaggccccagccgggtcccccaggggcctgagaaagggtgcagcaccggcacgcgagagacgtgggagggagcagtccactctggaatctgaagaatggaatccgtgggagggcgatgaaaaaaatgagcagcaacaccggttcaaaaccagtctgcagatcctagacaaatctaccaaagggaaaacggacttatctgtacagatttggggaaaggccgccattggcttgtacctgtgggagcacatcttcgaaggactgctggatccctccgatgtgaccgcgcagtggagagaaggtaagtctattgtcggacggacccagtattcttttatcacagggccggccgtaattcctggttatttttccgtggacgtgaataatgtcgtgctgattctgaatggacgtgagaaggccaagatcttctatgctacccaatggctcttgtatgcccagaatctggtccagattcagaagctgcagcatctcgcggttgttttactcggtaatgagcactgcgataatgagtggatcaatcctttcctgaaacggaatggaggttttgtggaattactttttatcatatacgactccccctggatcaatgacgtggatgtgttccaatggcccctgggtgtggctacctaccgaaactttcccgttgtggaggccagttggagtatgttgcacgacgaaagaccctatttgtgtaacttcttggggaccatttacgagaatagttccaggcaagccctaatgaacatactgaagaaagatggcaatgataagctgtgctgggtgagtgcacgcgaacactggcagccccaggagactaacgagtccctgaagaactaccaggacgctctgctacagtcagacttgaccctttgccctgtcggcgttaatactgagtgttacagaatttatgaagcgtgctcctatggaagcattcccgtggttgaggacgtgatgactgccggtaactgtggcaacacctcagtgcaccatggcgccccgttacaactgctaaagtctatgggagccccatttatattcatcaaaaactggaaagagctgcccgctgtgctcgagaaagaaaaaaccataatactgcaagagaagattgaaagaaggaagatgctgctccagtggtatcagcattttaagacagaactcaagatgaaatttactaacatcctcgaaagctccttcttgatgaacaataagagttag

SEQ ID NO: 178743 - DNA, 1332 bp, Artificial Sequence
  derived and/or modified sequence
atgaggctgaccaggaagaggctgtgcagcttcctgattgccctgtactgcctcttcagcctgtatgctgcctaccacgtgttctttggaagaagacggcaggccccagctggcagcccccggggcctgaggaaaggagctgccccagcccgggagcggcggggccgggagcagagcaccctggagagcgaggagtggaacccctgggagggagatgagaagaatgagcagcagcaccgcttcaagaccagcctgcagatcctggacaagagcaccaagggcaagacagacctgtctgtgcagatctggggcaaggccgccatcggcctgtacctgtgggagcacatctttgagggcctgctggaccccagtgatgtgacagcccagtggagggagggcaagagcatcgtgggccgcacccagtacagcttcatcaccggccctgctgtgattcctggctacttctctgtggatgtgaacaacgtggtgctgatcctgaatggccgggagaaggccaagatcttctacgccacccagtggctgctgtatgcccagaacctggtgcagatccagaagctgcagcacctggccgtggtgctgctgggcaatgagcactgtgacaatgagtggatcaaccccttcctgaagagaaatggaggctttgtggagctgctcttcatcatctatgacagcccctggatcaatgatgtggatgtgttccagtggcccctgggcgtggccacctacagaaacttccctgtggtggaggcctcctggagcatgctgcatgatgagcggccctacctgtgcaacttcctgggcaccatctatgagaacagcagccggcaggccctgatgaacatcctgaagaaggatggaaatgacaagctgtgctgggtgtctgcccgggagcactggcagccccaggagaccaatgaaagcctgaagaactaccaggatgccctgctgcagagcgacctgaccctgtgccctgtgggcgtgaacacagagtgctaccgcatctatgaggcctgcagctatggcagcatccctgtggtggaggatgtgatgacagctggcaactgtggcaacacctctgtgcaccacggggcccccctgcagctgctgaagtccatgggcgcccccttcatcttcatcaagaactggaaggagctgcctgctgtgctggagaaggagaagaccatcatcctgcaggagaagattgaaagaaggaagatgctgctgcagtggtaccagcacttcaagacagagctgaagatgaagttcaccaacatcctggagagcagcttcctgatgaacaacaagagctag

SEQ ID NO: 178744 - DNA, 1332 bp, Artificial Sequence
  derived and/or modified sequence
atgcggctgacccggaagcggctgtgcagcttcctgatcgccctgtattgccttttttcgctctacgctgcctatcacgtctttttcgggcgccgtcgacaggcgccggcaggctcaccccgcggtctgcggaagggtgcagccccggcccgcgaacgcagaggaagggaacagtcgacgctggaatcggaggaatggaatccgtgggaaggggatgagaaaaatgagcagcagcatcgctttaaaacatcgctgcagatactggacaaatctacaaagggcaagactgacctgagcgtccagatctggggaaaagctgccataggcctgtatctgtgggagcatatcttcgaaggattgctggatccttccgatgtgactgcccagtggcgggagggaaagagcatcgtgggccgcacgcagtatagctttatcaccggcccggctgtgatcccggggtattttagcgtagacgtgaataatgtcgtgcttatcctcaacggccgagagaaagctaaaatattttatgctacacagtggctactgtacgcccaaaacttagttcaaatacaaaagctacagcaccttgccgtggtcttgctgggtaacgaacactgcgacaacgaatggataaacccctttttgaagcgcaacggcggattcgtggagctcctgttcatcatttacgacagtccctggataaatgacgtggatgtcttccagtggcctctgggcgtcgccacatatcgtaatttccccgtggtggaagcgagttggtcaatgctccatgacgaaaggccctatctctgtaatttcctgggaaccatttacgagaattcatctaggcaggccctgatgaatattttgaaaaaggacggtaacgataagctgtgctgggtttctgcaagagaacattggcaaccacaggaaactaacgagagcctgaaaaattaccaggatgctcttcttcagagcgacctgaccctgtgccctgtaggtgtgaacaccgagtgttaccgtatctatgaagcatgcagttacgggtctatccccgtggttgaggacgtcatgacagctgggaactgcggaaataccagtgtgcatcatggtgcgccgttacaactgctgaagtccatgggcgccccatttatcttcattaagaattggaaggagctgcctgccgtcctggaaaaggaaaaaaccataattctccaggaaaagatagaacgccgtaaaatgctgttacaatggtaccaacacttcaagacagaactgaagatgaaatttactaacattttagaatcaagcttcttgatgaataacaagtcttag

SEQ ID NO: 178745 - DNA, 1332 bp, Artificial Sequence
  derived and/or modified sequence
atgaggctgacccgcaaacgactttgcagttttctgatcgctctatactgccttttctccctttacgcggcttatcacgttttcttcggcaggagacggcaagctccggctggctctccgcgaggcctgcgaaagggcgctgcgcctgccagagagagacgaggaagagaacagagtacacttgagtcagaggagtggaatccctgggagggggatgagaagaatgaacagcagcacagatttaagactagcctacagatactcgataaaagcaccaaggggaaaaccgatcttagcgtgcaaatctggggcaaagccgcaattggactttacctgtgggaacatattttcgagggactactggaccccagcgatgtcacagcccaatggcgggaggggaaaagcatcgtgggaaggacacagtatagcttcattacgggcccagccgtgatccccggatacttcagcgttgacgtgaacaacgtggttctgattctgaacggacgggaaaaggccaagatcttctacgctacacagtggctgttgtacgcacagaatttagtgcagatccagaagttacagcacctagcagtggtgcttctgggaaacgaacattgtgacaacgagtggatcaacccgtttttaaaaaggaatggagggtttgtggaactgctgtttatcatctatgattccccatggataaacgacgtagacgtgtttcaatggcccttgggagtggcgacctacaggaatttcccagttgtggaagcctcatggagtatgcttcatgacgagcgcccatacctgtgtaactttctggggaccatctacgagaactccagccggcaggcactcatgaacatcttgaaaaaggatggaaatgataagttgtgttgggtatccgctcgggagcactggcagccccaagagaccaatgaatctttgaagaactatcaagacgcattgctacaaagtgatttgacgctgtgccccgttggggtgaatactgaatgttatcgtatatatgaggcttgttcctatggcagtattcctgtggtcgaagatgtcatgacagccggaaattgcgggaatacgtcggtccatcatggggctcccttacagctgctgaagtctatgggtgcgccattcatctttatcaagaattggaaggagctgccagccgtactggaaaaggaaaaaaccatcattctccaggagaagatcgaaaggcggaaaatgctcctgcaatggtatcaacatttcaagaccgaacttaagatgaaattcactaacattctcgaatcttcctttctcatgaataacaagtcctag

SEQ ID NO: 178746 - DNA, 1918 bp, Artificial Sequence
  derived and/or modified sequence
gcgtgtccggggcggggctgtaccgggcgctgggcggaggagccttggctggggactgcctggaaacgggctgggcctgcctcggacgccgccggtgtcgcggattctctttccgcccgctccatggcggtggatgcctgactggaagcccgagtgggatgcggctgacgcggaagcggctctgctcgtttcttatcgccctgtactgcctattctccctctacgctgcctaccacgtcttcttcgggcgccgccgccaggcgccggccgggtccccgcggggcctcaggaagggggcggcccccgcgcgggagagacgcggccgagaacagtccactttggaaagtgaagaatggaatccttgggaaggagatgaaaaaaatgagcaacaacacagatttaaaactagccttcaaatattagataaatccacgaaaggaaaaacagatctcagtgtacaaatctggggcaaagctgccattggcttgtatctctgggagcatatttttgaaggcttacttgatcccagcgatgtgactgctcaatggagagaaggaaagtcaatcgtaggaagaacacagtacagcttcatcactggtccagctgtaataccagggtacttctccgttgatgtgaataatgtggtactcattttaaatggaagagaaaaagcaaagatcttttatgccacccagtggttactttatgcacaaaatttagtgcaaattcaaaaactccagcatcttgctgttgttttgctcggaaatgaacattgtgataatgagtggataaacccattcctcaaaagaaatggaggcttcgtggagctgcttttcataatatatgacagcccctggattaatgacgtggatgtttttcagtggcctttaggagtagcaacatacaggaattttcctgtggtggaggcaagttggtcaatgctgcatgatgagaggccatatttatgtaatttcttaggaacgatttatgaaaattcatccagacaggcactaatgaacattttgaaaaaagatgggaacgataagctttgttgggtttcagcaagagaacactggcagcctcaggaaacaaatgaaagtcttaagaattaccaagatgccttgcttcagagtgatctcacattgtgcccggtcggagtaaacacagaatgctatcgaatctatgaggcttgctcctatggctccattcctgtggtggaagacgtgatgacagctggcaactgtgggaatacatctgtgcaccacggtgctcctctgcagttactcaagtccatgggtgctccctttatctttatcaagaactggaaggaactccctgctgttttagaaaaagagaaaactataattttacaagaaaaaattgaaagaagaaaaatgttacttcagtggtatcagcacttcaagacagagcttaaaatgaaatttactaatattttagaaagctcatttttaatgaataataaaagttaattatctttttgagctaacatgtgatttttaaaatcattttgactactgggtgtataaatgtgtttgtgtgtgtatgtatttatagatgttctttaaggtacccttgaaaactctacattatgtatgccacataatgacatttcagtcagtggtagactacatatatgatagtggtcccataagattataatggagctgaaaaatttctatcgcctagtgatgtcatagcctagtgatgacatatgtattgcaatacatcactcacgtgtttgtggtgatactggtgtaaacaaatctattgcactgccagtcaagtaaaagtacagcaattatgtcctgtacataatatttaataatgacaataaatgactatgttactggtttatgtatttactatactatactttttacaatttgtattagttctt

SEQ ID NO: 178747 - protein, 182 aa, Artificial Sequence
  derived and/or modified sequence
MKGWGWLALLLGALLGTAWARRSQDLHCGACRALVDELEWEIAQVDPKKTIQMGSFRINPDGSQSVVEVPYARSEAHLTELLEEICDRMKEYGEQIDPSTHRKNYVRVVGRNGESSELDLQGIRIDSDISGTLKFACESIVEEYEDELIEFFSREADNVKDKLCSKRTDLCDHALHISHDEL

SEQ ID NO: 178748 - protein, 168 aa, Artificial Sequence
  derived and/or modified sequence
MKGWGWLALLLGALLGTAWARRSQDLHCGACRALVDELEWEIAQVDPKKTIQMGSFRINPDGSQSVVEVPYARSEAHLTELLEEICDRMKEYGEQIDPSTHRKNYVRVVGRNGESSELDLQGIRIDSDISGTLKFACESIVEEYEDELIEFFSREADNVKDKLCSKRT

SEQ ID NO: 178749 - DNA, 549 bp, Artificial Sequence
  derived and/or modified sequence
atgaagggctggggctggctggccctgctgctgggcgccctgctgggcaccgcctgggccagaagaagccaggacctgcactgcggcgcctgcagagccctggtggacgagctggagtgggagatcgcccaggtggaccccaagaagaccatccagatgggcagcttcagaatcaaccccgacggcagccagagcgtggtggaggtgccctacgccagaagcgaggcccacctgaccgagctgctggaggagatctgcgacagaatgaaggagtacggcgagcagatcgaccccagcacccacagaaagaactacgtgagagtggtgggcagaaacggcgagagcagcgagctggacctgcagggcatcagaatcgacagcgacatcagcggcaccctgaagttcgcctgcgagagcatcgtggaggagtacgaggacgagctgatcgagttcttcagcagagaggccgacaacgtgaaggacaagctgtgcagcaagagaaccgacctgtgcgaccacgccctgcacatcagccacgacgagctgtag

SEQ ID NO: 178750 - DNA, 507 bp, Artificial Sequence
  derived and/or modified sequence
atgaagggctggggctggctggccctgctgctgggcgccctgctgggcaccgcctgggccagaagaagccaggacctgcactgcggcgcctgcagagccctggtggacgagctggagtgggagatcgcccaggtggaccccaagaagaccatccagatgggcagcttcagaatcaaccccgacggcagccagagcgtggtggaggtgccctacgccagaagcgaggcccacctgaccgagctgctggaggagatctgcgacagaatgaaggagtacggcgagcagatcgaccccagcacccacagaaagaactacgtgagagtggtgggcagaaacggcgagagcagcgagctggacctgcagggcatcagaatcgacagcgacatcagcggcaccctgaagttcgcctgcgagagcatcgtggaggagtacgaggacgagctgatcgagttcttcagcagagaggccgacaacgtgaaggacaagctgtgcagcaagagaacctag

SEQ ID NO: 178751 - DNA, 549 bp, Artificial Sequence
  derived and/or modified sequence
atgaagggctggggctggttggcattgctgttgggagcgttgctggggacggcgtgggcccgccgaagtcaggatctacactgcggagcatgcagagcgctggtcgacgaactcgaatgggagatcgctcaggtagatcccaaaaaaaccattcagatgggatctttcaggataaatcctgacggcagccagagcgtcgtggaggtgccctacgcacgcagtgaggcccatctcaccgaactactggaggagatttgcgatcgcatgaaggagtatggagagcagatagatccgtccacccaccggaaaaattacgtgagagtggtcggccgcaacggagagtctagcgaacttgatctgcagggtatcaggatcgactctgacatcagtggaactctgaagttcgcatgtgagtcgatcgtcgaggaatatgaagacgagttgatcgagttcttctccagagaagccgataatgtgaaggacaagttgtgcagtaagcgcaccgacctgtgcgatcacgctttgcacattagtcatgacgaactgtag

SEQ ID NO: 178752 - DNA, 507 bp, Artificial Sequence
  derived and/or modified sequence
atgaaagggtggggctggctggccctccttctcggggctctgctgggaactgcttgggctcggcgtagtcaggacctgcattgcggtgcttgtagagccctggtggatgagctggagtgggagatagcccaggtggacccaaagaagacaattcagatggggtcattccgcattaatcctgatggatcacagtcagtcgtggaggtcccttatgctagatctgaggcacacctgaccgagctgcttgaagaaatttgtgaccgaatgaaggagtacggggagcagatcgacccaagcactcatcgcaaaaattatgtgcgcgttgtgggaagaaatggtgagtccagtgagcttgatctccaagggatccgtatagactcggacatttccggtacccttaagttcgcatgcgaatccatcgtggaagagtatgaagatgagctcatcgaattcttctcaagggaggcagacaatgtgaaggataagctctgtagtaagagaacatag

SEQ ID NO: 178753 - DNA, 549 bp, Artificial Sequence
  derived and/or modified sequence
atgaagggctggggctggctggccctgctgctgggcgccctgctgggcacagcctgggcccggcgcagccaggacctgcactgtggggcctgccgggccctggtggatgagctggagtgggagatcgcccaggtggaccccaagaagaccatccagatgggcagcttccgcatcaacccagatggcagccagagcgtggtggaggtgccctatgcccggtctgaggcccacctgacagagctgctggaggagatctgtgacaggatgaaggagtatggagagcagattgaccccagcacccacaggaagaactacgtgcgggtggtgggcagaaatggagagagcagcgagctggacctgcagggcatcagaattgacagcgacatcagcggcaccctgaagtttgcctgtgagagcatcgtggaggagtatgaagatgagctgattgagttcttcagccgggaggccgacaacgtgaaggacaagctgtgcagcaagaggacagacctgtgtgaccacgccctgcacatcagccatgatgagctgtag

SEQ ID NO: 178754 - DNA, 507 bp, Artificial Sequence
  derived and/or modified sequence
atgaagggctggggctggctggccctgctgctgggcgccctgctgggcacagcctgggcccggcgcagccaggacctgcactgtggggcctgccgggccctggtggatgagctggagtgggagatcgcccaggtggaccccaagaagaccatccagatgggcagcttccgcatcaacccagatggcagccagagcgtggtggaggtgccctatgcccggtctgaggcccacctgacagagctgctggaggagatctgtgacaggatgaaggagtatggagagcagattgaccccagcacccacaggaagaactacgtgcgggtggtgggcagaaatggagagagcagcgagctggacctgcagggcatcagaattgacagcgacatcagcggcaccctgaagtttgcctgtgagagcatcgtggaggagtatgaagatgagctgattgagttcttcagccgggaggccgacaacgtgaaggacaagctgtgcagcaagaggacatag

SEQ ID NO: 178755 - DNA, 549 bp, Artificial Sequence
  derived and/or modified sequence
atgaagggctggggctggctggccctgctgctgggcgccctgctggggacagcatgggccagaagatctcaagacctacactgtggtgcctgtcgcgcactggtggatgagttggaatgggaaatagctcaagtggaccctaaaaagacaatccagatgggtagctttaggataaacccggacgggtcccagtcggtggtggaagtgccttatgcaaggtccgaggctcacctaacagagctactagaggagatttgcgacagaatgaaagagtatggggaacagattgatccgtccacacatcggaagaactacgtgcgcgtcgttggacggaacggcgagagtagcgagttagacctgcagggtatccgaattgatagcgatatctcagggactctgaaattcgcgtgtgaatcaatcgtggaagaatacgaggatgagctgatcgagttcttctcacgcgaggctgataacgtgaaagataaactgtgttccaaacggaccgacctctgcgaccacgctttacatatatctcacgacgaactgtag

SEQ ID NO: 178756 - DNA, 507 bp, Artificial Sequence
  derived and/or modified sequence
atgaagggctggggctggctggccctgctgctgggcgccctgctggggacagcatgggcccggaggagccaggacctacactgtggagcctgtcgggccctggtggacgagctcgagtgggagatcgcccaggtcgacccaaagaaaactatccagatggggtcttttcggatcaacccggatggaagccagtctgtggtggaggtgccttacgctcgctccgaagcccaccttaccgaactgctggaagaaatctgtgacagaatgaaagagtacggagagcaaatcgaccctagtacgcaccgaaaaaactacgtgagggtcgtgggcagaaacggggagagctcagaactcgatttgcaagggatcagaattgatagtgatatcagcggaacactcaagtttgcctgcgaatctatagtggaagagtatgaagacgaactcatcgaattcttcagcagggaagcagataatgttaaggataagctctgctctaaaagaacttag

SEQ ID NO: 178757 - DNA, 549 bp, Artificial Sequence
  derived and/or modified sequence
atgaagggttggggatggctggctcttttactcggagcgctcctgggcacagcctgggccaggcggtcacaagatctccattgtggagcgtgtcgggcactggtggatgagctagagtgggagattgcgcaggtggaccccaagaaaacaattcagatgggctcttttcggatcaatccagacggcagtcagtccgtggtcgaggttccctatgcccgatccgaagcccacttgaccgagctgctggaggagatctgcgatagaatgaaggagtacggcgagcagattgacccatcgacgcacaggaaaaactatgtgcgcgtggtgggtcggaatggggaaagttcagagctggacctccaggggattagaatcgattcagacatctcggggactcttaagtttgcatgcgagtctatagttgaagaatacgaggacgagctgatagaatttttttccagggaagcagataatgtgaaggataaactctgttctaaacggacagacctgtgcgatcatgctcttcacatttcacacgatgaattgtag

SEQ ID NO: 178758 - DNA, 507 bp, Artificial Sequence
  derived and/or modified sequence
atgaaagggtggggctggcttgcactgctccttggagctctcctcgggaccgcatgggctagaagatcccaggacctacattgcggagcttgcagggcattggtagacgagctagagtgggaaattgcacaggtagacccaaagaagaccatccagatgggttcattccgcatcaatccggacgggtcacaaagtgtggttgaggtgccatacgctcgcagtgaagcccacctgacggagttgctcgaagaaatctgtgatagaatgaaagagtacggcgaacagattgaccctagcacccatcgtaagaactacgtgagagtagtcggcagaaacggcgagtctagtgagctcgacttgcagggcattagaatagacagcgacatatctggaacactgaaatttgcgtgcgaatcaatagttgaagaatacgaggatgaactcatcgagtttttttctcgcgaggctgataacgtcaaagacaagctgtgctccaaacgaacatag

SEQ ID NO: 178759 - DNA, 1209 bp, Artificial Sequence
  derived and/or modified sequence
ctggactgctcgctggccggcagcgcaccgttttgaaggtcctagcccacctgggctggctcacgcgcacgactagccgctcccatacagcacgcccggactctgtcgtcgcttaaggccactcctattctacggctgacccctggtggtcacgtggatctgttcgccacgcaagtctgggtccttcggcgattgaccggggtccttgctgttcgggagcctctcctaagctgcctgttcgcgcgagagtttggaggggcgggtttggggtcggtgtctgattggggctcgcaccgcagcacgctggagtcccgcttaggtaccagttagcgtcaggggagctgggtcaggcggtcgccgggacaccccgtgtgtggcaggcggcgaagcgctctggagaatcccggacagccctgctccctgcagccaggtgtagtttcgggagccactggggccaaagtgagagtccagcggtcttccagcgcttgggccacggcggcggccctgggagcagaggtggagcgaccccattacgctaaagatgaaaggctggggttggctggccctgcttctgggggccctgctgggaaccgcctgggctcggaggagccaggatctccactgtggagcatgcagggctctggtggatgaactagaatgggaaattgcccaggtggaccccaagaagaccattcagatgggatctttccggatcaatccagatggcagccagtcagtggtggaggtgccttatgcccgctcagaggcccacctcacagagctgctggaggagatatgtgaccggatgaaggagtatggggaacagattgatccttccacccatcgcaagaactacgtacgtgtagtgggccggaatggagaatccagtgaactggacctacaaggcatccgaatcgactcagatattagcggcaccctcaagtttgcgtgtgagagcattgtggaggaatacgaggatgaactcattgaattcttttcccgagaggctgacaatgttaaagacaaactttgcagtaagcgaacagatctttgtgaccatgccctgcacatatcgcatgatgagctatgaaccactggagcagcccacactggcttgatggatcacccccaggaggggaaaatggtggcaatgccttttatatattatgtttttactgaaattaactgaaaaaatatgaaaccaaaagt

SEQ ID NO: 178760 - DNA, 674 bp, Artificial Sequence
  derived and/or modified sequence
gctcgcaccgcagcacgctggagtcccgcttaggtaccagttagcgtcaggggagctgggtcaggcggtcgccgggacaccccgtgtgtggcaggcggcgaagcgctctggagaatcccggacagccctgctccctgcagccaggtggagcgaccccattacgctaaagatgaaaggctggggttggctggccctgcttctgggggccctgctgggaaccgcctgggctcggaggagccaggatctccactgtggagcatgcagggctctggtggatgaactagaatgggaaattgcccaggtggaccccaagaagaccattcagatgggatctttccggatcaatccagatggcagccagtcagtggtggaggtgccttatgcccgctcagaggcccacctcacagagctgctggaggagatatgtgaccggatgaaggagtatggggaacagattgatccttccacccatcgcaagaactacgtacgtgtagtgggccggaatggagaatccagtgaactggacctacaaggcatccgaatcgactcagatattagcggcaccctcaagtttgcgtgtgagagcattgtggaggaatacgaggatgaactcattgaattcttttcccgagaggctgacaatgttaaagacaaactttgcagtaagcgaacag

SEQ ID NO: 178761 - protein, 399 aa, Artificial Sequence
  derived and/or modified sequence
MSDSKEPRVQQLGLLEEDPTTSGIRLFPRDFQFQQIHGHKSSTGCLGHGALVLQLLSFMLLAGVLVAILVQVSKVPSSLSQEQSEQDAIYQNLTQLKAAVGELSEKSKLQEIYQELTQLKAAVGELPEKSKLQEIYQELTRLKAAVGELPEKSKLQEIYQELTRLKAAVGELPEKSKLQEIYQELTRLKAAVGELPEKSKLQEIYQELTELKAAVGELPEKSKLQEIYQELTQLKAAVGELPDQSKQQQIYQELTDLKTAFERLCRHCPKDWTFFQGNCYFMSNSQRNWHDSVTACQEVRAQLVVIKTAEEQNFLQLQTSRSNRFSWMGLSDLNQEGTWQWVDGSPLSPSFQRYWNSGEPNNSGNEDCAEFSGSGWNDNRCDVDNYWICKKPAACFRDE

SEQ ID NO: 178762 - protein, 387 aa, Artificial Sequence
  derived and/or modified sequence
MSDSKEPRVQQLGLLEEDPTTNFQFQQIHGHKSSTGCLGHGALVLQLLSFMLLAGVLPRLSKVPSSLSQEQSEQDAIYQNLTQLKAAVGELSEKSKLQEIYQELTQLKAAVGELPEKSKLQEIYQELTRLKAAVGELPEKSKLQEIYQELTRLKAAVGELPEKSKLQEIYQELTRLKAAVGELPEKSKLQEIYQELTELKAAVGELPEKSKLQEIYQELTQLKAAVGELPDQSKQQQIYQELTDLKTAFERLCRHCPKDWTFFQGNCYFMSNSQRNWHDSVTACQEVRAQLVVIKTAEEQNFLQLQTSRSNRFSWMGLSDLNQEGTWQWVDGSPLSPSFQRYWNSGEPNNSGNEDCAEFSGSGWNDNRCDVDNYWICKKPAACFRDE

SEQ ID NO: 178763 - DNA, 1200 bp, Artificial Sequence
  derived and/or modified sequence
atgagtgacagtaaagaaccacgcgtccagcagttaggcttgctggaagaggatccaactacatcaggcattcgcctgtttccgcgggactttcagttccagcagattcacgggcacaaatcttcaacgggctgcctggggcatggcgcattggtgctgcagctgctctccttcatgcttctcgctggcgttttagtggccatcctggtccaggtctctaaggtaccgagcagcctgtcccaagaacagtccgaacaggatgccatctatcagaatctgacgcaactgaaagccgctgtgggggaactctccgagaagagtaagttgcaagaaatctatcaggagctgacccagctgaaggctgctgtgggcgagctgccagaaaagtctaaactgcaggaaatctaccaggaactgactcggctcaaagctgccgtcggagagctccccgagaagagcaaactgcaggagatctaccaagagttgaccagactgaaagccgccgtaggcgagctgcctgaaaaatcgaagctgcaggaaatataccaggagctcacaagactgaaggccgccgtgggggaactgcccgaaaagagcaagttacaggagatctatcaggaacttacagagttgaaggcagctgtgggagaactgcccgaaaagtcaaagttgcaggaaatttatcaggagttaacccagctgaaagccgcagtgggcgagttaccggaccagtccaagcagcagcaaatctaccaggagctgaccgacctgaaaacggcttttgaacggctttgccgacattgtccaaaggactggacattctttcaaggaaattgttactttatgagtaacagccagaggaactggcacgattctgtgactgcatgtcaggaggtccgggctcagctggtcgtaatcaagaccgccgaagaacaaaatttccttcagctccagaccagtcgatccaatcgtttctcatggatgggcctttccgacctcaaccaggagggcacgtggcagtgggtggatgggagtcccctgagcccctctttccagcggtattggaattccggcgagcccaataatagtgggaatgaggactgtgctgagtttagcgggagcgggtggaatgacaacagatgtgacgtggacaactactggatctgtaagaaacctgctgcctgctttcgggatgagtag

SEQ ID NO: 178764 - DNA, 1164 bp, Artificial Sequence
  derived and/or modified sequence
atgtcggattcaaaagagcctagagtgcaacagctcggactcctggaggaagacccgacaaccaactttcagttccagcagatccatggacacaagagctcgactggatgcctggggcacggcgctctggtattgcagctcctgtccttcatgctgctcgctggcgtcctgccgcggttaagtaaggtaccgtcctcgctttcacaggaacagtccgaacaggacgccatatatcagaatctcacccagttgaaggctgctgttggagaacttagtgagaagagcaagctgcaggagatctatcaagagctgacccaattaaaggctgctgtaggcgagctgccagaaaagagcaaactgcaagaaatatatcaagagttaacccggttgaaagctgccgtgggggaacttccggagaagagtaagcttcaggaaatctaccaagagctgaccaggctcaaggcagccgttggtgaattgcctgagaaatcaaagctccaggaaatttaccaggagctcacacgcttaaaggccgcggtaggcgaactccctgagaaaagtaagctccaagagatttatcaggagctgacggaactgaaagccgctgtcggggaactccccgagaagagcaagctgcaagagatctaccaggaactcacccagttaaaggccgccgtgggcgagctgcctgaccagagcaaacagcagcagatctaccaagaactgaccgatcttaagacggccttcgaaagactgtgccgccattgtcctaaggattggacattctttcagggcaactgttactttatgagtaactcacagaggaactggcatgattccgtgacagcatgccaagaggtgcgtgcccaactcgtggttatcaagacagcagaagaacagaactttctgcagcttcagacaagtagaagcaaccgtttttcatggatggggcttagtgatctgaaccaggagggtacatggcagtgggtcgatggatctcccttgagtccctcattccaaaggtattggaactcaggggaaccaaataatagcggaaatgaggattgtgctgagttctccggcagcggatggaacgacaatcggtgcgatgttgataactattggatttgcaagaaacccgccgcctgctttcgggatgagtag

SEQ ID NO: 178765 - DNA, 1200 bp, Artificial Sequence
  derived and/or modified sequence
atgtctgacagcaaggagccccgggtgcagcagctgggcctgctggaggaggaccccaccaccagcggcatccgcctcttcccccgggacttccagttccagcagatccacggccacaagagcagcacaggctgcctgggccacggggccctggtgctgcagctgctgtccttcatgctgctggccggcgtgctggtggccatcctggtgcaggtgtccaaggtgcccagcagcctgagccaggagcagagcgagcaggatgccatctaccagaacctgacccagctgaaggctgctgtgggggagctgtctgagaagagcaagctgcaggagatctaccaggagctgacccagctgaaggctgctgtgggggagctgcctgagaagagcaagctgcaggagatctaccaggagctgacccggctgaaggctgctgtgggggagctgcctgagaagagcaagctgcaggagatctaccaggagctgacccggctgaaggctgctgtgggggagctgcctgagaagagcaagctgcaggagatctaccaggagctgacccggctgaaggctgctgtgggggagctgcctgagaagagcaagctgcaggagatctaccaggagctgacagagctgaaggctgctgtgggggagctgcctgagaagagcaagctgcaggagatctaccaggagctgacccagctgaaggctgctgtgggggagctgcctgaccagagcaagcagcagcagatctaccaggagctgacagacctgaagacagcctttgagcggctgtgccgccactgccccaaggactggaccttcttccagggcaactgctacttcatgagcaacagccagaggaactggcatgacagcgtgacagcctgccaggaggtgcgggcccagctggtggtgatcaagacagctgaggagcagaacttcctgcagctgcagaccagccgcagcaaccgcttctcctggatgggcctgagtgacctgaaccaggagggcacctggcagtgggtggatggcagccccctgagccccagcttccagcgctactggaacagcggggagcccaacaacagcggaaatgaagactgtgccgagttcagcggcagcggctggaatgacaacagatgtgatgtggacaactactggatctgcaagaagccagctgcctgcttcagagatgaatag

SEQ ID NO: 178766 - DNA, 1164 bp, Artificial Sequence
  derived and/or modified sequence
atgtctgacagcaaggagccccgggtgcagcagctgggcctgctggaggaggaccccaccaccaacttccagttccagcagatccacggccacaagagcagcacaggctgcctgggccacggggccctggtgctgcagctgctgtccttcatgctgctggccggcgtgctgccccggctgagcaaggtgcccagcagcctgagccaggagcagagcgagcaggatgccatctaccagaacctgacccagctgaaggctgctgtgggggagctgtctgagaagagcaagctgcaggagatctaccaggagctgacccagctgaaggctgctgtgggggagctgcctgagaagagcaagctgcaggagatctaccaggagctgacccggctgaaggctgctgtgggggagctgcctgagaagagcaagctgcaggagatctaccaggagctgacccggctgaaggctgctgtgggggagctgcctgagaagagcaagctgcaggagatctaccaggagctgacccggctgaaggctgctgtgggggagctgcctgagaagagcaagctgcaggagatctaccaggagctgacagagctgaaggctgctgtgggggagctgcctgagaagagcaagctgcaggagatctaccaggagctgacccagctgaaggctgctgtgggggagctgcctgaccagagcaagcagcagcagatctaccaggagctgacagacctgaagacagcctttgagcggctgtgccgccactgccccaaggactggaccttcttccagggcaactgctacttcatgagcaacagccagaggaactggcatgacagcgtgacagcctgccaggaggtgcgggcccagctggtggtgatcaagacagctgaggagcagaacttcctgcagctgcagaccagccgcagcaaccgcttctcctggatgggcctgagtgacctgaaccaggagggcacctggcagtgggtggatggcagccccctgagccccagcttccagcgctactggaacagcggggagcccaacaacagcggaaatgaagactgtgccgagttcagcggcagcggctggaatgacaacagatgtgatgtggacaactactggatctgcaagaagccagctgcctgcttcagagatgaatag

SEQ ID NO: 178767 - DNA, 1200 bp, Artificial Sequence
  derived and/or modified sequence
atgagcgacagcaaggagccccgggtgcagcagctgggcctgctggaagaagatcctactacgtcagggattaggctatttccccgcgattttcagtttcaacagattcatggtcacaaaagcagtactggctgtctaggccatggagccctggtactgcaactactgtcgttcatgttgctagctggagtcctggtcgcaatactggtgcaggttagcaaggtgccatcctccctttctcaggagcaatctgaacaggacgctatctatcagaacttaactcaactgaaggcagctgtgggggaattgagtgaaaaaagtaaactgcaggagatttaccaggaactgacgcaacttaaggccgccgtcggagagctgcctgaaaagtcaaaactgcaggaaatctaccaggagttgacgaggcttaaagcagccgtgggcgaattgccagaaaagtcaaagctacaggagatctaccaggaactgacgaggctcaaggcagccgtcggggagctccctgaaaagtcaaaactacaggaaatataccaggagctgacccgcctcaaggctgcggtcggagaacttcccgagaaaagcaagctccaggaaatttatcaagagcttacagagctcaaggccgcggttggggagctgccggaaaagtctaagctccaagagatttatcaggaactgacgcagttgaaggctgccgtcggagaactgcctgatcagagcaaacagcagcagatctatcaagagcttaccgatctgaagacagcatttgaaagactgtgccggcattgtcccaaggattggacctttttccaggggaactgctatttcatgtcaaactcgcaacgcaattggcatgactccgtaaccgcttgtcaagaggtgagggcccagctagttgtgattaaaaccgctgaggagcaaaatttccttcaactgcaaacctctcgatccaaccggtttagttggatgggactgagtgacctcaaccaggagggtacatggcagtgggtggacggctctcccctgtccccatctttccagcggtactggaatagcggcgaacctaataattccggaaacgaagattgcgctgagttctcaggctcggggtggaatgacaacagatgcgatgtggataattattggatctgcaagaagccagccgcttgtttccgagatgagtag

SEQ ID NO: 178768 - DNA, 1164 bp, Artificial Sequence
  derived and/or modified sequence
atgagcgacagcaaggagccccgggtgcagcagctgggcctgctggaggaggaccctacaacaaattttcagttccagcaaatccacggtcacaagtctagcactgggtgccttggtcacggcgcacttgtgctccagctgctgagcttcatgctcctcgctggcgtacttcctcgcctgagtaaggtcccatcatccttaagccaggaacaatcagagcaggatgctatttatcagaatcttacacaactaaaagccgccgttggcgagctaagcgaaaaatcaaaactgcaggaaatctaccaggagctcactcagctcaaagcggccgtgggagagctccctgagaagtccaaactgcaagagatataccaagaactaaccagactcaaggccgccgtgggggagctgcccgagaagagcaagctgcaggagatctatcaggagctgacaagactaaaggcggcagtgggcgaacttcccgaaaagtcaaagctgcaagagatctaccaggaactaacaagactcaaagccgccgtgggagaactgcccgaaaaatcaaagctgcaggaaatttatcaagagctgactgagctgaaggctgctgttggggagctgcccgaaaaatccaaactgcaagaaatttatcaggagttgacccaactgaaagcagccgtgggggagttacccgaccagagcaagcaacagcagatctaccaggaactcaccgacttgaaaacagccttcgagcgtctttgccggcactgtcccaaggactggacattctttcagggcaactgttacttcatgagcaattcccagagaaactggcacgactcggtgaccgcctgccaagaggtgcgcgcgcaactcgtggtgattaagaccgccgaggagcagaacttcttgcagttgcagacttcccggtcaaacagattctcatggatggggttgtcagacttaaaccaggaaggcacatggcagtgggtagacggaagccccctgtccccctcgtttcagcggtattggaattccggggagcccaacaatagcggaaatgaggactgcgccgaattctccgggtctggatggaatgacaaccgctgtgatgtagacaattattggatctgtaagaaacccgccgcatgcttcagggatgaatag

SEQ ID NO: 178769 - DNA, 1200 bp, Artificial Sequence
  derived and/or modified sequence
atgtctgactcgaaagagcccagagtacagcaattaggccttttagaggaggatcctacaacctctgggattagattgttccccagagacttccagtttcagcaaatccacggccataagtcaagtacgggatgcctcggccatggagccctcgtgctccagctgctcagttttatgctgttagcaggtgtgctagtggcgatattagtacaggtttccaaggtgccctcctcccttagccaggaacagtctgagcaggatgccatctaccagaacctcacccagttaaaagcagcagtgggcgagttgtcagagaaatctaaattgcaagaaatctatcaggagctgacacagcttaaggccgctgtaggagagctgccggagaaaagtaaattgcaagaaatatatcaggagctgactaggttaaaggctgccgtgggagagttgcctgagaaatccaagctacaggagatctatcaagaattgacacgactgaaggccgctgttggagagcttcctgaaaagtcgaaactgcaggagatctatcaagaattaacgcgtctgaaggctgcggtcggtgagctgccagagaaatccaagctgcaggagatataccaggagcttaccgagctgaaggcggcagtgggcgaactaccagagaagtctaaattgcaggagatttatcaggaactgacccagctgaaggctgctgttggggaactaccagaccaatcgaagcagcagcaaatctaccaggagctcactgatctaaagaccgctttcgagcggttgtgccggcactgccctaaggattggacatttttccagggtaactgttactttatgtctaatagccaaaggaactggcacgactccgttacagcatgtcaagaggtccgggcacaattggtcgtcatcaaaaccgctgaggaacaaaatttccttcaattacagacatcccggtctaatcggttttcgtggatgggtctgagtgacttgaatcaggagggcacctggcaatgggtcgacggttcgccactttctcccagcttccagagatattggaacagtggggagcccaacaactccggcaacgaggattgtgctgagttcagcgggtctgggtggaacgataacaggtgcgatgtggacaactactggatttgcaaaaaaccggctgcatgctttcgtgatgaatag

SEQ ID NO: 178770 - DNA, 1164 bp, Artificial Sequence
  derived and/or modified sequence
atgtccgacagcaaggaacctcgggttcagcagctggggctgctggaggaggatcctactaccaatttccagtttcagcagatccatggtcacaagtcttctaccggatgcttaggccacggagccttagtcctacagctcttgtcatttatgctcctcgccggagtcctcccacggctctcgaaagtccccagcagcctctcccaagaacagagcgagcaagacgctatctaccagaatctgacccagctgaaagccgctgttggggaattgtcagagaagtctaagctccaagagatataccaagagctcactcagctcaaggcagctgtcggcgaacttccagaaaaatccaagctccaggagatctaccaggaactgacaagactgaaggccgcagtcggggagctgccagaaaaatcaaagctgcaggaaatttatcaggagttaacacgtttgaaggcagccgtcggcgagctgcctgaaaaaagtaagttgcaggagatttaccaggagttgacccgacttaaggcagctgtgggagagctgccagagaagagtaaattacaggagatctaccaggaattgacagaactgaaagctgcggtgggtgagctcccagaaaaaagtaagcttcaggagatctatcaagaactcacccagttgaaggctgccgtgggagagctccccgaccaatcaaagcagcagcaaatataccaggaacttaccgacctgaagaccgcgtttgaaagactgtgcaggcactgtcctaaggactggaccttctttcaaggcaattgctactttatgagtaattcccaacgcaattggcacgacagtgtgaccgcatgtcaggaggtaagggcgcaattggtggtcatcaagactgccgaggagcagaactttctgcagcttcagacttcacggtcaaaccggtttagttggatgggacttagtgacttgaaccaggaaggtacgtggcagtgggtggatgggagtcctctgagccctagcttccagagatattggaacagcggagagcccaataactccggcaatgaggactgtgctgagttttctggctcgggatggaacgacaatcggtgtgatgtggacaactactggatctgcaagaagcccgcagcttgctttcgagatgaatag

SEQ ID NO: 178771 - DNA, 1934 bp, Artificial Sequence
  derived and/or modified sequence
acccagcttcctgtttgtcttcctgagagacagtagatttagaaagtgaggatcagagggtggaaaataaaagctgtggtccccaggagtcctgaacatctggggacagcgggaaaacatgagtgactccaaggaaccaagggtgcagcagctgggcctcctggaagaagatccaacaaccagtggcatcagactttttccaagagactttcaattccagcagatacatggccacaagagctctacagggtgtcttggccatggcgccctggtgctgcaactcctctccttcatgctcttggctggggtcctggtggccatccttgtccaagtgtccaaggtccccagctccctaagtcaggaacaatccgagcaagacgcaatctaccagaacctgacccagcttaaagctgcagtgggtgagctctcagagaaatccaagctgcaggagatctaccaggagctgacccagctgaaggctgcagtgggtgagttgccagagaaatccaagctgcaggagatctaccaggagctgacccggctgaaggctgcagtgggtgagttgccagagaaatccaagctgcaggagatctaccaggagctgacccggctgaaggctgcagtgggtgagttgccagagaaatccaagctgcaggagatctaccaggagctgacccggctgaaggctgcagtgggtgagttgccagagaaatccaagctgcaggagatctaccaggagctgacggagctgaaggctgcagtgggtgagttgccagagaaatccaagctgcaggagatctaccaggagctgacccagctgaaggctgcagtgggtgagttgccagaccagtccaagcagcagcaaatctatcaagaactgaccgatttgaagactgcatttgaacgcctgtgccgccactgtcccaaggactggacattcttccaaggaaactgttacttcatgtctaactcccagcggaactggcacgactccgtcaccgcctgccaggaagtgagggcccagctcgtcgtaatcaaaactgctgaggagcagaacttcctacagctgcagacttccaggagtaaccgcttctcctggatgggactttcagacctaaatcaggaaggcacgtggcaatgggtggacggctcacctctgtcacccagcttccagcggtactggaacagtggagaacccaacaatagcgggaatgaagactgtgcggaatttagtggcagtggctggaacgacaatcgatgtgacgttgacaattactggatctgcaaaaagcccgcagcctgcttcagagacgaatagttgtttccctgctagcctcagcctccattgtggtatagcagaacttcacccacttgtaagccagcgcttcttctctccatccttggaccttcacaaatgccctgagacggttctctgttcgatttttcatcccctatgaacctgggtcttattctgtccttctgatgcctccaagtttccctggtgtagagcttgtgttcttggcccatccttggagctttataagtgacctgagtgggatgcatttagggggcgggcttggtatgttgtatgaatccactctctgttccttttggagattagactatttggattcatgtgtagctgccctgtcccctggggctttatctcatccatgcaaactaccatctgctcaacttccagctacaccccgtgcacccttttgactggggacttgctggttgaaggagctcatcttgcaggctggaagcaccagggaattaattcccccagtcaaccaatggcatccagagagggcatggaggctccatacaacctcttccacccccacatctttctttgtcctatacatgtcttccatttggctgtttctgagttgtagcctttataataaagtggtaaatgttgtaactgc

SEQ ID NO: 178772 - DNA, 1898 bp, Artificial Sequence
  derived and/or modified sequence
acccagcttcctgtttgtcttcctgagagacagtagatttagaaagtgaggatcagagggtggaaaataaaagctgtggtccccaggagtcctgaacatctggggacagcgggaaaacatgagtgactccaaggaaccaagggtgcagcagctgggcctcctggaagaagatccaacaaccaactttcaattccagcagatacatggccacaagagctctacagggtgtcttggccatggcgccctggtgctgcaactcctctccttcatgctcttggctggggtcctgccaagattgtccaaggtccccagctccctaagtcaggaacaatccgagcaagacgcaatctaccagaacctgacccagcttaaagctgcagtgggtgagctctcagagaaatccaagctgcaggagatctaccaggagctgacccagctgaaggctgcagtgggtgagttgccagagaaatccaagctgcaggagatctaccaggagctgacccggctgaaggctgcagtgggtgagttgccagagaaatccaagctgcaggagatctaccaggagctgacccggctgaaggctgcagtgggtgagttgccagagaaatccaagctgcaggagatctaccaggagctgacccggctgaaggctgcagtgggtgagttgccagagaaatccaagctgcaggagatctaccaggagctgacggagctgaaggctgcagtgggtgagttgccagagaaatccaagctgcaggagatctaccaggagctgacccagctgaaggctgcagtgggtgagttgccagaccagtccaagcagcagcaaatctatcaagaactgaccgatttgaagactgcatttgaacgcctgtgccgccactgtcccaaggactggacattcttccaaggaaactgttacttcatgtctaactcccagcggaactggcacgactccgtcaccgcctgccaggaagtgagggcccagctcgtcgtaatcaaaactgctgaggagcagaacttcctacagctgcagacttccaggagtaaccgcttctcctggatgggactttcagacctaaatcaggaaggcacgtggcaatgggtggacggctcacctctgtcacccagcttccagcggtactggaacagtggagaacccaacaatagcgggaatgaagactgtgcggaatttagtggcagtggctggaacgacaatcgatgtgacgttgacaattactggatctgcaaaaagcccgcagcctgcttcagagacgaatagttgtttccctgctagcctcagcctccattgtggtatagcagaacttcacccacttgtaagccagcgcttcttctctccatccttggaccttcacaaatgccctgagacggttctctgttcgatttttcatcccctatgaacctgggtcttattctgtccttctgatgcctccaagtttccctggtgtagagcttgtgttcttggcccatccttggagctttataagtgacctgagtgggatgcatttagggggcgggcttggtatgttgtatgaatccactctctgttccttttggagattagactatttggattcatgtgtagctgccctgtcccctggggctttatctcatccatgcaaactaccatctgctcaacttccagctacaccccgtgcacccttttgactggggacttgctggttgaaggagctcatcttgcaggctggaagcaccagggaattaattcccccagtcaaccaatggcatccagagagggcatggaggctccatacaacctcttccacccccacatctttctttgtcctatacatgtcttccatttggctgtttctgagttgtagcctttataataaagtggtaaatgttgtaactgc

SEQ ID NO: 178773 - DNA, 1200 bp, Artificial Sequence
  derived and/or modified sequence
atgagcgacagcaaggagcccagagtgcagcagctgggcctgctggaggaggaccccaccaccagcggcatcagactgttccccagagacttccagttccagcagatccacggccacaagagcagcaccggctgcctgggccacggcgccctggtgctgcagctgctgagcttcatgctgctggccggcgtgctggtggccatcctggtgcaggtgagcaaggtgcccagcagcctgagccaggagcagagcgagcaggacgccatctaccagaacctgacccagctgaaggccgccgtgggcgagctgagcgagaagagcaagctgcaggagatctaccaggagctgacccagctgaaggccgccgtgggcgagctgcccgagaagagcaagctgcaggagatctaccaggagctgaccagactgaaggccgccgtgggcgagctgcccgagaagagcaagctgcaggagatctaccaggagctgaccagactgaaggccgccgtgggcgagctgcccgagaagagcaagctgcaggagatctaccaggagctgaccagactgaaggccgccgtgggcgagctgcccgagaagagcaagctgcaggagatctaccaggagctgaccgagctgaaggccgccgtgggcgagctgcccgagaagagcaagctgcaggagatctaccaggagctgacccagctgaaggccgccgtgggcgagctgcccgaccagagcaagcagcagcagatctaccaggagctgaccgacctgaagaccgccttcgagagactgtgcagacactgccccaaggactggaccttcttccagggcaactgctacttcatgagcaacagccagagaaactggcacgacagcgtgaccgcctgccaggaggtgagagcccagctggtggtgatcaagaccgccgaggagcagaacttcctgcagctgcagaccagcagaagcaacagattcagctggatgggcctgagcgacctgaaccaggagggcacctggcagtgggtggacggcagccccctgagccccagcttccagagatactggaacagcggcgagcccaacaacagcggcaacgaggactgcgccgagttcagcggcagcggctggaacgacaacagatgcgacgtggacaactactggatctgcaagaagcccgccgcctgcttcagagacgagtag

SEQ ID NO: 178774 - DNA, 1164 bp, Artificial Sequence
  derived and/or modified sequence
atgagcgacagcaaggagcccagagtgcagcagctgggcctgctggaggaggaccccaccaccaacttccagttccagcagatccacggccacaagagcagcaccggctgcctgggccacggcgccctggtgctgcagctgctgagcttcatgctgctggccggcgtgctgcccagactgagcaaggtgcccagcagcctgagccaggagcagagcgagcaggacgccatctaccagaacctgacccagctgaaggccgccgtgggcgagctgagcgagaagagcaagctgcaggagatctaccaggagctgacccagctgaaggccgccgtgggcgagctgcccgagaagagcaagctgcaggagatctaccaggagctgaccagactgaaggccgccgtgggcgagctgcccgagaagagcaagctgcaggagatctaccaggagctgaccagactgaaggccgccgtgggcgagctgcccgagaagagcaagctgcaggagatctaccaggagctgaccagactgaaggccgccgtgggcgagctgcccgagaagagcaagctgcaggagatctaccaggagctgaccgagctgaaggccgccgtgggcgagctgcccgagaagagcaagctgcaggagatctaccaggagctgacccagctgaaggccgccgtgggcgagctgcccgaccagagcaagcagcagcagatctaccaggagctgaccgacctgaagaccgccttcgagagactgtgcagacactgccccaaggactggaccttcttccagggcaactgctacttcatgagcaacagccagagaaactggcacgacagcgtgaccgcctgccaggaggtgagagcccagctggtggtgatcaagaccgccgaggagcagaacttcctgcagctgcagaccagcagaagcaacagattcagctggatgggcctgagcgacctgaaccaggagggcacctggcagtgggtggacggcagccccctgagccccagcttccagagatactggaacagcggcgagcccaacaacagcggcaacgaggactgcgccgagttcagcggcagcggctggaacgacaacagatgcgacgtggacaactactggatctgcaagaagcccgccgcctgcttcagagacgagtag

SEQ ID NO: 178775 - protein, 1530 aa, Artificial Sequence
  derived and/or modified sequence
MPIRPDLQQLEKCIDDALRKNDFKPLKTLLQIDICEDVKIKCSKQFFHKVDNLICRELNKEDIHNVSAILVSVGRCGKNISVLGQAGLLTMIKQGLIQKMVAWFEKSKDIIQSQGNSKDEAVLNMIEDLVDLLLVIHDVSDEGKKQVVESFVPRICSLVIDSRVNICIQQEIIKKMNAMLDKMPQDARKILSNQEMLILMSSMGERILDAGDYDLQVGIVEALCRMTTEKQRQELAHQWFSMDFIAKAFKRIKDSEFETDCRIFLNLVNGMLGDKRRVFTFPCLSAFLDKYELQIPSDEKLEEFWIDFNLGSQTLSFYIAGDNDDHQWEAVTVPEEKVQIYSIEVRESKKLLTIILKNTVKISKREGKELLLYFDASLEITNVTQKIFGATKHRESIRKQGISVAKTSLHILFDASGSQILVPESQISPVGEELVSLKEKSKSPKEFAKPSKYIKNSDKGNRNNSQLEKTTPSKRKMSEASMIVSGADRYTMRSPVLFSNTSIPPRRRRIKPPLQMTSSAEKPSVSQTSENRVDNAASLKSRSSEGRHRRDNIDKHIKTAKCVENTENKNVEFPNQNFSELQDVIPDSQAAEKRDHTILPGVLDNICGNKIHSKWACWTPVTNIELCNNQRASTSSGDTLNQDIVINKKLTKQKSSSSISDHNSEGTGKVKYKKEQTDHIKIDKAEVEVCKKHNQQQNHPKYSGQKNTENAKQSDWPVESETTFKSVLLNKTIEESLIYRKKYILSKDVNTATCDKNPSASKNVQSHRKAEKELTSELNSWDSKQKKMREKSKGKEFTNVAESLISQINKRYKTKDDIKSTRKLKESLINSGFSNKPVVQLSKEKVQKKSYRKLKTTFVNVTSECPVNDVYNFNLNGADDPIIKLGIQEFQATAKEACADRSIRLVGPRNHDELKSSVKTKDKKIITNHQKKNLFSDTETEYRCDDSKTDISWLREPKSKPQLIDYSRNKNVKNHKSGKSRSSLEKGQPSSKMTPSKNITKKMDKTIPEGRIRLPRKATKTKKNYKDLSNSESECEQEFSHSFKENIPVKEENIHSRMKTVKLPKKQQKVFCAETEKELSKQWKNSSLLKDAIRDNCLDLSPRSLSGSPSSIEVTRCIEKITEKDFTQDYDCITKSISPYPKTSSLESLNSNSGVGGTIKSPKNNEKNFLCASESCSPIPRPLFLPRHTPTKSNTIVNRKKISSLVLTQETQNSNSYSDVSSYSSEERFMEIESPHINENYIQSKREESHLASSLSKSSEGREKTWFDMPCDATHVSGPTQHLSRKRIYIEDNLSNSNEVEMEEKGERRANLLPKKLCKIEDADHHIHKMSESVSSLSTNDFSIPWETWQNEFAGIEMTYETYERLNSEFKRRNNIRHKMLSYFTTQSWKTAQQHLRTMNHQSQDSRIKKLDKFQFIIIEELENFEKDSQSLKDLEKEFVDFWEKIFQKFSAYQKSEQQRLHLLKTSLAKSVFCNTDSEETVFTSEMCLMKEDMKVLQDRLLKDMLEEELLNVRRELMSVFMSHERNANV

SEQ ID NO: 178776 - protein, 1023 aa, Artificial Sequence
  derived and/or modified sequence
MPIRPDLQQLEKCIDDALRKNDFKPLKTLLQIDICEDVKIKCSKQFFHKVDNLICRELNKEDIHNVSAILVSVGRCGKNISVLGQAGLLTMIKQGLIQKMVAWFEKSKDIIQSQGNSKDEAVLNMIEDLVDLLLVIHDVSDEGKKQVVESFVPRICSLVIDSRVNICIQQEIIKKMNAMLDKMPQDARKILSNQEMLILMSSMGERILDAGDYDLQVGIVEALCRMTTEKQRQELAHQWFSMDFIAKAFKRIKDSEFETDCRIFLNLVNGMLGDKRRVFTFPCLSAFLDKYELQIPSDEKLEEFWIDFNLGSQTLSFYIAGDNDDHQWEAVTVPEEKVQIYSIEVRESKKLLTIILKNTVKISKREGKELLLYFDASLEITNVTQKIFGATKHRESIRKQGISVAKTSLHILFDASGSQILVPESQISPVGEELVSLKEKSKSPKEFAKPSKYIKNSDKGNRNNSQLEKTTPSKRKMSEASMIVSGADRYTMRSPVLFSNTSIPPRRRRIKPPLQMTSSAEKPSVSQTSENRVDNAASLKSRSSEGRHRRDNIDKHIKTAKCVENTENKNVEFPNQNFSELQDVIPDSQAAEKRDHTILPGVLDNICGNKIHSKWACWTPVTNIELCNNQRASTSSGDTLNQDIVINKKLTKQKSSSSISDHNSEGTGKVKYKKEQTDHIKIDKAEVEVCKKHNQQQNHPKYSGQKNTENAKQSDWPVESETTFKSVLLNKTIEESLIYRKKYILSKDVNTATCDKNPSASKNVQSHRKAEKELTSELNSWDSKQKKMREKSKGKEFTNVAESLISQINKRYKTKDDIKSTRKLKESLINSGFSNKPVVQLSKEKVQKKSYRKLKTTFVNVTSECPVNDVYNFNLNGADDPIIKLGIQEFQATAKEACADRSIRLVGPRNHDELKSSVKTKDKKIITNHQKKNLFSDTETEYRCDDSKTDISWLREPKSKPQLIDYSRNKNVKNHKSGKSRSSLEKGQPSSKMTPSKNITKKMDKTIPEGRIRLPRKATKTKK

SEQ ID NO: 178777 - DNA, 4593 bp, Artificial Sequence
  derived and/or modified sequence
atgcccatcagacccgacctgcagcagctggagaagtgcatcgacgacgccctgagaaagaacgacttcaagcccctgaagaccctgctgcagatcgacatctgcgaggacgtgaagatcaagtgcagcaagcagttcttccacaaggtggacaacctgatctgcagagagctgaacaaggaggacatccacaacgtgagcgccatcctggtgagcgtgggcagatgcggcaagaacatcagcgtgctgggccaggccggcctgctgaccatgatcaagcagggcctgatccagaagatggtggcctggttcgagaagagcaaggacatcatccagagccagggcaacagcaaggacgaggccgtgctgaacatgatcgaggacctggtggacctgctgctggtgatccacgacgtgagcgacgagggcaagaagcaggtggtggagagcttcgtgcccagaatctgcagcctggtgatcgacagcagagtgaacatctgcatccagcaggagatcatcaagaagatgaacgccatgctggacaagatgccccaggacgccagaaagatcctgagcaaccaggagatgctgatcctgatgagcagcatgggcgagagaatcctggacgccggcgactacgacctgcaggtgggcatcgtggaggccctgtgcagaatgaccaccgagaagcagagacaggagctggcccaccagtggttcagcatggacttcatcgccaaggccttcaagagaatcaaggacagcgagttcgagaccgactgcagaatcttcctgaacctggtgaacggcatgctgggcgacaagagaagagtgttcaccttcccctgcctgagcgccttcctggacaagtacgagctgcagatccccagcgacgagaagctggaggagttctggatcgacttcaacctgggcagccagaccctgagcttctacatcgccggcgacaacgacgaccaccagtgggaggccgtgaccgtgcccgaggagaaggtgcagatctacagcatcgaggtgagagagagcaagaagctgctgaccatcatcctgaagaacaccgtgaagatcagcaagagagagggcaaggagctgctgctgtacttcgacgccagcctggagatcaccaacgtgacccagaagatcttcggcgccaccaagcacagagagagcatcagaaagcagggcatcagcgtggccaagaccagcctgcacatcctgttcgacgccagcggcagccagatcctggtgcccgagagccagatcagccccgtgggcgaggagctggtgagcctgaaggagaagagcaagagccccaaggagttcgccaagcccagcaagtacatcaagaacagcgacaagggcaacagaaacaacagccagctggagaagaccacccccagcaagagaaagatgagcgaggccagcatgatcgtgagcggcgccgacagatacaccatgagaagccccgtgctgttcagcaacaccagcatcccccccagaagaagaagaatcaagccccccctgcagatgaccagcagcgccgagaagcccagcgtgagccagaccagcgagaacagagtggacaacgccgccagcctgaagagcagaagcagcgagggcagacacagaagagacaacatcgacaagcacatcaagaccgccaagtgcgtggagaacaccgagaacaagaacgtggagttccccaaccagaacttcagcgagctgcaggacgtgatccccgacagccaggccgccgagaagagagaccacaccatcctgcccggcgtgctggacaacatctgcggcaacaagatccacagcaagtgggcctgctggacccccgtgaccaacatcgagctgtgcaacaaccagagagccagcaccagcagcggcgacaccctgaaccaggacatcgtgatcaacaagaagctgaccaagcagaagagcagcagcagcatcagcgaccacaacagcgagggcaccggcaaggtgaagtacaagaaggagcagaccgaccacatcaagatcgacaaggccgaggtggaggtgtgcaagaagcacaaccagcagcagaaccaccccaagtacagcggccagaagaacaccgagaacgccaagcagagcgactggcccgtggagagcgagaccaccttcaagagcgtgctgctgaacaagaccatcgaggagagcctgatctacagaaagaagtacatcctgagcaaggacgtgaacaccgccacctgcgacaagaaccccagcgccagcaagaacgtgcagagccacagaaaggccgagaaggagctgaccagcgagctgaacagctgggacagcaagcagaagaagatgagagagaagagcaagggcaaggagttcaccaacgtggccgagagcctgatcagccagatcaacaagagatacaagaccaaggacgacatcaagagcaccagaaagctgaaggagagcctgatcaacagcggcttcagcaacaagcccgtggtgcagctgagcaaggagaaggtgcagaagaagagctacagaaagctgaagaccaccttcgtgaacgtgaccagcgagtgccccgtgaacgacgtgtacaacttcaacctgaacggcgccgacgaccccatcatcaagctgggcatccaggagttccaggccaccgccaaggaggcctgcgccgacagaagcatcagactggtgggccccagaaaccacgacgagctgaagagcagcgtgaagaccaaggacaagaagatcatcaccaaccaccagaagaagaacctgttcagcgacaccgagaccgagtacagatgcgacgacagcaagaccgacatcagctggctgagagagcccaagagcaagccccagctgatcgactacagcagaaacaagaacgtgaagaaccacaagagcggcaagagcagaagcagcctggagaagggccagcccagcagcaagatgacccccagcaagaacatcaccaagaagatggacaagaccatccccgagggcagaatcagactgcccagaaaggccaccaagaccaagaagaactacaaggacctgagcaacagcgagagcgagtgcgagcaggagttcagccacagcttcaaggagaacatccccgtgaaggaggagaacatccacagcagaatgaagaccgtgaagctgcccaagaagcagcagaaggtgttctgcgccgagaccgagaaggagctgagcaagcagtggaagaacagcagcctgctgaaggacgccatcagagacaactgcctggacctgagccccagaagcctgagcggcagccccagcagcatcgaggtgaccagatgcatcgagaagatcaccgagaaggacttcacccaggactacgactgcatcaccaagagcatcagcccctaccccaagaccagcagcctggagagcctgaacagcaacagcggcgtgggcggcaccatcaagagccccaagaacaacgagaagaacttcctgtgcgccagcgagagctgcagccccatccccagacccctgttcctgcccagacacacccccaccaagagcaacaccatcgtgaacagaaagaagatcagcagcctggtgctgacccaggagacccagaacagcaacagctacagcgacgtgagcagctacagcagcgaggagagattcatggagatcgagagcccccacatcaacgagaactacatccagagcaagagagaggagagccacctggccagcagcctgagcaagagcagcgagggcagagagaagacctggttcgacatgccctgcgacgccacccacgtgagcggccccacccagcacctgagcagaaagagaatctacatcgaggacaacctgagcaacagcaacgaggtggagatggaggagaagggcgagagaagagccaacctgctgcccaagaagctgtgcaagatcgaggacgccgaccaccacatccacaagatgagcgagagcgtgagcagcctgagcaccaacgacttcagcatcccctgggagacctggcagaacgagttcgccggcatcgagatgacctacgagacctacgagagactgaacagcgagttcaagagaagaaacaacatcagacacaagatgctgagctacttcaccacccagagctggaagaccgcccagcagcacctgagaaccatgaaccaccagagccaggacagcagaatcaagaagctggacaagttccagttcatcatcatcgaggagctggagaacttcgagaaggacagccagagcctgaaggacctggagaaggagttcgtggacttctgggagaagatcttccagaagttcagcgcctaccagaagagcgagcagcagagactgcacctgctgaagaccagcctggccaagagcgtgttctgcaacaccgacagcgaggagaccgtgttcaccagcgagatgtgcctgatgaaggaggacatgaaggtgctgcaggacagactgctgaaggacatgctggaggaggagctgctgaacgtgagaagagagctgatgagcgtgttcatgagccacgagagaaacgccaacgtgtag

SEQ ID NO: 178778 - DNA, 3072 bp, Artificial Sequence
  derived and/or modified sequence
atgcccatcagacccgacctgcagcagctggagaagtgcatcgacgacgccctgagaaagaacgacttcaagcccctgaagaccctgctgcagatcgacatctgcgaggacgtgaagatcaagtgcagcaagcagttcttccacaaggtggacaacctgatctgcagagagctgaacaaggaggacatccacaacgtgagcgccatcctggtgagcgtgggcagatgcggcaagaacatcagcgtgctgggccaggccggcctgctgaccatgatcaagcagggcctgatccagaagatggtggcctggttcgagaagagcaaggacatcatccagagccagggcaacagcaaggacgaggccgtgctgaacatgatcgaggacctggtggacctgctgctggtgatccacgacgtgagcgacgagggcaagaagcaggtggtggagagcttcgtgcccagaatctgcagcctggtgatcgacagcagagtgaacatctgcatccagcaggagatcatcaagaagatgaacgccatgctggacaagatgccccaggacgccagaaagatcctgagcaaccaggagatgctgatcctgatgagcagcatgggcgagagaatcctggacgccggcgactacgacctgcaggtgggcatcgtggaggccctgtgcagaatgaccaccgagaagcagagacaggagctggcccaccagtggttcagcatggacttcatcgccaaggccttcaagagaatcaaggacagcgagttcgagaccgactgcagaatcttcctgaacctggtgaacggcatgctgggcgacaagagaagagtgttcaccttcccctgcctgagcgccttcctggacaagtacgagctgcagatccccagcgacgagaagctggaggagttctggatcgacttcaacctgggcagccagaccctgagcttctacatcgccggcgacaacgacgaccaccagtgggaggccgtgaccgtgcccgaggagaaggtgcagatctacagcatcgaggtgagagagagcaagaagctgctgaccatcatcctgaagaacaccgtgaagatcagcaagagagagggcaaggagctgctgctgtacttcgacgccagcctggagatcaccaacgtgacccagaagatcttcggcgccaccaagcacagagagagcatcagaaagcagggcatcagcgtggccaagaccagcctgcacatcctgttcgacgccagcggcagccagatcctggtgcccgagagccagatcagccccgtgggcgaggagctggtgagcctgaaggagaagagcaagagccccaaggagttcgccaagcccagcaagtacatcaagaacagcgacaagggcaacagaaacaacagccagctggagaagaccacccccagcaagagaaagatgagcgaggccagcatgatcgtgagcggcgccgacagatacaccatgagaagccccgtgctgttcagcaacaccagcatcccccccagaagaagaagaatcaagccccccctgcagatgaccagcagcgccgagaagcccagcgtgagccagaccagcgagaacagagtggacaacgccgccagcctgaagagcagaagcagcgagggcagacacagaagagacaacatcgacaagcacatcaagaccgccaagtgcgtggagaacaccgagaacaagaacgtggagttccccaaccagaacttcagcgagctgcaggacgtgatccccgacagccaggccgccgagaagagagaccacaccatcctgcccggcgtgctggacaacatctgcggcaacaagatccacagcaagtgggcctgctggacccccgtgaccaacatcgagctgtgcaacaaccagagagccagcaccagcagcggcgacaccctgaaccaggacatcgtgatcaacaagaagctgaccaagcagaagagcagcagcagcatcagcgaccacaacagcgagggcaccggcaaggtgaagtacaagaaggagcagaccgaccacatcaagatcgacaaggccgaggtggaggtgtgcaagaagcacaaccagcagcagaaccaccccaagtacagcggccagaagaacaccgagaacgccaagcagagcgactggcccgtggagagcgagaccaccttcaagagcgtgctgctgaacaagaccatcgaggagagcctgatctacagaaagaagtacatcctgagcaaggacgtgaacaccgccacctgcgacaagaaccccagcgccagcaagaacgtgcagagccacagaaaggccgagaaggagctgaccagcgagctgaacagctgggacagcaagcagaagaagatgagagagaagagcaagggcaaggagttcaccaacgtggccgagagcctgatcagccagatcaacaagagatacaagaccaaggacgacatcaagagcaccagaaagctgaaggagagcctgatcaacagcggcttcagcaacaagcccgtggtgcagctgagcaaggagaaggtgcagaagaagagctacagaaagctgaagaccaccttcgtgaacgtgaccagcgagtgccccgtgaacgacgtgtacaacttcaacctgaacggcgccgacgaccccatcatcaagctgggcatccaggagttccaggccaccgccaaggaggcctgcgccgacagaagcatcagactggtgggccccagaaaccacgacgagctgaagagcagcgtgaagaccaaggacaagaagatcatcaccaaccaccagaagaagaacctgttcagcgacaccgagaccgagtacagatgcgacgacagcaagaccgacatcagctggctgagagagcccaagagcaagccccagctgatcgactacagcagaaacaagaacgtgaagaaccacaagagcggcaagagcagaagcagcctggagaagggccagcccagcagcaagatgacccccagcaagaacatcaccaagaagatggacaagaccatccccgagggcagaatcagactgcccagaaaggccaccaagaccaagaagtag

SEQ ID NO: 178779 - DNA, 4593 bp, Artificial Sequence
  derived and/or modified sequence
atgccaatcagacctgacctgcagcagctggagaaatgcatcgatgacgcccttcgcaaaaatgacttcaagcccctcaaaactctgctccagattgacatctgtgaagatgtgaaaatcaaatgcagcaaacagttcttccacaaagtcgataacttgatttgccgcgagctgaataaagaggacattcacaatgtatctgccattctcgtgtccgtgggtcgatgcgggaaaaatatctcagttctgggccaggcaggcctgctgactatgatcaaacaggggctgatacagaagatggtggcctggttcgaaaaaagtaaagacataatacagtcgcaggggaattccaaggatgaagccgttctgaatatgatcgaggatcttgtagatttgttgctcgtgattcacgacgtttcagacgaagggaagaaacaagtggttgagagttttgtccctaggatatgttcactggtgatcgattccagggtcaatatttgtatccagcaggaaatcattaagaaaatgaacgccatgctcgataagatgccccaagatgctagaaagatcctgtccaaccaagagatgttaatcttgatgagcagcatgggggagcgcattcttgatgcaggtgattacgacttgcaggttggcatcgtggaagcactgtgcagaatgactaccgaaaaacaacgccaggaactcgcccaccagtggttttctatggatttcatagcgaaagcctttaagaggatcaaggactccgagttcgagactgactgtaggattttcctgaacttagtgaatgggatgttaggagataaacggcgagttttcacatttccttgtctcagcgcctttctggacaagtatgagctgcagatccctagcgatgagaagctcgaggagttctggatcgatttcaatctcggaagccagactctgtcgttttatattgcaggagacaacgacgaccatcagtgggaggccgtcacagtgcctgaggagaaggtccagatctactccatcgaggttagagagagcaagaagctactcaccatcatcctgaaaaataccgtgaagatcagcaagcgagagggaaaagagctgctgctgtacttcgacgcctccctggagatcacaaacgtgacacagaagatcttcggcgccaccaaacaccgcgagagcattcggaagcagggtatctccgtggcgaaaacatccctgcatatactttttgatgcttccggttcccagatccttgtgcccgagagccaaatatcacccgtgggggaggagttagtcagcctcaaagaaaaatcaaagtctccgaaagaattcgcaaaacctagtaaatacattaaaaacagtgacaagggaaacaggaataatagccagttggagaagactacccccagcaaaaggaagatgtctgaggccagtatgatcgtgtccggcgccgatcgctacacaatgaggtctccagtccttttctccaataccagtatcccgcctagacgcagacgcatcaagccacccttgcaaatgacatcttccgcagaaaagccttccgtgtctcagacctcggagaatcgcgtggataacgccgctagcctgaagtctagaagctctgagggaagacacagacgagacaatattgataagcatatcaaaacagccaagtgtgtggagaacactgagaacaagaatgtcgaattcccaaatcagaacttctctgagctgcaggatgtgattcctgattcccaggctgctgagaagagggatcatacgatcctgcctggtgtgctggataatatctgtggcaacaagatacattccaaatgggcctgctggacaccagtgacaaacatcgagctttgcaataatcagagggcttcaacaagctccggtgacaccttaaaccaagacatcgtgattaataagaaactaacaaagcagaagtccagctcttccatctcggaccacaattccgaggggaccgggaaggtcaagtataaaaaggagcagacagatcacattaaaatcgacaaagcagaggtcgaggtttgtaaaaaacataatcagcagcagaaccaccccaaatactctgggcagaagaacactgaaaacgccaaacagtcagattggccagtagagtcggagacaacgttcaaatctgtccttttgaataagaccatcgaagaatcattgatctacaggaaaaagtacatcctgtccaaggatgtgaacacagctacttgcgacaagaacccctctgcttcgaagaacgtacagtcccataggaaagcggagaaagaacttacctcagagctgaactcctgggatagtaagcagaagaaaatgagagagaaaagtaaagggaaagagtttacaaacgtggcagaaagccttatttctcaaatcaataagagatataaaacaaaggacgacattaagagcaccaggaaactcaaggagagcttgattaattccggcttttccaacaagcctgtggtgcagctgtctaaggagaaagttcagaaaaaaagctacagaaaacttaagaccaccttcgtgaatgttaccagcgaatgcccggtgaatgacgtctacaactttaacctgaatggagctgacgaccctatcatcaagttggggattcaggagttccaggctaccgccaaagaagcctgtgccgacagatccattaggctggtggggccaagaaatcatgatgagcttaagtcgagcgttaagacaaaggacaaaaaaatcatcaccaaccatcagaagaaaaacttgttctccgacacggaaacggagtaccgctgtgatgatagtaaaaccgacatatcctggctcagagagcctaagagcaagcctcagctgattgactatagtagaaataaaaacgtcaaaaaccataaatcaggtaagtctcggtcctctctggagaagggccagccatcttctaagatgacgccctcgaagaatattaccaagaagatggataagactataccggagggtaggatccgcctgcccagaaaagctaccaaaaccaagaaaaactacaaggatctctccaactcggagagcgagtgtgaacaagagtttagtcattccttcaaggagaacataccagtgaaagaagagaacatccacagtcgaatgaaaacagtcaagctgccaaaaaagcagcagaaggtgttttgcgccgagacagagaaggagctaagtaagcagtggaagaatagtagcttactgaaagatgctattcgtgataactgccttgatttaagtcccagatctctcagcggtagcccctcaagcatcgaagtcaccagatgtattgagaagatcaccgaaaaggactttacgcaggactacgactgtataacaaaaagcattagcccctaccccaagacatcttctctggagagtctcaattccaacagcggtgtcggaggcacaatcaaatcccctaagaataatgagaagaactttctctgcgcatctgagagttgtagcccaatcccccgacccctgtttttgccacgtcacacgcccactaagtccaacactatagtgaatcgcaagaaaatcagtagcttggttctgactcaggagactcagaatagtaattcctacagcgatgtgagcagctactcctccgaggaaagattcatggagatcgaatcacctcacatcaacgaaaattacatacagagcaaaagagaggaatctcatttggccagctcattaagtaagtccagcgagggccgagagaaaacctggtttgacatgccttgcgacgcaacccatgtaagcgggcctacacagcacctcagccgaaagagaatttatatcgaagacaacctctccaacagcaatgaagttgagatggaagaaaaaggagaaaggcgggccaacttgttgcccaagaagctctgcaagattgaagacgccgatcatcacattcacaagatgtcagagtctgtgtccagcttatctactaatgatttcagcatcccatgggaaacgtggcaaaacgaattcgcggggatagagatgacctacgagacctatgaacgacttaactcagagtttaaacgtagaaataacattagacacaagatgttatcatactttactacacaatcgtggaaaactgcccagcagcacctgcgcacaatgaaccaccagtctcaggatagtagaattaagaagctcgataaattccagtttataatcatcgaggagttagaaaactttgagaaagatagccagtcattgaaagatcttgagaaggagtttgtggatttctgggaaaaaattttccagaagttctccgcctaccaaaaaagcgaacaacagagactccatctactcaaaacttctttggcaaagtccgttttctgcaacaccgattcagaggaaaccgttttcacttctgaaatgtgcctgatgaaggaagacatgaaggtcctgcaggacagactcttaaaggacatgctagaggaggaactgcttaacgttcggcgggagctgatgtctgtgttcatgagccacgagagaaatgctaatgtttag

SEQ ID NO: 178780 - DNA, 4593 bp, Artificial Sequence
  derived and/or modified sequence
atgcctatacggccagatctgcagcagcttgagaaatgcatagatgacgctttgaggaaaaacgactttaagcccctcaagactctgctgcagatcgacatctgtgaggatgtgaagattaaatgctctaaacagttttttcataaggtcgataacctgatatgtcgggagctgaacaaggaggatatccacaatgtcagcgcgatcttggtgtctgtcggcaggtgtgggaaaaacatctctgtcctgggacaggccggtctcctgaccatgattaaacaaggcttaatccagaaaatggtcgcgtggttcgaaaagagtaaagacattatccagagtcaaggcaatagcaaggacgaagccgtcctcaacatgatcgaggatctggtggaccttctgctcgtaattcacgacgtctccgatgagggtaaaaagcaggttgtcgagagttttgtccctcggatatgctcactcgtgatcgactctcgagtgaatatttgtatacaacaggaaattatcaaaaagatgaatgctatgttagacaaaatgccacaggatgctcgcaagattctgagtaaccaagaaatgctgatcctgatgtccagcatgggggagagaatactggacgcaggagactatgatctccaagtcgggatagtagaagcactttgccggatgactactgagaaacagaggcaggaactggcccaccagtggttctccatggattttatcgcaaaggcatttaagaggattaaggactcagagtttgagactgactgcagaatctttctaaatctggttaacggcatgctcggcgacaagagaagagtgttcacattcccgtgcctctccgccttccttgataagtacgagctgcagattccatccgacgaaaaattggaagagttctggatagacttcaatcttggatcgcagacgctgagcttctatatcgcgggtgataacgacgatcatcagtgggaggccgtcaccgtgcccgaagagaaagtgcagatttattccatcgaagtcagggagtcaaaaaaactattaacaattattttgaagaacacagttaagatctctaagcgggaggggaaggaacttctcttgtatttcgatgcttcattggagatcactaacgtgacgcaaaaaatcttcggcgcaactaagcacagggaatccatcagaaagcagggcatatcagtagccaagacctctctgcatattctcttcgacgcttcgggctcgcagatcctagtgccggaatcccagatatctccggtaggcgaagagctagtgtctctgaaggagaagtccaagtccccaaaggagtttgccaagcccagtaagtacataaagaactcagataaagggaatcggaataactctcagctagagaagaccactccaagtaagagaaaaatgagcgaggcctcaatgatagtaagcggggcagatcgatataccatgaggtccccggtgctgtttagtaatacctcaattcctcctcgaagaaggcgcattaagccccccctgcagatgacctccagcgcggagaagccctctgtaagtcagacaagtgaaaatcgagtcgacaatgccgcatctcttaagtccagatcatcggaaggaaggcataggagggacaacattgacaaacatattaagacagccaagtgcgtagagaacactgagaataagaacgtggagttcccgaatcagaatttcagtgagcttcaggatgtgatacctgacagccaggcagccgaaaaaagggaccacacgattcttcctggggtgctggataatatttgcggaaacaagatccattctaagtgggcctgttggactcctgtcaccaacattgagctatgcaacaaccagcgggcttctacaagctcaggcgacacactcaaccaggatatagtcattaacaagaaactcaccaaacagaagtccagttcctcaatcagcgatcataattccgaaggcacgggaaaggtgaaatacaaaaaggaacagaccgaccacattaagattgataaggccgaagtggaagtctgcaaaaaacacaatcagcagcagaaccacccaaaatatagcggccaaaagaacaccgagaacgctaagcagtcagattggccagtcgagtcagaaactacttttaaatccgtgcttctgaacaaaaccatagaggagagtcttatttatagaaagaaatacattcttagtaaggacgtgaataccgctacatgcgacaaaaaccctagcgcatcgaagaacgttcagtcccaccgtaaggctgagaaggagcttacctcagagctaaattcctgggactctaaacaaaaaaagatgagggaaaagtccaaaggtaaagaatttactaacgtggcagaatcccttatctctcagattaataaacggtacaagacaaaagacgacataaaaagtacgcgaaagctaaaagagtccctcatcaactccgggttcagtaacaagcctgtggtccagttgagtaaagagaaggtgcagaagaagagctaccggaaactcaagacaaccttcgttaacgtcacatccgagtgcccggttaacgatgtctataatttcaacttaaatggcgccgacgatccgatcatcaaactgggtattcaggaattccaggcaactgcgaaggaagcctgcgcagatcgtagcattagactggtgggccctcggaatcacgacgaactaaagagcagcgtgaagactaaagacaagaaaataattactaaccaccaaaaaaagaatctgttctcggatacagagacagagtacaggtgtgatgatagtaagaccgacatctcctggctccgggagcccaaaagcaagccccagctgatcgattacagccgcaacaaaaatgtaaagaaccacaagagcgggaagtcccgaagctccctggagaaaggacaaccttctagcaaaatgactcccagtaaaaatataacaaagaaaatggacaagacaataccagagggtaggatccgacttcctcgtaaggccactaagactaaaaagaactacaaagatctcagcaattctgagagtgaatgcgagcaggagttcagccactccttcaaggaaaatatccccgtaaaggaggaaaacattcactcccggatgaagacagtgaaacttcccaaaaagcagcaaaaagtattctgcgctgaaaccgaaaaggagttgagtaaacagtggaaaaattcatcgctgctcaaagacgctattagggataactgtctggatttatctcctagatccctgagcgggtctccctcttccatcgaagttacccggtgcattgaaaaaatcacagagaaggatttcacacaggattatgactgtattacgaagtcgatatcaccatacccaaaaacctcctctctcgagtctctcaactccaactctggtgtgggcgggacaatcaaaagtccgaaaaacaatgagaagaattttttgtgtgcttctgagagctgctctccaatcccccgtccattattcctgccccgccacacaccaaccaagtctaatacaatagtgaaccgcaagaagatcagctctctcgtgctcactcaggagacacagaactccaattcctattccgatgtttcctcatactcatctgaagagagatttatggagatagagagtcctcatattaacgaaaactacatccagtcaaagagagaggagtcccaccttgcctctagcctcagcaagagctcagaagggagagaaaagacctggttcgacatgccatgtgacgccacccatgtgagcggtccgacccagcatttaagtcgaaaaaggatttacatagaagataatctgtctaacagcaacgaggtagagatggaggagaaaggcgagcgtcgggccaatctgctgcctaagaaactctgcaagatcgaggatgccgatcaccatatacacaagatgagtgagtccgtgagttccctgagcactaacgattttagcattccatgggaaacttggcagaacgagtttgctggaatcgagatgacctatgagacatacgagcgactgaactctgaatttaagcgcaggaacaatattagacataagatgctttcatacttcacaactcagagttggaagaccgcacagcagcatctgaggaccatgaaccaccagtcccaagatagccggattaaaaaactggacaagttccagtttataattatagaggaattggagaattttgaaaaggacagccagagcctgaaagacctcgaaaaagagttcgtggatttctgggaaaaaatatttcagaaattctcagcgtatcagaagtccgaacagcagaggcttcacctgctgaaaacaagcttggcgaagtcagtgttttgcaacactgatagcgaggagacggtgtttactagtgaaatgtgccttatgaaggaggatatgaaggtccttcaggacaggctgctgaaagacatgctcgaggaggagctcctgaatgtgaggcgagagctaatgtctgtcttcatgtctcacgagcggaatgccaacgtctag

SEQ ID NO: 178781 - DNA, 3072 bp, Artificial Sequence
  derived and/or modified sequence
atgcccatccgtcccgacctgcaacagctggaaaagtgtatagacgatgccctccgtaaaaatgatttcaagcccttgaagaccctccttcagatcgacatatgcgaggatgttaaaatcaagtgttccaagcagttttttcacaaggttgacaatctgatttgtagagagctcaataaagaagatattcataacgtaagcgctatattggtttccgtaggaagatgcggtaaaaacatctctgtgctcggacaggctgggctgctgacaatgattaaacagggtcttattcaaaagatggttgcttggttcgaaaagagcaaggacatcattcagtcacaaggaaacagtaaggacgaagcagttctcaatatgatcgaagacctcgtggatcttctgcttgtcattcacgatgtttcagatgaggggaagaaacaggttgtggaatctttcgtcccccgcatatgcagtttggttattgactctagagtcaatatttgtatccagcaggaaatcattaagaaaatgaatgcaatgttggacaaaatgccccaagacgcccgaaaaatcctgtccaaccaggagatgctaattctgatgagcagcatgggggagaggatcctcgacgctggggactatgatctgcaagttgggatagtggaggcgctgtgccgcatgaccactgagaagcagaggcaggaacttgctcaccagtggttttctatggacttcattgccaaagcgttcaaaaggattaaggactctgagttcgagactgactgccgtatctttctgaacctcgtgaatggcatgctcggtgataaacgacgtgtattcacttttccttgcctgagtgcttttctcgacaagtacgagcttcaaatcccctctgatgagaaactagaggagttttggatcgactttaacctgggcagccagacactttccttttacatcgccggcgataacgatgatcatcaatgggaggctgtcaccgtccctgaggaaaaggtgcagatttacagtattgaagtgcgcgaatccaagaaactcctgacaatcattctgaaaaataccgtgaagatctccaaacgggaggggaaagaattgctcctttatttcgacgcatccctcgagatcaccaacgtgacacagaagatctttggagcgaccaagcacagggagagcatccgtaaacaggggatctctgtggcaaagaccagcttgcacatccttttcgatgccagcggaagtcagatcctggtccccgagagtcagatttcacccgtcggggaagaactcgtgtctctgaaggagaagtccaaaagccccaaggagttcgccaaaccttctaaatacatcaagaattcggataagggaaatcggaacaatagtcagctcgagaagaccaccccttcgaaacgcaagatgagcgaggctagcatgatcgtttctggagccgaccgttacacaatgagatctccggttctctttagcaatacatcaattcctccccggaggcgccgtattaagcctccccttcagatgaccagcagcgccgaaaaaccatccgtgtcgcagacttccgagaaccgggtggacaatgctgcatcactcaagtctcgctcatccgaagggcgacatcgacgcgacaacatcgataagcacatcaaaacagctaagtgtgtcgagaataccgagaacaaaaacgtggagtttccgaaccaaaacttctctgagctgcaggatgttatccccgactcccaggctgctgagaaacgcgaccacaccatactgcccggggttctagacaatatttgtggcaacaaaatccactctaaatgggcttgttggacccccgtgacaaatatcgagctttgtaataatcagagagccagtacttcttcaggggataccttgaaccaagatattgtcatcaacaaaaagctgacgaagcagaagtcgagcagttctatcagtgaccataatagcgagggaacgggcaaagtgaaatataaaaaagagcagacagatcacattaagatagataaggccgaggttgaagtgtgcaagaagcacaatcagcagcagaatcaccctaagtactctggtcagaaaaatacagagaacgctaaacagtctgactggcccgtggagtctgagactaccttcaagtccgtgttgctcaacaagacaattgaagagtctctgatctaccgcaagaagtatattctgagcaaagacgtcaacactgccacctgcgacaagaacccatcagcgagcaagaacgtccagagtcaccggaaggcggagaaggaactcacgtcagagctgaactcatgggacagcaagcagaaaaagatgcgtgagaaatcaaagggcaaggaatttacgaatgtggcagaaagtctgatcagccagattaacaagcgatataagaccaaggatgatataaaaagcacacgcaaactcaaggagagcctgattaactctgggttctctaataagcctgtcgtccagttgtcaaaagaaaaagtccaaaagaaatcatataggaaattaaagacgacattcgtgaacgtgacgtctgaatgccctgtgaacgatgtttacaattttaacctgaacggagccgacgatcctatcatcaaactcggcattcaagagttccaggcaacggccaaggaggcctgtgctgataggtccattaggctcgtgggacctcgtaaccacgacgagttaaagtcctccgttaaaacgaaagacaagaagatcattacaaatcatcaaaagaagaatttattctcagatactgagaccgagtaccgctgtgatgactccaagacggatatctcgtggctgcgcgagcctaagtccaagccccagctgattgactattcaaggaacaagaacgtaaaaaatcacaagtcaggaaagagtaggtcttccctcgaaaaggggcaacctagcagcaaaatgacaccttctaaaaatataactaagaagatggacaaaaccatccctgagggacggatacgtctgcccaggaaggccaccaagacaaagaagtag

SEQ ID NO: 178782 - DNA, 4593 bp, Artificial Sequence
  derived and/or modified sequence
atgcccatccggccagacctgcagcagctggagaagtgcattgatgatgccctgaggaagaatgacttcaagcccctgaagaccctgctgcagattgacatctgtgaagatgtgaagatcaagtgcagcaagcagttcttccacaaggtggacaacctgatctgccgggagctgaacaaggaggacatccacaacgtgtctgccatcctggtgtctgtgggccgctgtgggaagaacatctctgtgctgggccaggccggcctgctgaccatgatcaagcagggcctcatccagaagatggtggcctggtttgagaagagcaaggacatcatccagagccagggcaacagcaaggatgaagctgtgctgaacatgattgaggacctggtggacctgctgctggtgattcatgatgtgtctgatgagggcaagaagcaggtggtggagagctttgtgccccgcatctgcagcctggtgattgacagccgggtgaacatctgcatccagcaggagatcatcaagaagatgaatgccatgctggacaagatgccccaggatgccaggaagatcctgagcaaccaggagatgctgatcctgatgagctccatgggagagcgcatcctggatgctggggactatgacctgcaggtgggcatcgtggaggccctgtgcaggatgaccacagagaagcagaggcaggagctggcccaccagtggttctccatggacttcatcgccaaggccttcaagaggatcaaggacagcgagtttgaaacagactgccgcatcttcctgaacctggtgaatggcatgctgggggacaagagaagagtcttcaccttcccctgcctgagcgccttcctggacaagtatgagctgcagatccccagtgatgagaagctggaggagttctggattgacttcaacctgggcagccagaccctgtccttctacatcgccggggacaatgatgaccaccagtgggaggccgtgacagtgcctgaggagaaggtgcagatctacagcattgaggtgcgggagagcaagaagctgctgaccatcatcctgaagaacacagtgaagatcagcaagcgggagggcaaggagctgctgctgtactttgatgccagcctggagatcaccaacgtgacccagaagatctttggagccaccaagcaccgggagagcatcaggaagcagggcatctctgtggccaagaccagcctgcacatcctgtttgatgccagcggcagccagatcctggtgcctgagagccagatcagccctgtgggggaggagctggtgtccctgaaggagaagagcaagagccccaaggagtttgccaagcccagcaagtacatcaagaacagcgacaagggcaacagaaacaacagccagctggagaagaccacccccagcaagaggaagatgtctgaggcctccatgattgtgtctggagctgaccgctacaccatgaggagccctgtgctcttcagcaacaccagcatcccccccaggagaagacgcatcaagccacccctgcagatgaccagcagcgctgagaagcccagcgtgtcccagaccagcgagaacagagtggacaatgctgccagcctgaagagccgcagcagcgagggccgccacagaagagacaacatcgacaagcacatcaagacagccaagtgtgtggagaacacagagaacaagaatgtggagttccccaaccagaacttcagcgagctgcaggatgtgatcccagacagccaggccgctgagaagagggaccacaccatcctgcccggggtgctggacaacatctgtggcaacaagatccacagcaagtgggcctgctggacccctgtgaccaacatcgagctgtgcaacaaccagagggccagcaccagcagcggggacaccctgaaccaggacatcgtcatcaacaagaagctgaccaagcagaagagcagcagcagcatcagtgaccacaacagcgagggcaccgggaaggtgaagtacaagaaggagcagacagaccacatcaagattgacaaggccgaggtggaggtgtgcaagaagcacaaccagcagcagaaccaccccaagtacagcggccagaagaacacagaaaatgccaagcagagcgactggcctgtggagagcgagaccaccttcaagtctgtgctgctgaacaagaccatcgaggagagcctcatctacaggaagaagtacatcctgagcaaggatgtgaacacagccacctgtgacaagaaccccagcgccagcaagaatgtgcagagccacaggaaggccgagaaggagctgaccagcgagctgaacagctgggacagcaagcagaagaagatgagggagaagagcaagggcaaggagttcaccaacgtggccgagagcctcatcagccagatcaacaagcgctacaagaccaaggatgacatcaagagcaccaggaagctgaaggagagcctcatcaacagcggcttcagcaacaagcctgtggtgcagctgagcaaggagaaggtgcagaagaagagctacaggaagctgaagaccacctttgtgaatgtgaccagcgagtgccctgtgaatgatgtgtacaacttcaacctgaatggagcagatgaccccatcatcaagctgggcatccaggagttccaggccacagccaaggaggcctgtgccgacaggagcatccggctggtgggccccagaaatcatgatgagctgaagagctctgtgaagaccaaggacaagaagatcatcaccaaccaccagaagaagaacctcttcagtgacacagaaacagagtaccgctgtgatgacagcaagacagacatctcctggctgcgggagcccaagagcaagccccagctgattgactacagcaggaacaagaatgtgaagaaccacaagagcggcaagagccgcagcagcctggagaagggccagcccagcagcaagatgacccccagcaagaacatcaccaagaagatggacaagaccatccctgagggccgcatccggctgcccaggaaggccaccaagaccaagaagaactacaaggacctgagcaacagcgagagtgaatgtgagcaggagttcagccacagcttcaaggagaacatccctgtgaaggaggagaacatccacagcaggatgaagacagtgaagctgcccaagaagcagcagaaggtgttctgtgccgagacagagaaggagctgagcaagcagtggaagaacagcagcctgctgaaggatgccatccgggacaactgcctggacctgagccccaggagcctgagcggcagccccagcagcattgaggtgacccgctgcatcgagaagatcacagagaaggacttcacccaggactatgactgcatcaccaagagcatcagcccctaccccaagaccagcagcctggagagcctgaacagcaacagcggcgtgggcggcaccatcaagagccccaagaacaatgagaagaacttcctgtgtgccagcgagagctgcagccccatcccccggcccctcttcctgcccaggcacacccccaccaagagcaacaccatcgtgaacaggaagaagatcagcagcctggtgctgacccaggagacccagaacagcaacagctacagtgatgtgagcagctacagcagcgaggagcgcttcatggagattgagagcccccacatcaatgaaaactacatccagagcaagcgggaggagagccacctggccagcagcctgagcaagagcagcgagggccgggagaagacctggtttgacatgccctgtgatgccacccacgtgtctggccccacccagcacctgagcaggaagaggatctacatcgaggacaacctgagcaacagcaatgaggtggagatggaggagaagggggagcggcgggccaacctgctgcccaagaagctgtgcaagattgaagatgctgaccaccacatccacaagatgtctgagagcgtgagcagcctgagcaccaatgacttcagcatcccctgggagacctggcagaatgaatttgctggcatcgagatgacctatgagacctatgagcggctgaacagcgagttcaagagaagaaacaacatccgccacaagatgctgagctacttcaccacccagagctggaagacagcccagcagcacctgcggaccatgaaccaccagagccaggacagccgcatcaagaagctggacaagttccagttcatcatcatcgaggagctggagaactttgagaaggacagccagagcctgaaggacctggagaaggagtttgtggacttctgggagaagatcttccagaagttcagcgcctaccagaagtctgagcagcagaggctgcacctgctgaagaccagcctggccaagtctgtgttctgcaacacagacagcgaggagaccgtcttcaccagcgagatgtgcctgatgaaggaggacatgaaggtgctgcaggaccggctgctgaaggacatgctggaggaggagctgctgaatgtgcggcgggagctgatgtctgtgttcatgagccatgaaagaaatgccaacgtgtag

SEQ ID NO: 178783 - DNA, 3072 bp, Artificial Sequence
  derived and/or modified sequence
atgcccatccggccagacctgcagcagctggagaagtgcattgatgatgccctgaggaagaatgacttcaagcccctgaagaccctgctgcagattgacatctgtgaagatgtgaagatcaagtgcagcaagcagttcttccacaaggtggacaacctgatctgccgggagctgaacaaggaggacatccacaacgtgtctgccatcctggtgtctgtgggccgctgtgggaagaacatctctgtgctgggccaggccggcctgctgaccatgatcaagcagggcctcatccagaagatggtggcctggtttgagaagagcaaggacatcatccagagccagggcaacagcaaggatgaagctgtgctgaacatgattgaggacctggtggacctgctgctggtgattcatgatgtgtctgatgagggcaagaagcaggtggtggagagctttgtgccccgcatctgcagcctggtgattgacagccgggtgaacatctgcatccagcaggagatcatcaagaagatgaatgccatgctggacaagatgccccaggatgccaggaagatcctgagcaaccaggagatgctgatcctgatgagctccatgggagagcgcatcctggatgctggggactatgacctgcaggtgggcatcgtggaggccctgtgcaggatgaccacagagaagcagaggcaggagctggcccaccagtggttctccatggacttcatcgccaaggccttcaagaggatcaaggacagcgagtttgaaacagactgccgcatcttcctgaacctggtgaatggcatgctgggggacaagagaagagtcttcaccttcccctgcctgagcgccttcctggacaagtatgagctgcagatccccagtgatgagaagctggaggagttctggattgacttcaacctgggcagccagaccctgtccttctacatcgccggggacaatgatgaccaccagtgggaggccgtgacagtgcctgaggagaaggtgcagatctacagcattgaggtgcgggagagcaagaagctgctgaccatcatcctgaagaacacagtgaagatcagcaagcgggagggcaaggagctgctgctgtactttgatgccagcctggagatcaccaacgtgacccagaagatctttggagccaccaagcaccgggagagcatcaggaagcagggcatctctgtggccaagaccagcctgcacatcctgtttgatgccagcggcagccagatcctggtgcctgagagccagatcagccctgtgggggaggagctggtgtccctgaaggagaagagcaagagccccaaggagtttgccaagcccagcaagtacatcaagaacagcgacaagggcaacagaaacaacagccagctggagaagaccacccccagcaagaggaagatgtctgaggcctccatgattgtgtctggagctgaccgctacaccatgaggagccctgtgctcttcagcaacaccagcatcccccccaggagaagacgcatcaagccacccctgcagatgaccagcagcgctgagaagcccagcgtgtcccagaccagcgagaacagagtggacaatgctgccagcctgaagagccgcagcagcgagggccgccacagaagagacaacatcgacaagcacatcaagacagccaagtgtgtggagaacacagagaacaagaatgtggagttccccaaccagaacttcagcgagctgcaggatgtgatcccagacagccaggccgctgagaagagggaccacaccatcctgcccggggtgctggacaacatctgtggcaacaagatccacagcaagtgggcctgctggacccctgtgaccaacatcgagctgtgcaacaaccagagggccagcaccagcagcggggacaccctgaaccaggacatcgtcatcaacaagaagctgaccaagcagaagagcagcagcagcatcagtgaccacaacagcgagggcaccgggaaggtgaagtacaagaaggagcagacagaccacatcaagattgacaaggccgaggtggaggtgtgcaagaagcacaaccagcagcagaaccaccccaagtacagcggccagaagaacacagaaaatgccaagcagagcgactggcctgtggagagcgagaccaccttcaagtctgtgctgctgaacaagaccatcgaggagagcctcatctacaggaagaagtacatcctgagcaaggatgtgaacacagccacctgtgacaagaaccccagcgccagcaagaatgtgcagagccacaggaaggccgagaaggagctgaccagcgagctgaacagctgggacagcaagcagaagaagatgagggagaagagcaagggcaaggagttcaccaacgtggccgagagcctcatcagccagatcaacaagcgctacaagaccaaggatgacatcaagagcaccaggaagctgaaggagagcctcatcaacagcggcttcagcaacaagcctgtggtgcagctgagcaaggagaaggtgcagaagaagagctacaggaagctgaagaccacctttgtgaatgtgaccagcgagtgccctgtgaatgatgtgtacaacttcaacctgaatggagcagatgaccccatcatcaagctgggcatccaggagttccaggccacagccaaggaggcctgtgccgacaggagcatccggctggtgggccccagaaatcatgatgagctgaagagctctgtgaagaccaaggacaagaagatcatcaccaaccaccagaagaagaacctcttcagtgacacagaaacagagtaccgctgtgatgacagcaagacagacatctcctggctgcgggagcccaagagcaagccccagctgattgactacagcaggaacaagaatgtgaagaaccacaagagcggcaagagccgcagcagcctggagaagggccagcccagcagcaagatgacccccagcaagaacatcaccaagaagatggacaagaccatccctgagggccgcatccggctgcccaggaaggccaccaagaccaagaagtag

SEQ ID NO: 178784 - DNA, 4593 bp, Artificial Sequence
  derived and/or modified sequence
atgcccatccggcccgacctgcagcagctggagaagtgcatcgacgatgctctgcgcaaaaacgacttcaagcctctgaaaacattactgcaaattgacatatgtgaagacgtcaagattaagtgttccaaacagttcttccacaaggtggataatctgatctgccgtgaactgaataaggaggatatccacaatgttagcgcaattctagtgagcgtgggacgctgcgggaaaaatatttcagtgcttggacaggccggtcttctaacgatgatcaagcagggacttatacagaagatggtcgcttggtttgagaaatcgaaagacataatacagtcccaggggaactcaaaagatgaggctgttctgaacatgattgaggacctggtcgatctactactagtgattcacgacgtgtcagatgagggaaaaaaacaggttgtggagtccttcgtaccccgtatatgctccctggtgatcgatagccgggtgaacatctgtattcaacaggagatcattaagaaaatgaacgcgatgctcgacaagatgcctcaagatgccaggaaaatcctgtctaatcaggaaatgttaatcttgatgtctagtatgggagaacgtattctggacgctggggattatgacctgcaggtaggcatcgtggaagcactgtgccgaatgactaccgagaagcagcgtcaggaattagcacatcagtggtttagtatggattttatcgcaaaagccttcaaaaggatcaaggacagcgagttcgagaccgattgcaggattttcctcaatttggtcaatgggatgctcggggataagaggcgggttttcactttcccctgcctctccgcattcctggataagtatgaactgcagatcccgtctgatgagaagctcgaggaattttggattgacttcaacctaggatcccagaccctgagtttctatatcgcaggtgacaatgacgatcaccagtgggaggctgttaccgtgcccgaggagaaagtgcagatctactctatcgaggtgcgtgaatccaagaagctcctgacaattattctaaaaaacaccgtgaagattagcaagcgcgagggcaaggaactcctgctttacttcgatgctagtctcgaaataacgaacgtcacccagaagatttttggcgctactaagcaccgcgagtccattcgcaagcaaggaatcagcgttgctaagaccagcctccatattctgttcgatgcttctggatctcagattctggtccccgagagtcaaattagccccgttggcgaggagttggtgtcgctcaaagagaagagtaagtctcctaaagaatttgcgaagccctcaaaatatattaaaaactcggataaggggaatcgcaacaattcccagcttgaaaagaccacgccatcgaaacgcaagatgagcgaagcttccatgatcgtctccggggccgatagatatacaatgcgctctccagtgctcttctcaaacacaagcattcctcctcggcgaaggaggatcaagccgcccttacagatgaccagttctgctgaaaaaccctcggtgtcacaaacaagtgagaatcgggttgacaacgctgcgtcattaaagtcccggagcagtgaaggcaggcataggcgagataatatcgataaacacatcaaaacagcaaaatgtgtcgaaaatacagaaaataaaaacgtggaattccccaaccagaatttcagcgagctccaggacgtaatccccgatagccaagccgctgagaagagagatcacaccatcctcccgggcgttctggataacatatgtggaaacaaaatccatagcaaatgggcttgctggaccccagtcaccaacatcgagttgtgcaataaccaaagagcgtcaacttcctcaggggacacgttaaaccaggacatcgtaattaataagaagcttaccaagcaaaaaagcagctcttccatttcagaccacaactcggaaggtacaggtaaggtcaaatacaagaaagaacagaccgatcacattaagatcgataaggcagaagtcgaagtgtgcaagaagcataaccaacagcaaaaccacccaaaatatagcggccaaaaaaacaccgaaaacgctaagcagtccgactggcccgtggaatctgagaccactttcaagtcagttctgctgaacaaaacaattgaagaaagccttatttatcggaagaaatatatactatctaaagatgtaaatacagccacatgtgacaagaacccttccgcatccaaaaacgtgcagagccaccgcaaggcagagaaggaactgacatctgagttgaatagttgggacagtaaacagaagaaaatgcgagaaaagtctaaaggcaaggagttcaccaacgtcgcggagtctttaatatctcaaatcaacaaaaggtataaaaccaaagacgacatcaaatccacccggaaacttaaagaatctctgatcaactcaggtttttctaacaagcccgttgttcagctcagtaaggaaaaggtccaaaaaaaatcctatagaaagctgaaaaccacgttcgtgaatgttacgtcagaatgtccagtgaacgatgtctataactttaacctcaacggggccgacgaccccatcattaagcttgggatacaagagttccaggccacggcaaaggaagcatgcgctgatcgttcaatcaggctcgtgggaccaaggaaccacgacgagttgaaaagctccgtgaagactaaggacaagaaaattatcaccaaccatcaaaaaaaaaatctgttctccgacacggagactgagtaccgttgcgatgatagcaagacagatatttcttggctgagggagcccaagagcaagcctcaactcatagactactctaggaataagaacgtgaaaaaccacaaaagtggtaaatctcgttcatcactggaaaagggccagccaagttcaaagatgacaccctccaagaacattacaaagaagatggacaagaccatcccggagggcaggatccggctgcctagaaaggcaacaaagacgaagaaaaactacaaagacctcagcaacagtgagagcgagtgcgaacaagagttctcacacagcttcaaagaaaacatcccggtaaaggaagaaaatatacactcaaggatgaaaaccgtgaaacttcctaaaaagcaacagaaggtcttctgcgccgaaactgaaaaagagctgtcaaagcaatggaaaaatagctccctattaaaggacgctatccgggataattgcctggatttgagtccacgatcactctcaggctcacccagttcgattgaagttacaagatgtatagaaaaaatcacagagaaggattttacacaagactacgactgcatcactaaatctatatcaccgtatcccaagacaagcagcctggagtctctgaacagcaactccggggttggaggaaccatcaagtctcccaaaaacaatgaaaagaatttcctgtgtgcaagcgaatcatgcagccctatcccaagacccctcttccttcctaggcacacacccaccaagtccaatactattgtcaaccgaaagaaaatcagcagccttgtgctcacccaggaaactcagaacagcaacagctacagtgatgtttctagctactctagtgaggagcgattcatggaaatcgagagcccacatataaatgagaactatatccagagcaaacgtgaggaaagccatttggcatcctctctgtctaagtcgtccgaaggtcgtgagaaaacttggtttgatatgccctgtgatgccactcacgtttccggccccacacagcacctgtccagaaagagaatttacatagaggataatttgtctaattcaaatgaagtcgaaatggaggagaaaggcgagcgccgagctaaccttcttccaaagaagttgtgtaagatagaggacgcggaccatcacatccataaaatgagcgaatctgtgtcatctctgtcaaccaacgatttctcaatcccgtgggagacatggcaaaatgaattcgctggaatagagatgacttacgaaacttatgagcgcctgaattccgagttcaaaagacgcaataacatcagacacaaaatgctaagttactttaccacacaatcttggaaaaccgcccaacagcacctaagaaccatgaaccaccagtctcaggacagtcgcattaaaaagctggataaatttcaatttatcatcattgaggagctcgagaattttgaaaaggatagtcagtctttgaaggatcttgaaaaggagttcgtcgatttttgggagaagatattccagaaattctcagcataccaaaaatccgagcagcaacgattgcatttgctgaagactagtttggctaagtccgttttctgtaacacagacagcgaagagactgtatttactagtgagatgtgtctgatgaaagaggatatgaaggtgcttcaggatcgcttactgaaggatatgctggaggaagagcttctgaacgtgcggcgcgagctgatgagcgtgtttatgtcccatgaaaggaacgccaatgtctag

SEQ ID NO: 178785 - DNA, 4593 bp, Artificial Sequence
  derived and/or modified sequence
atgcccatccggcccgacctgcagcagctggagaagtgcatcgacgacgccctgcggaagaacgacttcaagccactcaaaactctgctgcagattgatatttgcgaagatgtgaaaattaagtgtagtaagcagttttttcataaggttgacaacctgatttgtcgcgaactgaataaggaggacattcacaacgtgtccgctatccttgtatccgtgggtagatgcgggaagaacatctccgtgctgggtcaggccggactcctcactatgatcaaacaaggcctgatccaaaaaatggtggcttggtttgagaagtccaaagatattatacagagccaggggaacagtaaagacgaggctgtgctcaatatgattgaggatctcgtggacctgcttctcgttatacatgatgtttcagatgaaggtaagaaacaggtcgttgagagctttgtccctcgcatttgcagtcttgttatcgattcgcgtgtaaacatctgcatacagcaggagatcattaaaaaaatgaatgcaatgctagacaaaatgcctcaagatgctagaaagatactgtcaaaccaggaaatgctaatcctcatgtcaagcatgggagagcggattctcgacgcaggagattatgacttacaggtcggcattgttgaggccctgtgtcggatgaccaccgagaaacaacgtcaggaactcgcccaccagtggttctcgatggactttatcgcgaaggcctttaaacgaataaaagattccgaatttgagacagattgtaggatattcctaaaccttgtgaatgggatgctgggagacaagcgaagggttttcaccttcccctgtctgtctgcattcctggacaagtatgagcttcaaatcccgagcgatgagaagttagaggagttctggatagacttcaacctgggttcacaaacattgtctttctacattgccggtgataatgacgatcaccaatgggaagcagtcactgttccagaggagaaagttcagatttattccattgaggttagggagtccaaaaagctcctaactataatcttgaagaatactgtgaaaattagtaagcgggagggcaaagaacttcttctgtactttgacgcttcgctggagatcactaacgtgacacaaaagatctttggtgcgaccaagcaccgcgaaagtatccgaaaacagggcatcagcgtggcaaaaacatctctccacattctgtttgacgcatctgggagccaaatcctcgtgcctgagtcccagataagcccagtcggagaagagctggtgagtttgaaagaaaagagcaagtcccccaaggaatttgccaagccttccaagtatattaaaaactccgataagggcaatcggaacaatagccaactcgaaaaaacaaccccaagcaagaggaaaatgtcagaggcgtcaatgatcgtgtcaggggctgaccgatatactatgaggagcccagtgctattcagcaatacaagcatccccccccgccgacggcggataaagccaccgttgcagatgacctcttccgcagaaaagcctagtgtctctcagacatctgagaaccgcgtagataatgcggccagcctgaagtctaggagcagcgagggccggcacagaagagataacatagataaacatataaagaccgcaaaatgcgtagagaatacagaaaacaagaacgtggaattccccaaccagaacttttctgaactgcaggacgttatcccggactcccaagccgccgaaaaacgggatcataccattctcccgggggtcctggataatatatgtggaaacaaaatccacagtaaatgggcttgctggacgccagttacgaacatagagctgtgcaataatcaacgcgcgtccacgagttccggcgacaccttaaaccaggatatcgtgattaacaaaaaactcacgaaacagaaatcatcttcttcaatatccgatcataattccgaaggtacaggtaaagtaaaatataaaaaagagcagactgaccatattaaaatcgataaggcggaggtggaagtgtgtaagaagcataaccagcagcagaatcacccaaagtacagtggacagaagaatacagagaacgcaaaacagagtgattggcctgtggagtccgagactacttttaagagcgtactgctgaataaaacaattgaagaatcactgatttaccgtaaaaagtatatactctctaaagatgtaaacactgccacatgtgataaaaatccctccgcgagcaagaatgtgcagtcgcacagaaaagcggaaaaagaattaaccagcgagctgaattcctgggactctaaacagaaaaagatgcgcgagaagtcaaaggggaaagagttcaccaacgttgcagagagcctgatctctcagatcaacaaaagatacaaaaccaaggacgatattaaatctacacgtaagctgaaggaatcactgataaacagcggattttccaacaaaccagtggtgcagctctccaaggagaaggtccagaagaaatcctaccgaaagctgaagaccacctttgttaatgtaacctcagagtgccctgttaatgatgtgtacaacttcaaccttaacggcgctgatgaccccatcattaaactgggtattcaggaatttcaggccaccgccaaagaggcttgcgcggaccgtagcataagattggtgggtccccgaaatcacgatgagcttaaatcgtctgtgaaaacgaaggacaaaaagatcattacaaaccatcagaagaagaatctgttttcggacaccgaaacagaatatcgctgcgacgactcaaagacagacatcagctggttgagagagcccaagtccaagccccagcttatcgactattccaggaacaaaaacgtgaaaaatcacaaatcggggaaatcgcgttcttcactggagaagggtcagccatcctctaagatgaccccctctaaaaacatcacaaagaagatggataaaacaattcccgaaggtcgtattaggctgcctcggaaggcaactaaaacaaaaaagaattacaaagacctgtcaaactccgaaagcgagtgtgaacaggagttttcacattcattcaaggaaaatatcccggtcaaagaagagaatattcactcaaggatgaagaccgtcaaattgcctaagaagcagcaaaaagtgttctgcgccgaaaccgagaaagagctctccaaacagtggaagaactcctccctgctgaaggacgccattagggacaattgtctggatttatcaccgcgaagcctgtctggcagcccctcatcaattgaggtaactaggtgtatagaaaaaatcacggagaaagattttactcaggactacgactgcataactaaatcaatctccccatatcccaagacaagtagtctggaatcactgaatagtaactctggtgttggtggaactataaaatctcccaagaacaatgaaaagaatttcctctgcgccagcgaatcttgctcgccaattcctcgcccgctgtttctcccgcgacacaccccgactaagtccaacaccattgtgaatcgaaagaaaatcagtagtttagtgctgactcaagagacacaaaattcgaatagctatagcgacgtgtcctcctacagctcagaggagaggttcatggaaattgaatcccctcacattaatgagaactatattcaatccaagagagaagagagtcacctggcctcttctctctccaaaagctcggaggggcgagagaagacttggttcgacatgccgtgcgatgccacacatgtgagcgggccaacccagcacctgtcaagaaaaagaatatatattgaggataatttatccaacagcaacgaggtcgagatggaggagaaaggtgaaaggagggctaatctcttaccgaagaaactgtgcaaaatcgaggacgctgaccatcatattcataagatgtcagaaagtgtctccagcctgagcaccaacgatttttccattccatgggagacctggcagaatgaattcgccggcatcgagatgacatatgagacctacgaaagattgaactccgagtttaaaaggagaaacaatatcagacataaaatgttgagttactttactacacagagttggaagaccgctcagcagcaccttcgtactatgaaccaccagtcccaagactcaagaatcaagaagctcgacaagtttcaattcattatcatcgaagagcttgaaaacttcgagaaagatagccaatcactcaaggacctggagaaggagtttgtggacttttgggagaagattttccagaagttcagcgcctaccaaaaatcagagcagcagcggttacacctcctgaagaccagcctggctaagagtgttttttgcaatacagattccgaagagaccgtatttacctccgagatgtgcctaatgaaagaggatatgaaggtattgcaagaccggctgctgaaggatatgctagaagaagagcttctgaacgtgagaagggagttgatgtctgtgttcatgagtcacgaacgcaacgccaatgtctag

SEQ ID NO: 178786 - DNA, 3072 bp, Artificial Sequence
  derived and/or modified sequence
atgcccatccggcccgacctgcagcagctggagaagtgcatcgacgacgctctgcgcaagaatgattttaagcctcttaaaactctgttgcaaatcgatatttgtgaggacgtaaagattaaatgtagcaagcagttcttccataaagttgataacctcatctgcagggagcttaacaaggaggatattcacaacgtgagcgccatccttgtgtccgtagggaggtgtggcaaaaatatttccgtgcttggccaggctggattactcaccatgattaagcaaggcctcatccaaaagatggtggcatggtttgagaagtctaaagatataatccagtcgcagggcaacagtaaggacgaagcagtacttaatatgatagaggacttggttgatctactcttagtgattcacgatgtctcggacgaagggaaaaagcaggttgtcgaaagtttcgtaccaagaatctgctcactggtgatcgactcccgggtcaatatctgcatccagcaggaaatcatcaaaaagatgaacgcaatgcttgacaaaatgccgcaggacgcaaggaaaatcttgagcaaccaagagatgttgatcttaatgagtagcatgggcgagagaattctggacgcgggggactatgatctccaggtgggtatcgttgaagcattgtgtcggatgactactgagaaacaacgacaggaattggctcaccagtggtttagtatggactttatcgctaaggccttcaaaagaatcaaagattctgaattcgaaactgactgtcgtattttcttgaatcttgtgaatgggatgctgggagacaagcgcagagtgttcaccttcccttgtctctcagctttcttagataagtatgaactgcagattcccagcgacgaaaaattagaggaattttggattgacttcaatctgggttcacaaaccctctctttttacatcgccggtgataacgatgatcatcaatgggaagctgttacagttcccgaggagaaggttcaaatctactcaatcgaagtgcgtgagagtaaaaagctgctaacgatcatcctcaaaaatacggtgaagatctcaaagcgagaaggcaaagaactgcttttatattttgatgccagcctcgagataacaaacgtgacacaaaaaatattcggagctaccaagcaccgggaatcaatccggaaacagggtatcagtgttgccaagacctccctgcatattctgttcgacgcctcaggctcgcagatccttgttccagaatcgcaaatctcacccgtaggcgaggagttagtttctctgaaggagaaaagtaagtcccctaaggagttcgccaagccaagcaagtacatcaagaactctgataagggcaatcgtaataattcccaactcgaaaaaactaccccttcgaagcggaagatgtccgaagcgtcaatgattgtcagtggagccgatcgctatacaatgagaagccctgttttgttcagcaacacttcaatcccccctaggaggcggcgtattaagccacctctacaaatgacatccagtgccgaaaaacccagtgtgtcacagacctctgagaacagagtggataatgcagcatctttaaaatcccgaagtagcgaagggcgacacagaagggacaacattgacaaacacatcaagactgccaaatgcgtagaaaataccgaaaataaaaatgtggagtttcccaatcaaaatttctcagagttacaggacgtaattcccgattctcaggctgcagagaagcgcgatcatacaatccttcctggagtcctcgacaatatctgcggtaacaagatccactccaagtgggcttgctggacccctgtgactaacattgagctttgtaacaaccaaagggcttcaacctcgagcggagatactctgaaccaggacatcgtcatcaataagaaattgacaaagcaaaagtcaagcagttccatcagtgaccataacagtgagggcaccggcaaggtgaagtacaagaaagaacagactgatcacatcaagattgacaaagccgaagtggaggtctgcaaaaagcacaatcagcagcagaaccacccaaaatactccggccagaagaataccgagaatgctaaacagtccgactggcccgtggagtccgaaaccacttttaaatccgtcctgctcaataagacaatcgaggagtctctaatctatcggaagaagtacatcttatccaaggacgtcaatactgccacctgcgataagaatcctagtgcatctaaaaatgtgcagtcgcaccggaaagctgagaaggagctgacaagtgaactcaactcttgggactccaaacagaaaaaaatgcgggaaaagtccaagggcaaagagttcactaatgttgctgagtctttaatcagccagataaataagagatataagactaaggacgacatcaagagtacacggaagctaaaggagtccttaatcaacagcggtttcagtaataagccggtcgtgcaactttcaaaagaaaaagttcaaaagaaaagctacaggaaactcaagacaaccttcgttaatgttacgagcgagtgtcccgtaaatgatgtctataacttcaatctaaacggcgccgacgaccccataattaaactcggaattcaggaatttcaagcgaccgcaaaggaagcatgcgcagacagatcgatacgactcgtgggccctcgaaaccacgacgagctgaagagctctgtgaagacaaaggacaagaagatcattactaatcaccagaaaaagaatttattctcagacacagaaactgagtataggtgcgatgattcgaagaccgatatctcatggctcagagagcctaagtccaagccacagctgattgactacagcaggaataaaaatgtcaagaaccacaagagtgggaaatcacggtctagcctggaaaagggacaaccgtctagcaaaatgacccctagtaaaaatatcacaaagaagatggacaaaacaatccccgagggcagaatacgcctgcctcgcaaggctaccaagaccaagaaatag

SEQ ID NO: 178787 - DNA, 4593 bp, Artificial Sequence
  derived and/or modified sequence
atgccgatccggccagatcttcagcaattggaaaagtgcatcgatgacgctttgcgtaaaaacgactttaaaccactaaaaacattattacagattgacatatgtgaagatgtgaagattaaatgctccaaacagttctttcacaaggtggataatcttatatgtcgggagctaaacaaggaagatattcataacgtctccgcgatcctggtaagtgtcgggcgatgcgggaagaatatctccgtccttgggcaggctgggctgctaacgatgattaagcagggactcatccagaagatggtggcttggttcgagaagagtaaggacattattcaaagccaaggtaattctaaggatgaggctgtgttgaatatgatagaggatctggtggatctactattagttatccatgatgtttctgatgaaggaaaaaagcaagtggttgaaagctttgtgccaaggatatgttctctggtgatcgattcccgcgtgaacatttgtatccagcaagagatcattaagaagatgaacgcaatgctggataagatgcctcaggacgcaaggaaaatactgagtaatcaagagatgttgatcctgatgtcctcgatgggtgagaggatcctcgacgctggcgactacgacctgcaagtcggtatcgttgaggccctgtgccggatgacaacagaaaaacaaaggcaggagctggcacaccaatggtttagcatggatttcatagctaaggctttcaagcggataaaagatagtgaattcgaaaccgactgtagaatattcctgaacttagtcaacggcatgttaggtgacaagagacgggtgtttaccttcccctgcctgagtgcgtttttggataagtacgagctgcagatcccgagtgacgaaaagctcgaggagttttggattgacttcaacctgggttctcagactctttcattttatatcgctggcgacaatgatgatcatcagtgggaggctgttaccgtgcctgaagaaaaagtgcagatatatagcatagaggtccgtgagtcgaaaaagttgctgactatcattctcaaaaatacagttaagatttccaaacgggaagggaaggagttactactatacttcgatgccagcttggaaattacgaatgtgacccagaagatcttcggcgcaaccaagcatcgagagtcaattaggaaacagggcatttcagtggcaaagacttccttgcacattctgtttgacgcctctggttcccagattttagttcccgaatctcagatatcacccgtgggggaggaacttgtaagcttgaaagagaaaagcaaaagccctaaggaatttgcaaagccatctaagtatattaaaaatagcgataaaggaaatcgcaacaattcccagttggaaaaaacaacaccctcaaagcggaaaatgagtgaagctagcatgatcgtgagcggcgctgaccgttacactatgcgttcaccagtgctctttagcaatacatctattcctccccgaaggagacgaataaaaccccctctgcagatgacatcaagcgccgaaaagccttccgtgtctcagacaagcgaaaatcgcgtggacaacgcggcttcgctgaaaagcaggtctagcgagggacggcaccgacgggacaacattgataaacatatcaagaccgcaaaatgcgtggaaaacacagagaataagaacgtcgaatttccaaatcaaaatttcagcgagctgcaagatgttatccctgactcccaagccgctgagaaacgggatcacactattctgcctggtgtgctggataacatttgcggaaataagatccacagcaaatgggcgtgttggacgcctgtaacgaatatagagctgtgtaacaaccagcgcgctagcacaagctcaggtgatactctaaatcaggacatcgttattaataagaagctgacaaaacagaagtcgtcttcctctatcagcgatcataattccgagggaacagggaaagtcaaatataaaaaggaacagacggaccatatcaagattgacaaggcggaagttgaggtctgtaagaagcacaatcagcagcagaaccaccctaagtactccggacagaagaacactgagaacgccaagcagtccgactggcctgttgaaagcgagaccacgttcaagtccgtactgttgaataagactatcgaggagtctctgatataccgcaagaagtatatactgagcaaagacgtgaacactgctacttgtgacaaaaatccctctgcaagcaagaacgtccaatcccataggaaagccgagaaagaattgacatcagagctgaacagctgggacagcaagcagaagaagatgcgagagaaatccaaaggcaaggaattcacaaatgtggccgagtcactgatctcacaaatcaacaaacggtacaaaactaaagacgacataaagagcacacgcaagctgaaggaatctctcataaattcaggttttagtaataaacccgtggtgcagctctccaaggagaaggttcagaagaagtcctaccggaagctgaaaacgacattcgtgaacgtcaccagtgaatgtcctgtgaacgacgtgtataactttaacctgaacggagccgacgatcccatcatcaaacttggaatccaagaattccaagcgacagctaaagaagcttgcgccgacaggagcatccgattggtcggcccacggaatcacgacgagctgaagagctcagtgaagactaaggataagaaaataattacaaaccatcagaagaaaaatctcttcagcgatacagaaaccgagtatcgatgtgacgattcaaagaccgacatttcctggctgagagaaccgaaaagcaagccccagttgattgactattctcgtaataagaatgttaaaaaccataagagcggcaagagccgatcttccttagaaaaagggcagcctagctccaagatgactccctcaaagaacatcaccaagaagatggacaagaccattcccgaaggtaggatcagactccccaggaaagccacaaaaacgaagaaaaactataaagacctctctaacagcgagagtgagtgtgagcaagaattcagccatagctttaaggaaaacatcccagtaaaggaagagaatattcactcgcgcatgaagaccgtgaaattgcccaagaaacagcagaaggtcttttgtgcggagacagagaaggaactttccaagcagtggaagaacagtagcctcttaaaagatgcgattagagacaattgccttgatctgtccccacgctctttgtccggatcaccatcctctatcgaggtaaccagatgtatcgaaaaaattacagagaaggatttcacacaagactacgattgtatcactaagtcaatatccccttatcccaaaactagtagcctggagagtttgaattccaatagcggagtcggaggaactattaaatcaccgaaaaataatgaaaagaactttctctgtgccagcgaatcatgcagtcctatccctagacctctgtttctccccagacatacacccaccaagtctaacacgattgttaacagaaaaaaaatatccagcctggtgctgacccaggagacacagaactccaacagctattccgacgtatccagctatagctcagaggagcgatttatggagatagagtccccacacattaatgaaaattacatccagagtaaaagggaggagtcccatctagcctcatcgttgtcaaagtccagcgagggccgtgagaaaacttggtttgatatgccgtgcgatgcaacgcatgtctccggcccaacgcagcaccttagccgaaaacgaatctatattgaggacaatttgtcaaattcaaacgaagtcgaaatggaagaaaaaggagagcggcgtgcaaatctgcttccaaaaaagttgtgcaagatcgaagacgccgatcatcacattcataagatgagcgagtcagtatcttccttaagcaccaatgacttctctataccttgggagacgtggcagaatgagtttgccggaatcgaaatgacatacgagacctacgagcgcctgaattcagagttcaagcgcaggaataacataaggcacaagatgctgtcttatttcacaacccagtcttggaaaaccgctcaacagcatttacggacaatgaaccaccagtcccaggacagccgaattaaaaagttggataagttccagttcattatcatcgaagaattggaaaatttcgagaaagattcgcagtccttaaaggacctggaaaaggagtttgtggatttctgggagaagattttccagaagtttagcgcttaccagaaatcggagcagcagagacttcacctcctgaagacgagtctggccaagtctgtgttctgcaacacagactctgaagagacagtcttcaccagtgagatgtgtctcatgaaagaggacatgaaagtgctgcaggaccgcctcctgaaagatatgcttgaggaggaattattgaacgtcagacgcgaacttatgtctgtatttatgagccacgagcgcaatgctaacgtgtag

SEQ ID NO: 178788 - DNA, 4593 bp, Artificial Sequence
  derived and/or modified sequence
atgcccattcgtcccgatctgcaacagttggagaagtgcatcgacgacgcattgcggaagaacgattttaaacctctgaaaacccttctgcagatcgacatttgcgaggatgtgaaaatcaagtgttctaaacagtttttccataaggtggataaccttatatgcagggaattgaacaaggaagacattcacaatgtctcagccatcctcgtaagtgtcgggagatgtgggaagaatatatctgtgctgggacaggcaggcctgctcactatgataaagcagggtctgatccagaaaatggttgcctggttcgagaaatcgaaggacattatccagtcccaagggaactcaaaggacgaagccgttctcaatatgattgaggatctcgtcgatcttcttctggtgattcacgacgtctctgatgaggggaaaaaacaagtggttgagagctttgtgccacggatttgttccctagtgattgattctcgagtcaacatatgcatccagcaggaaataatcaaaaagatgaacgcaatgctagacaagatgcctcaggatgccaggaaaatattgagcaaccaggaaatgcttatcctgatgtcctctatgggagagcggatcctggacgcaggcgactacgacctccaagttggaattgtggaggcgctgtgccgtatgacgacagagaagcagaggcaagaactggcacaccaatggttcagtatggacttcatagctaaggccttcaagcgcattaaggactcagagtttgagacagactgtagaatctttctaaacttggtcaacggcatgctgggagacaaaaggagagtctttacatttccatgtctttctgctttcctggataagtacgagctgcaaattccaagtgacgagaagctggaggaattctggatcgattttaatctgggctctcagacgctttccttttacatagccggagataatgacgaccatcaatgggaggcagtcacagtgcccgaagaaaaagtgcagatatatagcatcgaagttcgggaatcgaagaaacttcttacaattattctgaagaacaccgtgaaaatctccaagagggagggaaaggagcttctcctgtattttgacgcatcactggagatcactaacgtcacccagaaaatttttggggcaactaagcacagagagagcattcggaagcagggcatcagcgttgccaaaacgtccctgcacatcctcttcgacgcttccggttctcaaatccttgtgccggaatcacaaatttctccagtgggagaggagctggtgagcctgaaagagaagtccaaatcgcctaaggaatttgccaagcctagcaagtacatcaagaattccgacaaaggtaatagaaacaacagccagttggagaagacaacaccgtctaaaaggaagatgagtgaggcatccatgattgtctctggagcagaccgctacaccatgagatccccagtgttgtttagcaacacgtctatacccccacggaggagaagaattaaacccccactacagatgaccagtagcgccgaaaagcccagcgttagtcaaaccagcgagaaccgcgttgacaacgcagcttccttgaagtccaggagcagcgagggacggcaccgccgagacaatattgataagcacatcaagacagctaagtgtgtggaaaacactgagaataaaaatgtggagtttccaaaccagaactttagtgagcttcaggacgtcatccccgactcccaagccgctgagaagagagaccacactatcctgcccggtgtgttagacaacatttgcggaaataagatacattccaagtgggcctgttggaccccggtcacaaatattgagctgtgcaataatcagcgggcatcaaccagtagcggcgataccttgaatcaggatatagttattaataaaaaactgacaaagcagaagtccagctcaagtatctctgaccataacagcgagggaacaggcaaagttaagtacaagaaggaacagactgaccatatcaagattgacaaagcagaagtggaagtgtgcaagaagcacaatcagcagcaaaatcatcctaagtatagtggtcaaaaaaatacagagaatgcaaagcaatccgactggccagtggaatcggagacgacattcaaatctgtgctcctgaacaaaacaatcgaagagagtctcatctataggaaaaaatacatcctgagcaaggatgtgaacacggcaacttgtgataagaatccctcagcaagcaagaacgtgcaatcccaccgtaaggccgagaaggaattgacgtctgagcttaatagttgggatagtaagcagaagaagatgcgcgagaaaagcaagggaaaggagtttaccaatgtggccgagtcgctgatcagccagatcaataagaggtataagactaaggatgacatcaagtccacccggaaattaaaagaatcgctgattaatagcggcttttctaacaagcctgtggtccagttatctaaggagaaggtgcagaagaagtcttatcgcaaactcaagactacattcgtcaatgttacctccgagtgccccgtgaacgatgtttataactttaacttgaatggcgctgacgatcctattattaagctgggaattcaggaatttcaggctactgcgaaagaagcttgtgccgataggtctataagactggttgggccacgaaatcacgatgaactcaaatcatcagtcaaaactaaggacaagaagatcattacaaatcaccagaagaaaaacctgttctccgatactgaaactgaatataggtgtgacgacagtaagaccgacatctcctggctccgcgaaccaaaaagcaagcctcagctgattgactattcccggaataaaaatgtgaaaaatcataaaagcggcaagtccaggtcctccctggagaagggccagccaagctccaagatgactccctccaagaacataacgaagaagatggataaaactatcccggaaggcagaattcgtctccccagaaaggccaccaagaccaaaaagaactacaaggacctcagcaatagtgagtccgagtgcgagcaagaattttcacactcctttaaggaaaacatccccgttaaggaagaaaacattcattcccggatgaagacagttaagctccctaagaaacagcaaaaagtgttctgtgctgagactgagaaagagctgtctaaacaatggaaaaactctagtcttctcaaagacgcaattcgcgacaattgcttagatttaagccccaggagcttgagtggttcaccctcatctatcgaagtcactagatgtattgaaaagatcacagagaaggacttcactcaagactacgattgtattactaagagtatttcgccctaccctaagactagttcactggaatccctgaactcgaattccggcgtcggagggaccataaaatcgcccaagaataacgagaagaacttcctgtgtgcatcagaatcctgctcacctatcccgaggccactgttcctcccgagacatacccctacaaagagcaataccattgtcaacagaaagaagattagcagcttggttctgactcaggagacccagaacagcaacagctattcagatgtctcctcctattcttctgaggaacgcttcatggagatagaatcaccccacataaatgaaaactacattcagtctaagagggaagagagtcacttggcatcgagccttagcaagtcttccgaggggagggagaaaacatggttcgacatgccctgtgatgcaactcacgtgtcaggcccaacgcagcatctatcaagaaagagaatttatatcgaggataatctgtctaacagtaacgaagtagagatggaagaaaaaggagaaaggcgagctaacttactacctaagaaactgtgcaaaatcgaagacgcggaccaccacatccataaaatgtcagagtcagtgtctagtttatcaacaaatgacttcagtattccatgggaaacgtggcagaacgagttcgccggtatcgaaatgacgtacgagacttacgagcggctgaatagcgagttcaagagaagaaacaacattcgtcacaaaatgctcagttacttcacgacccagtcttggaagactgcccagcagcacctccgcacaatgaatcatcagtctcaggacagtcgcatcaaaaagctggacaaatttcagttcataatcatcgaagagctggagaatttcgaaaaggattcccagagtttaaaagacctggagaaggaattcgtggatttctgggagaagatctttcagaagttctctgcctaccaaaaaagcgagcagcaacggcttcatctgttgaagacatccctcgccaagtccgtcttctgcaatacggatagcgaggagactgtgtttacttctgaaatgtgcctgatgaaggaggatatgaaggtccttcaggataggctactgaaggacatgcttgaggaagaacttctgaatgtgaggcgcgagttaatgagcgtgttcatgagtcatgaaagaaacgcaaatgtgtag

SEQ ID NO: 178789 - DNA, 3072 bp, Artificial Sequence
  derived and/or modified sequence
atgccgatccggcctgatctacagcagttggaaaagtgtatagacgatgctctcaggaagaatgattttaagccccttaagacactgctccagatcgacatctgcgaggacgtcaagatcaagtgctctaagcagttctttcacaaagtggataacctaatttgccgcgaactcaacaaggaagacattcataatgtgtcggctatcctggtgtcagtggggcgatgcggaaaaaatatatcagtactcggccaggctggactgctgaccatgattaagcagggtctcatccaaaagatggttgcctggttcgaaaaatcaaaggacattattcagagccaagggaactcgaaggacgaagccgtactgaatatgattgaggaccttgtcgatttactgttggtgatccacgacgtaagcgatgagggcaagaagcaagtggtggagtcctttgtacccaggatttgcagcctcgtgattgacagtcgcgtcaatatctgcattcaacaggagataattaagaaaatgaatgccatgctggacaaaatgcctcaggatgccagaaaaatccttagcaatcaagaaatgctaatcttaatgagctctatgggcgagcggatcctcgacgccggagactacgacctacaagtggggatcgtagaagcattgtgtcgaatgacaaccgaaaaacagcgccaagaactggcccatcagtggttttccatggacttcatagcaaaagccttcaagagaatcaaggattccgagttcgagaccgactgtcgcatctttctgaatttggtgaacggaatgctcggagataaacgcagagtcttcacattcccgtgtctgtccgccttcttagacaaatatgaacttcagatcccctctgatgaaaaactggaggagttctggatcgacttcaacctcggctcacaaacgctgagcttctatattgctggcgacaacgacgaccatcagtgggaggctgtcaccgtccccgaggagaaagtccagatatattccatcgaagtgcgcgagtcaaaaaagctactgactattattctgaaaaacacagtgaagatcagtaaacgtgaagggaaggaactactgctgtattttgatgcctccttggaaattacaaacgtcacacagaaaatcttcggagccacgaagcaccgtgaaagcattaggaagcagggcatctcagtggcgaagacatctttgcatattttgttcgacgccagcgggtcacaaatcttggtgcccgaatctcagataagccctgtcggcgaagaacttgtgagcctgaaggaaaaatctaaaagcccgaaagagttcgctaaaccctccaagtacatcaagaactctgacaagggcaaccggaataactctcagctggagaagaccaccccctctaaacgcaaaatgtctgaagccagtatgatcgtctccggggcagatcgatatactatgcgatcgcccgttttgtttagtaacactagcatcccacctaggagacggcgaattaaacccccactgcagatgaccagttctgccgaaaaaccctccgtgagtcaaacctccgaaaatagagttgacaatgctgccagcttgaaaagtcggtctagcgaaggtaggcacaggcgcgacaacattgataagcacatcaaaacagccaagtgtgtagaaaataccgagaataaaaacgttgagtttccaaatcagaatttcagtgagttacaagatgtcatacccgactcacaggctgccgagaaaagggatcataccatccttcccggtgtgttggacaacatctgtgggaataagatacactcaaagtgggcttgctggacgcccgtcacgaacatcgaactgtgtaacaaccagcgggcaagtacaagcagcggggacacacttaatcaggacatcgtcatcaacaaaaagcttacgaaacagaagtctagtagcagtattagcgatcacaactctgaaggcacaggaaaggtgaagtataaaaaggagcagactgaccacatcaagattgataaggcagaggttgaagtctgtaaaaagcataatcaacagcagaaccaccctaagtacagcggacagaagaatacagagaacgccaagcagagcgactggcccgtggagtcagaaaccactttcaaaagtgtgctcctgaataagacaatcgaagagtctctcatctacagaaaaaagtacatactgagtaaggatgtgaatactgcaacatgtgataaaaatccaagcgcctccaaaaatgttcaatcgcaccggaaagccgaaaaggaattgacaagcgagctcaacagctgggatagtaaacagaaaaagatgcgagagaaaagcaaggggaaagagttcacaaacgtagctgagtcactgatatcccagataaacaagcggtataagactaaggacgatattaaatcgaccagaaagttgaaggagagcttgattaactcgggattctctaataaacctgtcgtgcagctgtcgaaagaaaaagtccagaagaagagttatagaaagcttaagaccacattcgttaacgtaacatccgaatgccctgttaacgatgtttataattttaacctgaatggcgctgatgatccgataataaagctgggtatccaggaattccaagcaacagccaaggaggcttgcgcagaccgcagcatacgtctggttgggcctcgcaaccatgacgagctgaagagcagcgtgaagaccaaggataagaagattatcaccaatcaccaaaagaagaacttgttttctgatactgaaacagagtacaggtgcgacgactcaaagacggacataagttggcttagggagcctaagtctaagccgcaattaatcgattattccagaaataagaatgtcaagaatcacaagagcggaaagtcgcggagctcactcgaaaagggacagcctagttccaagatgacaccgagcaagaacatcacaaaaaagatggacaagactatccccgagggacgcatcaggctgcctcgcaaggcgacgaagaccaaaaaatag

SEQ ID NO: 178790 - DNA, 5559 bp, Artificial Sequence
  derived and/or modified sequence
tgcggcggtccctgaggcgcagagttgcgacgctcggcggcatagggggcggctccaccgacactacgcggacgcctcctgccgcagatacacaatcatcatcttactagttctctgtgttgctcgctaaccagtcccccagttcagtagactggagcccagagcctgcttacttgtcaggtgtttattttgtcttgctttttttttttttttaaatgaagtcaaaatgccaataagaccagatctccagcagttggaaaaatgcattgatgatgctttaagaaaaaatgatttcaaacctttgaaaacacttttgcaaattgatatttgtgaagatgtgaagattaaatgcagcaaacagtttttccacaaggtggacaaccttatatgcagggaacttaataaagaggatatccacaatgtttcagccattttggtttctgttggaagatgtggcaaaaatatcagtgtattggggcaagctggacttctaacgatgataaaacaaggactaatacaaaagatggttgcctggtttgaaaaatccaaggacattattcagagtcaaggaaattcaaaagatgaagctgttctaaatatgatagaagacttagttgatcttctgctggtcatacatgatgtcagtgatgaaggtaaaaaacaagtagtggaaagtttcgtacctcgcatttgttccctggttattgactcaagagtgaatatttgtattcagcaagagattataaaaaaaatgaatgctatgcttgacaaaatgcctcaagatgcccggaaaatactctctaaccaagaaatgttaattctcatgagtagtatgggagaaaggattttagatgctggagattatgacttacaggtaggcattgtagaagctttgtgtagaatgaccacagaaaaacaaagacaagaactggcacatcagtggttttcaatggattttattgctaaggcatttaaaagaattaaggactctgaatttgaaacagattgcaggatatttctcaaccttgtaaatggcatgcttggagacaaaagaagggtctttacatttccttgtttatcagcatttcttgataaatatgagctgcaaataccatcagatgaaaaacttgaggaattttggattgattttaatcttgggagtcagactctctcattctacattgctggagataatgatgatcatcaatgggaagcagttactgtgccagaggaaaaagtacaaatatacagcattgaagtgagagaatcaaagaagctactgacaataattctgaaaaatacagtaaaaattagcaaaagagaagggaaagaattgcttttgtattttgacgcatcactagaaatcactaatgtaactcaaaaaatttttggtgcaactaaacatagggaatctatcagaaaacaaggtatttcagttgccaaaacgtcgctgcatatactttttgacgcaagtggatcacagattctagtgccagaaagtcaaatctcaccagtcggagaagagctcgttagtttaaaggaaaaatcaaagtccccaaaggaatttgctaaaccttcaaaatatatcaaaaacagtgacaaagggaatagaaataatagtcagcttgagaaaactactcctagcaaaagaaaaatgtctgaagcatcaatgattgtttctggtgcagatagatacactatgagaagtccagtgcttttcagcaacacatcaataccaccacgaagaagaagaattaaaccaccactgcaaatgacgagctctgcagagaaacctagtgtttctcaaacatcagaaaatagagtggataatgctgcatcactgaaatctagatcatcagaaggaagacatagaagagataatatagacaaacatatcaaaactgctaagtgtgtagaaaacacagaaaataagaatgttgaattcccaaaccaaaattttagtgaactccaggatgttataccagattcacaggcagcggaaaaaagagatcatactatattacctggtgttttagacaacatctgtggaaataaaatacacagcaaatgggcatgttggacacctgtaacaaacattgaactatgtaataaccaaagagcaagtacttcgtcaggagacacattgaatcaagatattgttataaataaaaaacttactaaacaaaaatcatcctcttcaatatctgatcataattctgaaggaacaggaaaagtgaaatataagaaagaacaaaccgaccatatcaaaatagataaagcagaagtagaagtttgcaagaaacacaatcagcaacaaaatcatcctaaatattcagggcagaaaaatactgaaaatgccaagcagagtgattggcctgttgaatctgaaactacttttaaatcggttctcctaaataagacaattgaagaatcgctgatatataggaagaaatacatattgtcaaaagatgtgaatactgctacttgcgataaaaatccatctgctagcaaaaatgtgcaaagtcatagaaaagcagagaaagaattgacttctgagcttaattcctgggattcgaaacaaaaaaaaatgagagaaaagtcaaaagggaaagaatttaccaatgtagcagaatccttgataagccaaatcaataaaagatacaaaacaaaagatgacatcaagtctacaagaaaattaaaggagtctttgattaacagtggtttttcaaacaaacctgttgtacaactcagtaaggaaaaagttcagaaaaaaagctacagaaaactgaagactacctttgttaatgttacttctgaatgcccagtgaatgatgtttacaattttaatttgaatggagctgatgaccctatcataaaacttggaatccaagagtttcaagctacagctaaagaagcttgtgcggataggtcaattagattggtaggtccaaggaatcatgatgaacttaaatcttctgtcaaaacaaaagataaaaaaattataacaaatcatcaaaagaaaaatctgtttagtgatactgaaacagagtacagatgtgatgacagcaagactgatattagctggctaagagaaccgaaatcaaaaccacagctaatagactatagcagaaataaaaatgtgaagaatcataaaagtggaaaatcaagatcatccttggaaaagggacagccaagctctaaaatgacacccagtaaaaatatcacaaaaaagatggacaagacaattccggaaggaagaatcagacttccacgaaaagcaaccaaaacaaaaaaaaactataaagatctctcaaattcagaatcagagtgtgaacaagaattttcacattcatttaaagagaacataccagtaaaggaggagaatatccattccagaatgaaaacggtaaagctaccaaagaaacaacagaaagtcttctgtgctgaaacagaaaaggaactatcaaaacaatggaaaaactcatctctactaaaagatgctatacgagataattgccttgacttatctcccagatctttatctggcagtccatcatctatagaagtaacgagatgtatagagaaaataacagaaaaggattttactcaggattatgactgcataacaaaatctatatcaccttatccaaaaacttcatcacttgaatccttaaatagtaacagtggagttggaggtacaataaagtcacccaaaaacaatgagaaaaacttcctgtgtgcaagtgaaagttgttcaccaattccacgaccactgtttttgcccagacatactccaactaagagtaatactattgtaaatagaaaaaaaataagttctctggtacttacacaagaaacacaaaacagtaacagctattcagatgtaagcagttatagttcagaagaacggtttatggaaattgaatctccacatatcaatgaaaattatatacaaagcaaaagagaggaaagtcatttagcatcttcattatccaagtctagtgaaggaagagagaaaacgtggtttgacatgccctgtgatgctactcatgtatcaggccccacccaacatcttagtcgcaaaagaatatatatagaagataatctaagtaattccaatgaagtagaaatggaagagaaaggagaaaggagagcaaacttgcttcccaaaaaactgtgtaaaattgaagatgcagatcatcatatccacaaaatgtctgaaagtgtatcttcattatcaacaaatgacttttctattccttgggagacctggcaaaatgaatttgcagggatagagatgacttatgagacttacgagaggctcaattcagaatttaagagaaggaataatatccgacataaaatgttgagttattttactacgcagtcttggaaaacagctcagcaacatctgagaacaatgaatcatcaaagtcaggactctaggattaaaaaacttgataaattccaattcattatcatagaggagctggagaattttgaaaaagattcacagtctttaaaagatttggaaaaggaatttgtggacttttgggaaaagatatttcagaagttcagtgcatatcaaaaaagcgaacaacagaggcttcatcttttgaaaacttcattggctaaaagtgtcttctgtaatactgatagtgaagaaactgtttttacatccgagatgtgtttgatgaaagaagatatgaaagtgctgcaagacaggcttcttaaggacatgctagaagaggagcttcttaatgtacgcagagaactgatgtcagtattcatgtctcatgaaagaaatgctaatgtgtgaaatctagtttttatcaccatactttatctaattattattctctgtatataactgaggaaataagaatagtcctacaaagagaaaaatatacatgtcaccgaagcaagtgtaccctttataggaaccctcaaattaaaaaaaaatgtcttttaatggatgagagggaaccactataacatgagtccaagcccagaagacttctgtctatacaatatttttttttaattttggagataaaagctttaagaaactttttgagttaattatactcataaaatgagtttctttaataaattaaattttattgtgtaaaatgtattattacataaaatgtgtttttgaatcaatgcagtttggggatgaatataattaaaatatgtttaataacttagaattcaactaataaaaatttagccacacttacaagggggaggaagtccctagtttaaaatgtataactgagtggtagatcagtactttcagcacactgttggaaacatttattcagatatggctctaatgtattaggaagcactaaatggcctaaaaaagctactacattgcctaaatatgttaattcaatatagaagtcctatttcataaccaggctgtttgacaaatacttttaatctagtagtcattgtaatatcttgctagattaatttataaaaatgagtatacatttgatttgcttttaatgaagttgaaataaatgcttatgtcacttgaataaatataaa

SEQ ID NO: 178791 - DNA, 5477 bp, Artificial Sequence
  derived and/or modified sequence
atacacaatcatcatcttactagttctctgtgttgctcgctaaccagtcccccagttcagtagactggagcccagagcctgcttacttgtcaggtgtttattttgtcttgctttttttttttttttaaatgaagtcaaaatgccaataagaccagatctccagcagttggaaaaatgcattgatgatgctttaagaaaaaatgatttcaaacctttgaaaacacttttgcaaattgatatttgtgaagatgtgaagattaaatgcagcaaacagtttttccacaaggtggacaaccttatatgcagggaacttaataaagaggatatccacaatgtttcagccattttggtttctgttggaagatgtggcaaaaatatcagtgtattggggcaagctggacttctaacgatgataaaacaaggactaatacaaaagatggttgcctggtttgaaaaatccaaggacattattcagagtcaaggaaattcaaaagatgaagctgttctaaatatgatagaagacttagttgatcttctgctggtcatacatgatgtcagtgatgaaggtaaaaaacaagtagtggaaagtttcgtacctcgcatttgttccctggttattgactcaagagtgaatatttgtattcagcaagagattataaaaaaaatgaatgctatgcttgacaaaatgcctcaagatgcccggaaaatactctctaaccaagaaatgttaattctcatgagtagtatgggagaaaggattttagatgctggagattatgacttacaggtaggcattgtagaagctttgtgtagaatgaccacagaaaaacaaagacaagaactggcacatcagtggttttcaatggattttattgctaaggcatttaaaagaattaaggactctgaatttgaaacagattgcaggatatttctcaaccttgtaaatggcatgcttggagacaaaagaagggtctttacatttccttgtttatcagcatttcttgataaatatgagctgcaaataccatcagatgaaaaacttgaggaattttggattgattttaatcttgggagtcagactctctcattctacattgctggagataatgatgatcatcaatgggaagcagttactgtgccagaggaaaaagtacaaatatacagcattgaagtgagagaatcaaagaagctactgacaataattctgaaaaatacagtaaaaattagcaaaagagaagggaaagaattgcttttgtattttgacgcatcactagaaatcactaatgtaactcaaaaaatttttggtgcaactaaacatagggaatctatcagaaaacaaggtatttcagttgccaaaacgtcgctgcatatactttttgacgcaagtggatcacagattctagtgccagaaagtcaaatctcaccagtcggagaagagctcgttagtttaaaggaaaaatcaaagtccccaaaggaatttgctaaaccttcaaaatatatcaaaaacagtgacaaagggaatagaaataatagtcagcttgagaaaactactcctagcaaaagaaaaatgtctgaagcatcaatgattgtttctggtgcagatagatacactatgagaagtccagtgcttttcagcaacacatcaataccaccacgaagaagaagaattaaaccaccactgcaaatgacgagctctgcagagaaacctagtgtttctcaaacatcagaaaatagagtggataatgctgcatcactgaaatctagatcatcagaaggaagacatagaagagataatatagacaaacatatcaaaactgctaagtgtgtagaaaacacagaaaataagaatgttgaattcccaaaccaaaattttagtgaactccaggatgttataccagattcacaggcagcggaaaaaagagatcatactatattacctggtgttttagacaacatctgtggaaataaaatacacagcaaatgggcatgttggacacctgtaacaaacattgaactatgtaataaccaaagagcaagtacttcgtcaggagacacattgaatcaagatattgttataaataaaaaacttactaaacaaaaatcatcctcttcaatatctgatcataattctgaaggaacaggaaaagtgaaatataagaaagaacaaaccgaccatatcaaaatagataaagcagaagtagaagtttgcaagaaacacaatcagcaacaaaatcatcctaaatattcagggcagaaaaatactgaaaatgccaagcagagtgattggcctgttgaatctgaaactacttttaaatcggttctcctaaataagacaattgaagaatcgctgatatataggaagaaatacatattgtcaaaagatgtgaatactgctacttgcgataaaaatccatctgctagcaaaaatgtgcaaagtcatagaaaagcagagaaagaattgacttctgagcttaattcctgggattcgaaacaaaaaaaaatgagagaaaagtcaaaagggaaagaatttaccaatgtagcagaatccttgataagccaaatcaataaaagatacaaaacaaaagatgacatcaagtctacaagaaaattaaaggagtctttgattaacagtggtttttcaaacaaacctgttgtacaactcagtaaggaaaaagttcagaaaaaaagctacagaaaactgaagactacctttgttaatgttacttctgaatgcccagtgaatgatgtttacaattttaatttgaatggagctgatgaccctatcataaaacttggaatccaagagtttcaagctacagctaaagaagcttgtgcggataggtcaattagattggtaggtccaaggaatcatgatgaacttaaatcttctgtcaaaacaaaagataaaaaaattataacaaatcatcaaaagaaaaatctgtttagtgatactgaaacagagtacagatgtgatgacagcaagactgatattagctggctaagagaaccgaaatcaaaaccacagctaatagactatagcagaaataaaaatgtgaagaatcataaaagtggaaaatcaagatcatccttggaaaagggacagccaagctctaaaatgacacccagtaaaaatatcacaaaaaagatggacaagacaattccggaaggaagaatcagacttccacgaaaagcaaccaaaacaaaaaaaaactataaagatctctcaaattcagaatcagagtgtgaacaagaattttcacattcatttaaagagaacataccagtaaaggaggagaatatccattccagaatgaaaacggtaaagctaccaaagaaacaacagaaagtcttctgtgctgaaacagaaaaggaactatcaaaacaatggaaaaactcatctctactaaaagatgctatacgagataattgccttgacttatctcccagatctttatctggcagtccatcatctatagaagtaacgagatgtatagagaaaataacagaaaaggattttactcaggattatgactgcataacaaaatctatatcaccttatccaaaaacttcatcacttgaatccttaaatagtaacagtggagttggaggtacaataaagtcacccaaaaacaatgagaaaaacttcctgtgtgcaagtgaaagttgttcaccaattccacgaccactgtttttgcccagacatactccaactaagagtaatactattgtaaatagaaaaaaaataagttctctggtacttacacaagaaacacaaaacagtaacagctattcagatgtaagcagttatagttcagaagaacggtttatggaaattgaatctccacatatcaatgaaaattatatacaaagcaaaagagaggaaagtcatttagcatcttcattatccaagtctagtgaaggaagagagaaaacgtggtttgacatgccctgtgatgctactcatgtatcaggccccacccaacatcttagtcgcaaaagaatatatatagaagataatctaagtaattccaatgaagtagaaatggaagagaaaggagaaaggagagcaaacttgcttcccaaaaaactgtgtaaaattgaagatgcagatcatcatatccacaaaatgtctgaaagtgtatcttcattatcaacaaatgacttttctattccttgggagacctggcaaaatgaatttgcagggatagagatgacttatgagacttacgagaggctcaattcagaatttaagagaaggaataatatccgacataaaatgttgagttattttactacgcagtcttggaaaacagctcagcaacatctgagaacaatgaatcatcaaagtcaggactctaggattaaaaaacttgataaattccaattcattatcatagaggagctggagaattttgaaaaagattcacagtctttaaaagatttggaaaaggaatttgtggacttttgggaaaagatatttcagaagttcagtgcatatcaaaaaagcgaacaacagaggcttcatcttttgaaaacttcattggctaaaagtgtcttctgtaatactgatagtgaagaaactgtttttacatccgagatgtgtttgatgaaagaagatatgaaagtgctgcaagacaggcttcttaaggacatgctagaagaggagcttcttaatgtacgcagagaactgatgtcagtattcatgtctcatgaaagaaatgctaatgtgtgaaatctagtttttatcaccatactttatctaattattattctctgtatataactgaggaaataagaatagtcctacaaagagaaaaatatacatgtcaccgaagcaagtgtaccctttataggaaccctcaaattaaaaaaaaatgtcttttaatggatgagagggaaccactataacatgagtccaagcccagaagacttctgtctatacaatatttttttttaattttggagataaaagctttaagaaactttttgagttaattatactcataaaatgagtttctttaataaattaaattttattgtgtaaaatgtattattacataaaatgtgtttttgaatcaatgcagtttggggatgaatataattaaaatatgtttaataacttagaattcaactaataaaaatttagccacacttacaagggggaggaagtccctagtttaaaatgtataactgagtggtagatcagtactttcagcacactgttggaaacatttattcagatatggctctaatgtattaggaagcactaaatggcctaaaaaagctactacattgcctaaatatgttaattcaatatagaagtcctatttcataaccaggctgtttgacaaatacttttaatctagtagtcattgtaatatcttgctagattaatttataaaaatgagtatacatttgatttgcttttaatgaagttgaaataaatgcttatgtcacttgaataaatataaatcatt

SEQ ID NO: 178792 - DNA, 3341 bp, Artificial Sequence
  derived and/or modified sequence
tgcagagttcgcggcgagggtggctcgcgcaggcgcgaggctccccatcagcacctgcctggccagcctcggcctcggggatgggaaatgggcgctcggagccgcccccgcgcgtgggcgactcggtcaagatacacaatcatcatcttactagttctctgtgttgctcgctaaccagtcccccagttcagtagactggagcccagagcctgcttacttgtcaggtgtttattttgtcttgctttttttttttttttaaatgaagtcaaaatgccaataagaccagatctccagcagttggaaaaatgcattgatgatgctttaagaaaaaatgatttcaaacctttgaaaacacttttgcaaattgatatttgtgaagatgtgaagattaaatgcagcaaacagtttttccacaaggtggacaaccttatatgcagggaacttaataaagaggatatccacaatgtttcagccattttggtttctgttggaagatgtggcaaaaatatcagtgtattggggcaagctggacttctaacgatgataaaacaaggactaatacaaaagatggttgcctggtttgaaaaatccaaggacattattcagagtcaaggaaattcaaaagatgaagctgttctaaatatgatagaagacttagttgatcttctgctggtcatacatgatgtcagtgatgaaggtaaaaaacaagtagtggaaagtttcgtacctcgcatttgttccctggttattgactcaagagtgaatatttgtattcagcaagagattataaaaaaaatgaatgctatgcttgacaaaatgcctcaagatgcccggaaaatactctctaaccaagaaatgttaattctcatgagtagtatgggagaaaggattttagatgctggagattatgacttacaggtaggcattgtagaagctttgtgtagaatgaccacagaaaaacaaagacaagaactggcacatcagtggttttcaatggattttattgctaaggcatttaaaagaattaaggactctgaatttgaaacagattgcaggatatttctcaaccttgtaaatggcatgcttggagacaaaagaagggtctttacatttccttgtttatcagcatttcttgataaatatgagctgcaaataccatcagatgaaaaacttgaggaattttggattgattttaatcttgggagtcagactctctcattctacattgctggagataatgatgatcatcaatgggaagcagttactgtgccagaggaaaaagtacaaatatacagcattgaagtgagagaatcaaagaagctactgacaataattctgaaaaatacagtaaaaattagcaaaagagaagggaaagaattgcttttgtattttgacgcatcactagaaatcactaatgtaactcaaaaaatttttggtgcaactaaacatagggaatctatcagaaaacaaggtatttcagttgccaaaacgtcgctgcatatactttttgacgcaagtggatcacagattctagtgccagaaagtcaaatctcaccagtcggagaagagctcgttagtttaaaggaaaaatcaaagtccccaaaggaatttgctaaaccttcaaaatatatcaaaaacagtgacaaagggaatagaaataatagtcagcttgagaaaactactcctagcaaaagaaaaatgtctgaagcatcaatgattgtttctggtgcagatagatacactatgagaagtccagtgcttttcagcaacacatcaataccaccacgaagaagaagaattaaaccaccactgcaaatgacgagctctgcagagaaacctagtgtttctcaaacatcagaaaatagagtggataatgctgcatcactgaaatctagatcatcagaaggaagacatagaagagataatatagacaaacatatcaaaactgctaagtgtgtagaaaacacagaaaataagaatgttgaattcccaaaccaaaattttagtgaactccaggatgttataccagattcacaggcagcggaaaaaagagatcatactatattacctggtgttttagacaacatctgtggaaataaaatacacagcaaatgggcatgttggacacctgtaacaaacattgaactatgtaataaccaaagagcaagtacttcgtcaggagacacattgaatcaagatattgttataaataaaaaacttactaaacaaaaatcatcctcttcaatatctgatcataattctgaaggaacaggaaaagtgaaatataagaaagaacaaaccgaccatatcaaaatagataaagcagaagtagaagtttgcaagaaacacaatcagcaacaaaatcatcctaaatattcagggcagaaaaatactgaaaatgccaagcagagtgattggcctgttgaatctgaaactacttttaaatcggttctcctaaataagacaattgaagaatcgctgatatataggaagaaatacatattgtcaaaagatgtgaatactgctacttgcgataaaaatccatctgctagcaaaaatgtgcaaagtcatagaaaagcagagaaagaattgacttctgagcttaattcctgggattcgaaacaaaaaaaaatgagagaaaagtcaaaagggaaagaatttaccaatgtagcagaatccttgataagccaaatcaataaaagatacaaaacaaaagatgacatcaagtctacaagaaaattaaaggagtctttgattaacagtggtttttcaaacaaacctgttgtacaactcagtaaggaaaaagttcagaaaaaaagctacagaaaactgaagactacctttgttaatgttacttctgaatgcccagtgaatgatgtttacaattttaatttgaatggagctgatgaccctatcataaaacttggaatccaagagtttcaagctacagctaaagaagcttgtgcggataggtcaattagattggtaggtccaaggaatcatgatgaacttaaatcttctgtcaaaacaaaagataaaaaaattataacaaatcatcaaaagaaaaatctgtttagtgatactgaaacagagtacagatgtgatgacagcaagactgatattagctggctaagagaaccgaaatcaaaaccacagctaatagactatagcagaaataaaaatgtgaagaatcataaaagtggaaaatcaagatcatccttggaaaagggacagccaagctctaaaatgacacccagtaaaaatatcacaaaaaagatggacaagacaattccggaaggaagaatcagacttccacgaaaagcaaccaaaacaaaaaaaaa

SEQ ID NO: 178793 - protein, 551 aa, Artificial Sequence
  derived and/or modified sequence
MHLQMREDMAKYRRMSGVRPQSFRDLETPPHWAAYDTGLELLGRQEAGLALPRLEEALQGSLAQMESCRADCEGPEEQQGAEEEEDGAASQGGLYEAIAGHWIQVLQCRQRCVGETATRPGRSFPVPDFLPNQLRRLHEAHAQVGNLSQAIENVLSVLLFYPEDEAAKRALNQYQAQLGEPRPGLGPREDIQRFILRSLGEKRQLYYAMEHLGTSFKDPDPWTPAALIPEALREKLREDQEKRPWDHEPVKPKPLTYWKDVLLLEGVTLTQDSRQLNGSERAVLDGLLTPAECGVLLQLAKDAAGAGARSGYRGRRSPHTPHERFEGLTVLKAAQLARAGTVGSQGAKLLLEVSERVRTLTQAYFSPERPLHLSFTHLVCRSAIEGEQEQRMDLSHPVHADNCVLDPDTGECWREPPAYTYRDYSGLLYLNDDFQGGDLFFTEPNALTVTARVRPRCGRLVAFSSGVENPHGVWAVTRGRRCALALWHTWAPEHREQEWIEAKELLQESQEEEEEEEEEMPSKDPSPEPPSRRHQRVQDKTGRAPRVREEL

SEQ ID NO: 178794 - protein, 735 aa, Artificial Sequence
  derived and/or modified sequence
MLRLLRPLLLLLLLPPPGSPEPPGLTQLSPGAPPQAPDLLYADGLRAYAAGAWAPAVALLREALRSQAALGRVRLDCGASCAADPGAALPAVLLGAPEPDSGPGPTQGSWERQLLRAALRRADCLTQCAARRLGPGGAARRVGSALRDAFRRREPYNYLQRAYYQLKKLDLAAAAAHTFFVANPMHLQMREDMAKYRRMSGVRPQSFRDLETPPHWAAYDTGLELLGRQEAGLALPRLEEALQGSLAQMESCRADCEGPEEQQGAEEEEDGAASQGGLYEAIAGHWIQVLQCRQRCVGETATRPGRSFPVPDFLPNQLRRLHEAHAQVGNLSQAIENVLSVLLFYPEDEAAKRALNQYQAQLGEPRPGLGPREDIQRFILRSLGEKRQLYYAMEHLGTSFKDPDPWTPAALIPEALREKLREDQEKRPWDHEPVKPKPLTYWKDVLLLEGVTLTQDSRQLNGSERAVLDGLLTPAECGVLLQLAKDAAGAGARSGYRGRRSPHTPHERFEGLTVLKAAQLARAGTVGSQGAKLLLEVSERVRTLTQAYFSPERPLHLSFTHLVCRSAIEGEQEQRMDLSHPVHADNCVLDPDTGECWREPPAYTYRDYSGLLYLNDDFQGGDLFFTEPNALTVTARVRPRCGRLVAFSSGVENPHGVWAVTRGRRCALALWHTWAPEHREQEWIEAKELLQESQEEEEEEEEEMPSKDPSPEPPSRRHQRVQDKTGRAPRVREEL

SEQ ID NO: 178795 - protein, 163 aa, Artificial Sequence
  derived and/or modified sequence
MLRLLRPLLLLLLLPPPGSPEPPGLTQLSPGAPPQAPDLLYLNDDFQGGDLFFTEPNALTVTARVRPRCGRLVAFSSGVENPHGVWAVTRGRRCALALWHTWAPEHREQEWIEAKELLQESQEEEEEEEEEMPSKDPSPEPPSRRHQRVQDKTGRAPRVREEL

SEQ ID NO: 178796 - DNA, 1656 bp, Artificial Sequence
  derived and/or modified sequence
atgcacctgcagatgagagaggacatggccaagtacagaagaatgagcggcgtgagaccccagagcttcagagacctggagacccccccccactgggccgcctacgacaccggcctggagctgctgggcagacaggaggccggcctggccctgcccagactggaggaggccctgcagggcagcctggcccagatggagagctgcagagccgactgcgagggccccgaggagcagcagggcgccgaggaggaggaggacggcgccgccagccagggcggcctgtacgaggccatcgccggccactggatccaggtgctgcagtgcagacagagatgcgtgggcgagaccgccaccagacccggcagaagcttccccgtgcccgacttcctgcccaaccagctgagaagactgcacgaggcccacgcccaggtgggcaacctgagccaggccatcgagaacgtgctgagcgtgctgctgttctaccccgaggacgaggccgccaagagagccctgaaccagtaccaggcccagctgggcgagcccagacccggcctgggccccagagaggacatccagagattcatcctgagaagcctgggcgagaagagacagctgtactacgccatggagcacctgggcaccagcttcaaggaccccgacccctggacccccgccgccctgatccccgaggccctgagagagaagctgagagaggaccaggagaagagaccctgggaccacgagcccgtgaagcccaagcccctgacctactggaaggacgtgctgctgctggagggcgtgaccctgacccaggacagcagacagctgaacggcagcgagagagccgtgctggacggcctgctgacccccgccgagtgcggcgtgctgctgcagctggccaaggacgccgccggcgccggcgccagaagcggctacagaggcagaagaagcccccacaccccccacgagagattcgagggcctgaccgtgctgaaggccgcccagctggccagagccggcaccgtgggcagccagggcgccaagctgctgctggaggtgagcgagagagtgagaaccctgacccaggcctacttcagccccgagagacccctgcacctgagcttcacccacctggtgtgcagaagcgccatcgagggcgagcaggagcagagaatggacctgagccaccccgtgcacgccgacaactgcgtgctggaccccgacaccggcgagtgctggagagagccccccgcctacacctacagagactacagcggcctgctgtacctgaacgacgacttccagggcggcgacctgttcttcaccgagcccaacgccctgaccgtgaccgccagagtgagacccagatgcggcagactggtggccttcagcagcggcgtggagaacccccacggcgtgtgggccgtgaccagaggcagaagatgcgccctggccctgtggcacacctgggcccccgagcacagagagcaggagtggatcgaggccaaggagctgctgcaggagagccaggaggaggaggaggaggaggaggaggagatgcccagcaaggaccccagccccgagccccccagcagaagacaccagagagtgcaggacaagaccggcagagcccccagagtgagagaggagctgtag

SEQ ID NO: 178797 - DNA, 2208 bp, Artificial Sequence
  derived and/or modified sequence
atgctgagactgctgagacccctgctgctgctgctgctgctgcccccccccggcagccccgagccccccggcctgacccagctgagccccggcgcccccccccaggcccccgacctgctgtacgccgacggcctgagagcctacgccgccggcgcctgggcccccgccgtggccctgctgagagaggccctgagaagccaggccgccctgggcagagtgagactggactgcggcgccagctgcgccgccgaccccggcgccgccctgcccgccgtgctgctgggcgcccccgagcccgacagcggccccggccccacccagggcagctgggagagacagctgctgagagccgccctgagaagagccgactgcctgacccagtgcgccgccagaagactgggccccggcggcgccgccagaagagtgggcagcgccctgagagacgccttcagaagaagagagccctacaactacctgcagagagcctactaccagctgaagaagctggacctggccgccgccgccgcccacaccttcttcgtggccaaccccatgcacctgcagatgagagaggacatggccaagtacagaagaatgagcggcgtgagaccccagagcttcagagacctggagacccccccccactgggccgcctacgacaccggcctggagctgctgggcagacaggaggccggcctggccctgcccagactggaggaggccctgcagggcagcctggcccagatggagagctgcagagccgactgcgagggccccgaggagcagcagggcgccgaggaggaggaggacggcgccgccagccagggcggcctgtacgaggccatcgccggccactggatccaggtgctgcagtgcagacagagatgcgtgggcgagaccgccaccagacccggcagaagcttccccgtgcccgacttcctgcccaaccagctgagaagactgcacgaggcccacgcccaggtgggcaacctgagccaggccatcgagaacgtgctgagcgtgctgctgttctaccccgaggacgaggccgccaagagagccctgaaccagtaccaggcccagctgggcgagcccagacccggcctgggccccagagaggacatccagagattcatcctgagaagcctgggcgagaagagacagctgtactacgccatggagcacctgggcaccagcttcaaggaccccgacccctggacccccgccgccctgatccccgaggccctgagagagaagctgagagaggaccaggagaagagaccctgggaccacgagcccgtgaagcccaagcccctgacctactggaaggacgtgctgctgctggagggcgtgaccctgacccaggacagcagacagctgaacggcagcgagagagccgtgctggacggcctgctgacccccgccgagtgcggcgtgctgctgcagctggccaaggacgccgccggcgccggcgccagaagcggctacagaggcagaagaagcccccacaccccccacgagagattcgagggcctgaccgtgctgaaggccgcccagctggccagagccggcaccgtgggcagccagggcgccaagctgctgctggaggtgagcgagagagtgagaaccctgacccaggcctacttcagccccgagagacccctgcacctgagcttcacccacctggtgtgcagaagcgccatcgagggcgagcaggagcagagaatggacctgagccaccccgtgcacgccgacaactgcgtgctggaccccgacaccggcgagtgctggagagagccccccgcctacacctacagagactacagcggcctgctgtacctgaacgacgacttccagggcggcgacctgttcttcaccgagcccaacgccctgaccgtgaccgccagagtgagacccagatgcggcagactggtggccttcagcagcggcgtggagaacccccacggcgtgtgggccgtgaccagaggcagaagatgcgccctggccctgtggcacacctgggcccccgagcacagagagcaggagtggatcgaggccaaggagctgctgcaggagagccaggaggaggaggaggaggaggaggaggagatgcccagcaaggaccccagccccgagccccccagcagaagacaccagagagtgcaggacaagaccggcagagcccccagagtgagagaggagctgtag

SEQ ID NO: 178798 - DNA, 492 bp, Artificial Sequence
  derived and/or modified sequence
atgctgagactgctgagacccctgctgctgctgctgctgctgcccccccccggcagccccgagccccccggcctgacccagctgagccccggcgcccccccccaggcccccgacctgctgtacctgaacgacgacttccagggcggcgacctgttcttcaccgagcccaacgccctgaccgtgaccgccagagtgagacccagatgcggcagactggtggccttcagcagcggcgtggagaacccccacggcgtgtgggccgtgaccagaggcagaagatgcgccctggccctgtggcacacctgggcccccgagcacagagagcaggagtggatcgaggccaaggagctgctgcaggagagccaggaggaggaggaggaggaggaggaggagatgcccagcaaggaccccagccccgagccccccagcagaagacaccagagagtgcaggacaagaccggcagagcccccagagtgagagaggagctgtag

SEQ ID NO: 178799 - DNA, 1656 bp, Artificial Sequence
  derived and/or modified sequence
atgcacctgcagatgcgggaggacatggccaaatacagaaggatgagcggcgttcggcctcagtcctttagggatctggaaactcctcctcactgggcagcatacgacaccggactggaattgctggggagacaagaggccgggctggccctcccgcggcttgaagaggccttgcagggaagcttggcacagatggagtcgtgtagggctgactgcgaggggcctgaggagcagcaaggtgccgaggaggaagaggatggcgccgccagccagggaggcctgtacgaggctatcgctgggcattggattcaagtgctgcagtgccgccaaaggtgtgtcggcgagacagctactcggcctggccggtcttttcctgtccccgacttcctgccaaatcaattgaggagacttcatgaggctcacgctcaggtgggcaacctgtctcaagccatcgagaatgttctgtctgtcctgttattctaccccgaggacgaggctgcgaagcgcgcccttaatcagtaccaggcacagctgggcgaaccaaggcccgggctgggccccagggaggatatccaaagattcatactgcgttccctgggagaaaagcgtcaactctactatgccatggaacacctgggaacgtccttcaaagaccctgatccatggacacccgctgctttgatacccgaggctctgcgagagaagcttcgcgaggaccaggaaaagaggccatgggaccacgaacccgtaaagccgaagcctctgacttattggaaggacgtactgttactggagggggttacattaactcaggacagccgacagctgaatggttcagaacgggctgttctggacggacttctgacccctgctgaatgcggcgtcctactgcaattagcaaaggatgccgctggcgctggggccagatccggatacagggggaggcgcagtccacatacacctcatgagcgatttgaagggctcacggtcctcaaagcagcacaactcgcccgtgctggaacagtgggatcgcagggcgccaaattattgttggaagtgagcgaaagagtgcggactctgacacaggcttatttctcgccggagcggccactgcatctttcatttactcacctggtatgccggtccgccatagagggagagcaggaacagcggatggacctgtcacatcctgtgcacgccgataactgcgtacttgatcccgatacaggcgaatgctggagggaaccccccgcctacacatatagggattattctgggctgttgtatctgaatgacgacttccaaggtggtgatctcttttttaccgagcccaacgcacttacggttaccgcccgggtgcgaccacgctgcgggcgcctggtggcattttcttctggtgtcgaaaatccacatggcgtctgggcagtgacaagagggcgaaggtgtgccttggcactgtggcatacttgggcaccggagcatagagaacaggagtggatcgaggccaaggagctgttacaggaaagccaggaagaagaagaggaggaggaggaagagatgccttcaaaagacccctcgccagaaccccctagtagacgacaccagcgagttcaggacaaaactggcagagccccgcgcgtgcgtgaagaattatag

SEQ ID NO: 178800 - DNA, 2208 bp, Artificial Sequence
  derived and/or modified sequence
atgctcagactgctccgcccattgttgctgttattgcttctgccacctccagggtcccccgagcccccaggtctgacccaactgtcacccggggccccccctcaggccccagacttactgtacgctgatggccttcgcgcctatgcagcgggcgcatgggcgccagctgttgcactgttaagagaggccttgagatcgcaggcagccctgggtcgggtgcgactggactgcggcgcaagctgtgcagccgacccaggcgctgcgctgcctgccgtgcttttaggtgctccagagcccgatagtggccctgggcccacgcagggtagctgggagcgccagcttctgcgggcagctctaaggagagccgactgcctaacccagtgtgccgcccggagactgggccctgggggggccgctagacgagtcggatctgctttgagagacgcttttcgccggcgagaaccgtacaactatctgcagcgggcatactaccagcttaaaaagttagacctggctgcggcagccgcacacactttttttgtggccaatcctatgcatttgcagatgcgggaggacatggctaagtacagacgcatgagtggggtgcgccctcaatctttccgcgatttggaaacaccccctcactgggcagcatatgatacggggctggagctgttgggccgccaggaagccggactggctttaccccgattggaagaagcactgcaaggtagtttggcacagatggaaagttgccgggcagactgcgagggccccgaagaacagcagggagccgaagaggaggaggatggagcagcttcccaaggtgggctgtatgaagcaatcgcggggcactggatccaggtgctgcagtgccggcagcgatgcgtgggtgagacagccaccaggccaggccggtcctttcctgtgcccgactttctgcccaatcagttacgcaggctccatgaggcccacgcccaggtaggaaatttgagccaggccatcgagaacgtgctgtctgttttgctcttctaccccgaggacgaggccgccaagcgggcattgaaccaatatcaggctcaactcggcgaaccccggccagggcttggacccagagaagatatccagcggttcatcctcaggtctctgggcgagaagcgccagttatactacgctatggagcatctggggaccagctttaaggatcccgacccttggacccctgcggccctcatcccagaggccctgagagagaaacttagggaggatcaagagaaaaggccctgggaccatgaaccagttaagcccaagccactcacctattggaaggacgtgcttctacttgagggggtcaccctgactcaagacagccgtcagctgaacggaagcgaacgcgccgtgctcgacggcctgcttactccagcggaatgtggagtcctccttcaactcgctaaagacgccgcaggcgcaggagcacggtctggatacagggggaggcggagtccccacactccccacgagcgattcgaaggcctgactgtgctgaaagctgcccagctggcccgagccggcacagtcggaagccaaggcgctaaactcttgctcgaagttagcgaaagggtcagaactctgactcaagcatatttttcacccgagaggcccttgcatctcagcttcacacacctggtctgccgctcggcaattgaaggcgaacaggagcaacggatggacctctcacatccagttcacgctgacaactgcgtcctggatcccgatacaggggaatgctggagggagccacccgcttacacatatcgggactatagcggccttctttatctgaacgacgatttccaaggaggagacttattttttactgagccgaacgccctaactgtaaccgctagggtaagacctagatgcggccggctggtggcattttcatcaggcgtggagaatccccacggcgtgtgggcagttacacgaggccggcgctgtgcactggcgctctggcacacctgggccccagagcaccgagaacaggaatggattgaggctaaagagctgttacaagaatcacaggaggaggaagaagaggaagaggaggagatgccatctaaagacccctcaccagagccgcccagcaggaggcaccaaagggtgcaggacaagacagggcgggcaccacgggttcgagaagagttatag

SEQ ID NO: 178801 - DNA, 492 bp, Artificial Sequence
  derived and/or modified sequence
atgttacgtctcctgagaccgctgcttctcctcctgctgctccccccaccaggctcacctgaaccccccggcctgacccagttgtcacctggagctcccccacaagcacctgacctgctctacctcaacgatgacttccaaggcggcgacctgttctttacagagcccaatgccttgacagtaactgccagggttagacctcgctgtggccggctggttgcttttagcagtggcgtggaaaaccctcacggcgtatgggcagtaacacggggacggcggtgtgccctggccctctggcatacttgggcccccgagcacagagagcaggaatggatcgaggctaaagagctgctacaggaatcacaggaggaggaggaggaggaggaagaagagatgccatcaaaggaccccagtccggaacccccctcccgacgtcaccagcgcgttcaggacaaaactggccgggctccgagagtgagggaagaattgtag

SEQ ID NO: 178802 - DNA, 2129 bp, Artificial Sequence
  derived and/or modified sequence
ctctgatgccctcctcccttcgcctcctcagttgaagaagctggatctggcagctgcggcagcacacaccttctttgtagcaaaccccatgcacctgcagatgcgggaggacatggctaagtacagacgaatgtcgggagttcggccccagagcttccgggacctggagacgcccccacactgggcagcctatgacactggcctggagctactggggcgccaggaggcaggactggcactgcccaggctagaggaggctcttcaggggagcctggcccagatggagagctgccgtgctgactgtgaggggcctgaggagcagcagggggctgaagaagaggaggatggggctgcgagccaggggggcctctatgaggccattgcaggacactggattcaggtcctgcagtgccggcaacgctgtgtgggggaaacagccacacgccctggtcgcagcttccctgtcccagacttccttcccaaccagctgaggcggctacatgaggcccatgctcaggtgggcaatctgtcccaggctatagaaaatgtcctgagtgtcctgctcttctacccggaggatgaggctgccaagagggctctgaaccagtaccaggcccagctgggagagccgagacctggcctcggacccagagaggacatccagcgcttcatcctccgatccctgggggagaagaggcagctctactatgccatggagcacctggggaccagcttcaaggatcctgacccctggacccctgcagctctcatccctgaggcacttagagaaaagctcagagaggatcaagagaagaggccttgggaccatgagcccgtgaagccaaagcccttgacctactggaaggatgtccttctcctggagggtgtgaccttgacccaggattccaggcagctgaatgggtcggagcgggcggtgttggatgggctgctcaccccagccgagtgtggggtgctgctgcagctggctaaggatgcagctggggctggagccaggtctggctatcgtggtcgccgctcccctcacaccccccatgaacgcttcgaggggctcacggtgcttaaggctgcgcagctggcccgggctgggacagtgggcagtcagggtgctaagctgcttctggaggtgagcgagcgggtgcggaccttgacccaggcctacttctccccggaacggcccctgcatctgtccttcacccacctggtgtgccgcagcgccatagaaggagagcaagagcagcgcatggacctgagtcacccagtgcacgcagacaactgcgtcctggaccctgacacgggagagtgctggcgggagcccccagcctacacctatcgggactacagcggactcctctacctcaacgatgacttccagggtggggacctgttcttcacggagcccaacgccctcactgtcacggctcgggtgcgtcctcgctgtgggcgccttgtggccttcagctccggtgtcgagaatccccatggggtgtgggccgtgactcggggacggcgctgtgccctggcactgtggcacacgtgggcacctgagcacagggagcaggagtggatagaagccaaagaactgctgcaggagtcacaggaggaggaggaagaggaagaggaagaaatgcccagcaaagacccttccccagagccccctagccgcaggcaccagagggtccaagacaagactggaagggcacctcgggttcgggaggagctgtgagtggctgagccagctccttgaggatgtggccacttgacttgtggaaggccatcttgatgccaggacacacaggaagcccctgtgtgacatcaggagcagaacagcaagctctctgtccctgcacccccaccatcttggggacctacaagggcctggactcagaggacagtgcacaggctagcctggagctcaccaggcctggggagctgggacggggccccgctgccggacctgcagccctggacagatggggaacactgtgcctccctgaacagaaatggcaggggaggaggctgatgctttaaatgaagaggatggtggggttgggaggtataaccctgctcctctctcccagtctgtgcaataaaggtcgtgaagatctctc

SEQ ID NO: 178803 - DNA, 2635 bp, Artificial Sequence
  derived and/or modified sequence
gcatttcccctcggctgccggcggctccgacatcatgctccggctcctccggccgctgctgctactgctgctgctgcctcccccggggtcccctgagccccccggcctgacccagctgtccccgggggcgcccccgcaggcccccgacttgctctacgctgacgggctgcgcgcctacgcggccggggcttgggcgccggccgtggcgctgctgcgggaggcgctgcggagccaggcggcgctgggccgggtgcggctggattgcggggcgagctgcgcggccgatccgggcgccgcgctccccgccgtgcttctcggggccccggagcccgactccgggccgggacccacgcaggggtcctgggagcgacagcttctccgtgcagcgctccgccgcgcagactgcctgacccagtgcgcagcacggaggctgggccccgggggcgcggcgcgccgcgtggggagcgcgctccgggacgccttccgccgtcgggagccctacaactacctgcagagggcctattaccagttgaagaagctggatctggcagctgcggcagcacacaccttctttgtagcaaaccccatgcacctgcagatgcgggaggacatggctaagtacagacgaatgtcgggagttcggccccagagcttccgggacctggagacgcccccacactgggcagcctatgacactggcctggagctactggggcgccaggaggcaggactggcactgcccaggctagaggaggctcttcaggggagcctggcccagatggagagctgccgtgctgactgtgaggggcctgaggagcagcagggggctgaagaagaggaggatggggctgcgagccaggggggcctctatgaggccattgcaggacactggattcaggtcctgcagtgccggcaacgctgtgtgggggaaacagccacacgccctggtcgcagcttccctgtcccagacttccttcccaaccagctgaggcggctacatgaggcccatgctcaggtgggcaatctgtcccaggctatagaaaatgtcctgagtgtcctgctcttctacccggaggatgaggctgccaagagggctctgaaccagtaccaggcccagctgggagagccgagacctggcctcggacccagagaggacatccagcgcttcatcctccgatccctgggggagaagaggcagctctactatgccatggagcacctggggaccagcttcaaggatcctgacccctggacccctgcagctctcatccctgaggcacttagagaaaagctcagagaggatcaagagaagaggccttgggaccatgagcccgtgaagccaaagcccttgacctactggaaggatgtccttctcctggagggtgtgaccttgacccaggattccaggcagctgaatgggtcggagcgggcggtgttggatgggctgctcaccccagccgagtgtggggtgctgctgcagctggctaaggatgcagctggggctggagccaggtctggctatcgtggtcgccgctcccctcacaccccccatgaacgcttcgaggggctcacggtgcttaaggctgcgcagctggcccgggctgggacagtgggcagtcagggtgctaagctgcttctggaggtgagcgagcgggtgcggaccttgacccaggcctacttctccccggaacggcccctgcatctgtccttcacccacctggtgtgccgcagcgccatagaaggagagcaagagcagcgcatggacctgagtcacccagtgcacgcagacaactgcgtcctggaccctgacacgggagagtgctggcgggagcccccagcctacacctatcgggactacagcggactcctctacctcaacgatgacttccagggtggggacctgttcttcacggagcccaacgccctcactgtcacggctcgggtgcgtcctcgctgtgggcgccttgtggccttcagctccggtgtcgagaatccccatggggtgtgggccgtgactcggggacggcgctgtgccctggcactgtggcacacgtgggcacctgagcacagggagcaggagtggatagaagccaaagaactgctgcaggagtcacaggaggaggaggaagaggaagaggaagaaatgcccagcaaagacccttccccagagccccctagccgcaggcaccagagggtccaagacaagactggaagggcacctcgggttcgggaggagctgtgagtggctgagccagctccttgaggatgtggccacttgacttgtggaaggccatcttgatgccaggacacacaggaagcccctgtgtgacatcaggagcagaacagcaagctctctgtccctgcacccccaccatcttggggacctacaagggcctggactcagaggacagtgcacaggctagcctggagctcaccaggcctggggagctgggacggggccccgctgccggacctgcagccctggacagatggggaacactgtgcctccctgaacagaaatggcaggggaggaggctgatgctttaaatgaagaggatggtggggttgggaggtataaccctgctcctctctcccagtctgtgcaataaaggtcgtgaagatctctcagccaggg

SEQ ID NO: 178804 - DNA, 834 bp, Artificial Sequence
  derived and/or modified sequence
acccagaagcgtgtgtgtggagggaacacagccccagtagttacccccagacctcaggggctgaagtcaccgctggggctgaagtcatccttcatggatgcccaggcctgctccagttcccgccttttgccctcctcctcccagtttctccctcttattccacactagaccagctttgtccactcagcactcttctctctccatctctccttcctccccctccctccccttcccccctttcctctccctccctctcggctcccgcatttcccctcggctgccggcggctccgacatcatgctccggctcctccggccgctgctgctactgctgctgctgcctcccccggggtcccctgagccccccggcctgacccagctgtccccgggggcgcccccgcaggcccccgacttgctctacctcaacgatgacttccagggtggggacctgttcttcacggagcccaacgccctcactgtcacggctcgggtgcgtcctcgctgtgggcgccttgtggccttcagctccggtgtcgagaatccccatggggtgtgggccgtgactcggggacggcgctgtgccctggcactgtggcacacgtgggcacctgagcacagggagcaggagtggatagaagccaaagaactgctgcaggagtcacaggaggaggaggaagaggaagaggaagaaatgcccagcaaagacccttccccagagccccctagccgcaggcaccagagggtccaagacaagactggaagggcacctcgggttcgggaggagctgtgagtggctgagccagctccttgaggatgtggccacttgacttgtgga

SEQ ID NO: 178805 - DNA, 1656 bp, Artificial Sequence
  derived and/or modified sequence
atgcacctgcagatgagggaggacatggccaagtacagaaggatgtctggagtgcggccccagagcttccgggacctggagaccccaccccactgggccgcctatgacaccggcctggagctgctgggccggcaggaggccggcctggccctgccccggctggaggaggccctgcagggcagcctggcccagatggagagctgcagagctgactgtgagggccctgaggagcagcagggcgctgaggaggaggaggatggagctgccagccagggcggcctgtatgaggccatcgccggccactggatccaggtgctgcagtgccggcagagatgtgtgggggagacagccacccggcccggccgctccttccctgtgcctgacttcctgcccaaccagctgcggcggctgcacgaggcccacgcccaggtgggcaacctgagccaggccattgaaaatgtgctgtctgtgctgctcttctacccagaagatgaggccgccaagagggccctgaaccagtaccaggcccagctgggggagcccaggcctggcctgggcccccgggaggacatccagcgcttcatcctgcggagcctgggggagaagaggcagctgtactatgccatggagcacctgggcaccagcttcaaggaccctgacccctggaccccagctgccctgatccctgaggccctgcgggagaagctgcgggaggaccaggagaagaggccctgggaccacgagcctgtgaagcccaagcccctgacctactggaaggatgtgctgctgctggagggcgtgaccctgacccaggacagccggcagctgaatggaagtgaaagagctgtgctggatggcctgctgaccccagcagaatgtggggtgctgctgcagctggccaaggatgctgctggggccggggcccggagcggctaccggggcagaagaagcccccacacccctcatgaaagatttgagggcctgactgtgctgaaggccgcccagctggcccgggccggcaccgtgggcagccagggcgccaagctgctgctggaggtgtctgagcgggtgaggaccctgacccaggcctacttcagccctgagcggcccctgcacctgtccttcacccacctggtgtgccgcagcgccatcgagggggagcaggagcagaggatggacctgagccaccctgtgcacgccgacaactgtgtgctggaccctgacacaggagagtgctggagggagcccccagcctacacctacagagactacagcggcctgctgtacctgaatgatgacttccagggcggggacctcttcttcacagagcccaatgccctgactgtgacagcccgggtgcggccccgctgtggccgcctggtggccttcagcagtggagtggagaacccccatggagtgtgggccgtgacccggggccgccgctgtgccctggccctgtggcacacctgggcccctgagcaccgggagcaggagtggattgaggccaaggagctgctgcaggagagccaggaggaggaggaggaggaggaggaggagatgcccagcaaggaccccagccctgagccccccagccgccgccaccagagggtgcaggacaagacaggccgggccccccgggtgcgggaggagctgtag

SEQ ID NO: 178806 - DNA, 2208 bp, Artificial Sequence
  derived and/or modified sequence
atgctgcggctgctgcggcccctgctgctgctgctgctgctgcccccacctggcagccctgagcccccaggcctgacccagctgagccctggggccccaccccaggccccagacctgctgtatgcagatggcctgcgggcctatgctgctggggcctgggccccagctgtggccctgctgcgggaggccctgcggagccaggccgccctgggccgggtgcggctggactgtggggccagctgtgccgctgaccctggagctgccctgcctgctgtgctgctgggcgcccctgagccagattctggccctggccccacccagggctcctgggagcggcagctgctgcgggccgccctgcggcgggctgactgcctgacccagtgtgccgcccggcggctgggccctggaggagctgcccggcgggtgggcagcgccctgagagatgccttcagaagaagagagccctacaactacctgcagagggcctactaccagctgaagaagctggacctggccgctgctgctgcccacaccttctttgtggccaaccccatgcacctgcagatgagggaggacatggccaagtacagaaggatgtctggagtgcggccccagagcttccgggacctggagaccccaccccactgggccgcctatgacaccggcctggagctgctgggccggcaggaggccggcctggccctgccccggctggaggaggccctgcagggcagcctggcccagatggagagctgcagagctgactgtgagggccctgaggagcagcagggcgctgaggaggaggaggatggagctgccagccagggcggcctgtatgaggccatcgccggccactggatccaggtgctgcagtgccggcagagatgtgtgggggagacagccacccggcccggccgctccttccctgtgcctgacttcctgcccaaccagctgcggcggctgcacgaggcccacgcccaggtgggcaacctgagccaggccattgaaaatgtgctgtctgtgctgctcttctacccagaagatgaggccgccaagagggccctgaaccagtaccaggcccagctgggggagcccaggcctggcctgggcccccgggaggacatccagcgcttcatcctgcggagcctgggggagaagaggcagctgtactatgccatggagcacctgggcaccagcttcaaggaccctgacccctggaccccagctgccctgatccctgaggccctgcgggagaagctgcgggaggaccaggagaagaggccctgggaccacgagcctgtgaagcccaagcccctgacctactggaaggatgtgctgctgctggagggcgtgaccctgacccaggacagccggcagctgaatggaagtgaaagagctgtgctggatggcctgctgaccccagcagaatgtggggtgctgctgcagctggccaaggatgctgctggggccggggcccggagcggctaccggggcagaagaagcccccacacccctcatgaaagatttgagggcctgactgtgctgaaggccgcccagctggcccgggccggcaccgtgggcagccagggcgccaagctgctgctggaggtgtctgagcgggtgaggaccctgacccaggcctacttcagccctgagcggcccctgcacctgtccttcacccacctggtgtgccgcagcgccatcgagggggagcaggagcagaggatggacctgagccaccctgtgcacgccgacaactgtgtgctggaccctgacacaggagagtgctggagggagcccccagcctacacctacagagactacagcggcctgctgtacctgaatgatgacttccagggcggggacctcttcttcacagagcccaatgccctgactgtgacagcccgggtgcggccccgctgtggccgcctggtggccttcagcagtggagtggagaacccccatggagtgtgggccgtgacccggggccgccgctgtgccctggccctgtggcacacctgggcccctgagcaccgggagcaggagtggattgaggccaaggagctgctgcaggagagccaggaggaggaggaggaggaggaggaggagatgcccagcaaggaccccagccctgagccccccagccgccgccaccagagggtgcaggacaagacaggccgggccccccgggtgcgggaggagctgtag

SEQ ID NO: 178807 - DNA, 492 bp, Artificial Sequence
  derived and/or modified sequence
atgctgcggctgctgcggcccctgctgctgctgctgctgctgcccccacctggcagccctgagcccccaggcctgacccagctgagccctggggccccaccccaggccccagacctgctgtacctgaatgatgacttccagggcggggacctcttcttcacagagcccaatgccctgactgtgacagcccgggtgcggccccgctgtggccgcctggtggccttcagcagtggagtggagaacccccatggagtgtgggccgtgacccggggccgccgctgtgccctggccctgtggcacacctgggcccctgagcaccgggagcaggagtggattgaggccaaggagctgctgcaggagagccaggaggaggaggaggaggaggaggaggagatgcccagcaaggaccccagccctgagccccccagccgccgccaccagagggtgcaggacaagacaggccgggccccccgggtgcgggaggagctgtag

SEQ ID NO: 178808 - DNA, 1656 bp, Artificial Sequence
  derived and/or modified sequence
atgcacctgcagatgcgggaggacatggccaagtaccggcggatgagcggagtgagaccccagagtttccgagacttggaaactcccccacactgggctgcctacgacacaggcctcgaactgctcgggcggcaggaggccggtctggctctgccgcgtctagaggaggcactgcaaggcagtcttgcccagatggaaagctgtagggcagactgcgaaggtccagaggaacagcagggcgccgaggaagaagaggacggagctgctagccaggggggtctgtacgaagcaatcgccggacactggattcaggtgttgcagtgccgccagcggtgcgtgggtgagactgctacccggcccggacgtagctttcccgtgcccgacttcctaccaaatcagttaagaaggcttcacgaggcccacgcgcaggtgggaaatcttagccaggccattgagaatgtgctcagcgttctgctgttttatccagaggatgaagcagcgaaacgagcgctcaaccagtatcaggctcaactgggagaaccaagacccggcctagggccccgcgaagacatccagcgattcatcttgcgtagcctgggcgagaagcgacagctgtattatgcaatggagcacctgggtacatcattcaaagaccctgatccttggacccctgccgcgctgatccccgaagctctgagggagaaactgcgcgaagatcaggagaagagaccctgggaccatgagccagtgaagccaaaaccccttacctactggaaagatgtgcttttgctggaaggtgttacccttacccaagattctcgccaactcaatggatcagagcgggccgtactggacgggctgcttaccccagctgaatgcggtgtgctcctccagctggcgaaagatgccgctggtgctggtgcccgaagcggataccgggggcgtcgcagtcctcacactccacatgaaaggttcgagggtctgacggtgttgaaagccgcacagcttgcaagggcgggcactgtgggaagtcaaggcgcaaaattactgttagaagtgtcagaacgggttaggactctcacccaagcctacttctctcccgagagacccctccacctgtcctttacacacctggtatgcagatctgcgatcgaaggagagcaggagcagagaatggacctaagtcatcccgttcacgctgacaattgtgttctggatccagataccggggaatgttggagagagccccccgcgtacacttacagagattattccgggctgctctatcttaacgacgacttccaagggggggatctgttttttacggaacccaacgccctgacggtgactgcgcgtgtccggccacgctgtggcaggctggttgcattctcgtccggtgtagagaacccacatggcgtttgggctgtgacccgtggtcgccgctgcgccctagcactgtggcacacgtgggctcctgagcacagggagcaggagtggatcgaggccaaagagctgctgcaggaatctcaagaagaggaggaggaagaagaagaggaaatgccttcaaaggacccaagtcctgagccaccgagccggcgccatcagagggtgcaggataagactggacgggctcctagggtgcgggaggagctgtag

SEQ ID NO: 178809 - DNA, 2208 bp, Artificial Sequence
  derived and/or modified sequence
atgctgcggctgctgcggcccctgctgctgctgctgctgctgcccccccctggtagtccggagcctccgggactgacccagctgtcccctggagcacccccccaggcccccgatttgctctacgcagacggtctacgcgcctacgccgcaggagcatgggctcccgctgtggcgttattacgggaagctctgagatctcaggctgccctaggccgggtgaggctggattgtggcgcaagctgtgctgctgatccaggtgcggccctgcccgctgtgctgttgggggcaccagaacccgattcgggaccaggccccacacagggctcttgggagagacaactgctcagagctgccttaaggagggctgactgcctcacccagtgcgctgccaggcgactcgggccaggcggcgctgcaagaagagtaggcagcgccctgagggatgcttttcgccgccgggaaccttacaactatttacagagagcctattaccaactgaaaaaacttgacctggccgctgccgctgcacacaccttttttgtggctaatcctatgcatttgcagatgcgtgaggacatggccaaatataggaggatgagtggggttaggccacaaagcttccgcgatcttgagactccaccccactgggccgcctacgacactggactcgaactcctgggcaggcaagaagccggtctggccctcccccgtctagaggaggctttacagggtagcttagctcagatggaaagttgccgcgcggactgtgagggcccagaagaacagcaaggcgcagaggaagaagaagacggcgccgcatcacagggggggttatacgaagcgatcgcaggacactggattcaggtgcttcaatgcaggcagcgctgcgttggtgagacggcaacccggcccggccgctcttttccggttcctgattttctacccaaccagctgaggcgactccacgaggcccatgctcaggtcggcaacttgtcccaggcaatcgagaacgttctttctgtcctgttgttttatcccgaagacgaggccgctaaaagggcgctcaaccagtaccaggcgcagctgggtgagccaagacctgggctagggcccagagaggatatccagcgctttatacttcgatccctgggggagaagcggcagctgtactatgccatggagcacctgggcacatccttcaaggaccccgatccgtggacaccggccgccctgatccctgaggcccttcgggagaaactgcgggaggatcaggagaagagaccctgggaccacgagcccgttaaacctaagcctttgacgtactggaaagacgtcctgctattagagggggtgactcttacacaggattcaaggcagctaaacggatcagaaagggctgtgctggatgggcttttgactccagcagaatgcggtgtgctcctccagctagccaaagatgccgctggagccggcgcccggagcgggtatagaggcagaagatcaccccacaccccgcatgagagattcgagggactgaccgtactcaaggccgcacagctagcccgggcgggcacggtggggtcccagggagcaaagcttctacttgaagtgagcgagcgggtgcgcactctcacccaggcctacttctctccagaacgcccactgcacttgagtttcacgcacctggtgtgtcgctccgccatcgaaggagaacaggagcagcggatggacctgtctcatcccgttcacgctgacaactgcgtgttggaccccgatacaggtgagtgttggagggagcctccagcgtatacttatcgcgattacagcggactgctatacctgaatgacgattttcagggtggggacctcttcttcacagaacctaatgcactgacggtgacagccagggttcgccctcgctgtggtcgtttggtagctttcagtagcggagtcgaaaacccacatggagtctgggccgtgacgaggggcaggagatgtgcgctcgccctgtggcacacatgggccccagaacaccgtgaacaggagtggattgaggccaaagaactcctgcaggaatcacaggaggaagaggaggaagaagaagaagagatgccttcaaaggaccctagtccagagccaccttcacgccgtcaccagcgcgttcaagataagactggaagggcccctagagtcagggaagaactttag

SEQ ID NO: 178810 - DNA, 492 bp, Artificial Sequence
  derived and/or modified sequence
atgctgcggctgctgcggcccctgctgctgctgctgctgctgcccccacccggtagtccagagcctcccggccttacccagctgagccctggcgccccacctcaggcacccgacctgctctacctcaatgacgatttccaaggaggagacctttttttcaccgagcctaacgctctcaccgtgaccgcccgcgtccgcccccgctgcgggaggctggtagcattttcatccggagtcgaaaacccgcatggagtgtgggcagtcacaaggggtagacgatgtgctctcgccttgtggcatacctgggcaccagaacaccgggagcaggagtggatcgaggccaaggagctgctgcaggagtcacaggaggaggaagaggaagaggaggaagagatgcccagcaaggaccccagccccgagcccccatctagacgacatcaaagggtgcaagacaaaaccggtcgggcacctcgggtcagggaggagctgtag

SEQ ID NO: 178811 - DNA, 1656 bp, Artificial Sequence
  derived and/or modified sequence
atgcatttacagatgcgagaggacatggccaaatatcggcgaatgagcggggtgcgtcctcagtcttttagggacctagaaacaccacctcactgggccgcttacgatacggggctcgaattgctgggtcggcaggaggcaggccttgcactacctcggctggaagaggccctgcagggatccttggcacagatggaatcgtgtcgtgccgactgcgaaggtccagaggaacagcagggggctgaggaggaagaggatggagctgcatctcaggggggtctctacgaggccatcgcagggcactggatccaggtgctgcaatgtaggcagcgatgtgtgggggagacagctacacgccctggcaggagttttcccgtgcccgattttctcccgaatcagctgcgccgactgcatgaggcccacgcacaggtcggcaacctctctcaggctattgaaaacgtactttctgtactgctgttttacccggaagatgaggccgcaaaacgtgctctgaatcagtatcaggcccaattgggcgagccaaggcctggtctagggccaagagaggacatccagcgctttattctccgatctcttggtgaaaagaggcagttatattacgccatggagcacctaggtacctcattcaaggatccggacccgtggactccggctgccttaatccccgaggctctgcgagaaaaattaagagaggaccaggagaagcggccatgggatcatgagccagttaaaccaaaaccactgacgtactggaaagatgtgctgctcctggagggcgttacattgacccaagattccaggcagctgaacggcagtgaacgagccgtccttgatggccttctgaccccagccgagtgcggagttctcctccagcttgctaaggatgctgccggagccggagcgcgttcaggctacagagggcgtcggagcccccacacgccgcatgaaaggtttgaaggcctgactgtcctcaaagccgctcagctcgcgagggctggcacagtcgggtctcagggagccaagctgctgttggaggtgagtgagcgggtgcgcacactgactcaggcctacttttctcctgaacgcccactgcatttgtcttttactcatctggtatgccggagtgccatcgaaggggaacaggaacagcggatggatctcagccaccctgttcatgctgacaactgtgtgctagaccccgataccggtgagtgctggcgggaacctcctgcttatacctaccgcgattattcgggactgctttacctcaatgatgatttccagggtggcgatctgttttttaccgaacctaatgctctgacagtcacggcccgtgtccgacctcggtgcgggagactcgtggctttttcgtccggcgttgaaaatccccatggagtttgggctgtaaccagagggagacggtgcgccctcgcactgtggcacacctgggctcccgagcacagggagcaggagtggatcgaggccaaggagctgctccaagagtctcaggaagaggaggaagaggaagaggaagagatgcctagcaaagacccaagccccgagccacccagcagaagacaccaaagggtgcaagataagacgggcagagccccaagagtcagggaggagttgtag

SEQ ID NO: 178812 - DNA, 2208 bp, Artificial Sequence
  derived and/or modified sequence
atgctgaggctgttgcggcctctcctactgctgttattactgccaccccctggatcacctgagccgcctggcttgacccaactcagtccgggtgcgccaccacaggccccagacctgctgtatgcagacggtttgcgggcatacgcagcaggcgcatgggccccagcagtggcactcctaagagaagcactgcgcagtcaagcggcactcgggagagttagactcgactgtggtgcttcctgtgcagccgaccccggagcggcattgcccgctgtgctgctcggcgctcctgaacccgactcagggcctgggccaacccagggttcatgggaacgtcagctgctgagagcagccctgaggcgtgccgattgcttgacgcagtgtgctgccagacgtcttggcccaggaggcgctgcacgccgagttggaagcgcactgagagacgcatttcgcaggcgggagccatataactacctccagagagcctactaccagctgaagaagctggacctggctgctgccgcagcacatactttcttcgtggcaaatccaatgcatctgcagatgcgtgaagacatggctaagtatcgcagaatgagtggtgtccggcctcagtcctttcgggaccttgagacccccccacactgggccgcttacgacaccgggctagagctgctgggacgccaggaggccggtctggcactgccccgattggaggaagcactccaaggaagtcttgctcagatggaaagttgtcgcgctgactgcgagggacccgaggaacaacagggggcagaggaggaagaggacggtgccgcttcacagggcggactctatgaggcaattgctggccattggatacaggtgctgcaatgtcgccaacgttgtgtcggcgagactgctacaagaccgggtcgatccttcccagtcccggatttcttgccgaaccagctccgcagactgcatgaagcccacgcgcaggtgggtaatttgtctcaagctatagagaacgtgctctccgtgctgctcttttaccctgaggatgaggcagccaaaagagcccttaaccagtaccaggcacagttaggcgaaccgagaccaggcttagggccaagagaagacattcagcgcttcattctgcggtccctgggggagaaacgacaattgtattatgccatggagcacctggggacctcctttaaggatcctgatccatggacacctgccgctctgatacccgaggcattacgcgaaaaacttagggaggatcaagaaaagagaccatgggatcatgaaccagtgaaaccaaaacccttgacatattggaaggacgtcctgctgctggaaggagtgaccctcacccaggactcacggcagctcaacggcagcgaaagagcggtgctggatggtctcttgaccccagcagaatgcggagttctgttacagctcgcaaaagacgcggcaggagctggcgctcggagcggatatagaggcagacgtagcccccatactcctcatgaacgctttgaaggactgactgtcttgaaagcggcacagctcgcccgagccggaacagtcggttctcagggagctaagctcttacttgaagtgtctgagcgtgtgcggacacttacacaggcttatttcagtccagagcggccacttcaccttagcttcacccacttagtatgtcgcagtgctatagagggagaacaggagcagcggatggacctgtcccaccccgtgcacgctgataactgtgtgctcgacccggatactggcgagtgttggcgagaacccccagcctatacctatcgcgactactctggtcttctgtacctcaacgacgatttccagggcggtgacctctttttcacagaacccaacgccttgacagttactgctagagtgaggccccgatgcggacgcctggtcgcgttctcatccggcgtggaaaatccgcatggggtgtgggccgtaacccgcggaagacgatgcgctctggctctgtggcacacatgggcaccagagcacagagagcaggaatggattgaggccaaggaattactccaggagagccaggaggaagaggaggaagaggaagaggaaatgccatccaaggacccctcacccgagccaccctctagaagacatcaacgtgttcaggataagaccggaagggcccctcgggtgagagaggagttatag

SEQ ID NO: 178813 - DNA, 492 bp, Artificial Sequence
  derived and/or modified sequence
atgttaagactcttgcgacctctgctcctgctcttattgctccccccaccagggtctccagaacctcctggtctaacacagcttagccccggtgccccaccacaggcaccggaccttttgtatctcaacgacgactttcaaggtggagatctcttcttcaccgagccaaacgcactcaccgtaacagcaagagtgcgcccacgatgtggaaggctggttgcattttcctctggagtagagaatccccacggcgtctgggccgtgacaaggggtagacggtgtgccctggcattgtggcacacttgggcccctgagcatagggagcaggaatggatcgaggcaaaggaacttttgcaggaaagccaggaagaggaagaggaagaagaggaagaaatgcccagtaaggaccctagcccggagccgccatctcgcaggcaccaaagggttcaagataaaactggcagagccccacgagtacgggaggaactgtag

SEQ ID NO: 178814 - DNA, 2208 bp, Artificial Sequence
  derived and/or modified sequence
atgctgcgacttctgcgaccccttctattgctacttcttctgccaccacccggatctcctgagcctccgggcctgacccagttgagtccgggtgctcccccccaagcgccagatctgctctatgccgatggactgagagcctatgccgctggcgcctgggcccccgcggtcgccctactgagagaagccctccgaagccaggccgcactggggagagtgagactggattgcggcgcctcatgcgccgccgacccaggagccgcgttgcctgccgtgttactcggggcacctgaacccgattcaggacccggaccaacacaagggagctgggaacggcagctgctccgggccgccctacggcgggctgactgcctgacacagtgtgcagccaggaggctgggccctggcggcgctgcaagaagggtgggaagcgccctgcgcgacgcttttcgcagacgagaaccttacaactatctccaaagagcttactatcaattgaaaaagcttgacctcgccgccgccgctgcccacacttttttcgtcgccaaccccatgcacctccagatgcgtgaggacatggccaagtaccgccgcatgtctggagtgcggccgcagtccttcagagacctggaaacacccccccactgggcagcctatgacacgggccttgagctgttaggcagacaggaggcaggactggcactcccaagactcgaagaggccctgcagggcagcctggcgcaaatggagagctgtcgggccgattgcgaggggccagaagaacagcagggcgctgaagaagaagaggatggggctgccagtcagggaggtctgtacgaggccattgcaggacactggatccaggtactacaatgtcgacagaggtgtgtgggggaaactgcaacccggccgggccgcagttttcctgtcccagatttcctgcctaaccaactccgccgactacatgaggcccatgcccaggtgggaaatctctcccaggcaatcgaaaatgtgctcagcgtgcttctattttacccggaggacgaggccgctaagcgcgccttgaaccaatatcaggcccagctgggcgagccgcggcctgggctcggtcccagggaagatatccaaaggttcatactgcgctccctgggggagaagcggcaactctattatgctatggagcacctgggtacctccttcaaagatcctgacccatggaccccggctgcactgatccctgaagcccttagggagaaacttcgcgaagatcaagagaaaagaccatgggaccacgagccagtgaagcctaaaccattgacgtactggaaagatgtcttgttgttggaaggagtgactctgacacaagactccagacagcttaacggctccgagagggccgtgctggatggcctgctaactcctgcagaatgtggtgtgctgctgcaacttgctaaagatgcagccggcgcaggggctcgctccgggtatagaggccgcagatcacctcacaccccccatgagcgattcgaggggttgacagttctcaaagctgcacaactggcacgcgccggaaccgtaggctcccagggcgctaaactgctgctggaggtgagcgagcgtgtgcggactctgacacaggcatacttctccccagagagacccttgcatctatcatttacacacctggtatgcaggtccgcaattgagggtgaacaagagcagcggatggacttgtcgcacccggtccacgcggacaactgcgtgctggatcccgatacaggggagtgttggagggagccaccggcctatacatacagggactacagcgggctgctgtacctgaacgacgattttcagggcggtgatctttttttcacagagcctaacgccctgacagtgactgcccgagtcagacctcgttgcggaagactcgtggcgttcagcagcggcgtggagaacccacacggtgtatgggccgtcacccgggggcgtagatgcgccctggctctgtggcacacatgggcaccagagcatagggagcaggagtggatagaagctaaggagctgctccaggagtcccaggaagaggaggaagaagaggaggaggagatgccttctaaagatccctcacccgaacctccgagccgaagacatcaacgtgtccaagacaagactggacgcgcccctcgggtgagggaagaactgtag

SEQ ID NO: 178815 - DNA, 2208 bp, Artificial Sequence
  derived and/or modified sequence
atgctgcggctgctgcggcccctgctgctgctgctgctgctgccccccccaggaagcccagaaccccccgggcttacccagttatcacctggggctcccccccaagcaccggaccttctgtacgccgatggcttacgtgcctacgccgctggagcatgggcaccagctgtggctctgctcagggaggccctcaggagccaggcggcgctcggtcgcgtgcgactggactgtggcgcttcctgtgccgccgacccaggtgctgcgcttcccgcagtgctgctcggggctcccgaaccagactcaggcccgggacctacacaggggagctgggaacgccagttactccgagcggcactgcgtagagcggactgtctaacccagtgtgccgcacgacgtttgggaccaggaggggccgcgcgtagagttggcagtgccctccgtgacgcttttagacgtcgtgagccatacaattatctacagcgggcctactaccagcttaagaagctggatctcgcagccgcggcagcacataccttctttgtcgctaatcccatgcacctgcagatgcgcgaagacatggccaaatatcgccgcatgagcggtgtacgccctcaaagctttcgggacctggagactcctccacattgggctgcatatgataccggattagaactcctgggacgacaggaggccgggctcgccttgcccagattggaggaagccctccagggcagcctggctcagatggagtcctgtcgggctgattgtgagggccccgaagagcagcagggcgcggaggaggaagaggacggtgctgccagccagggtggcctgtatgaggcaattgcagggcactggatccaagtgttgcagtgcaggcagcggtgcgtcggtgagacagcgacaaggccaggaagatctttccccgtgcctgatttccttcctaaccagctgagacggcttcacgaagcccatgcacaggtgggcaacctgagccaggccattgaaaacgtgctgagtgtgttgctattttatcctgaggacgaggcagccaaacgggctctgaaccagtatcaggctcagctgggcgagcctaggcccggcttggggcccagagaggacatacagcgatttatccttagatcactgggggagaagcggcaactgtactatgccatggagcacctcggaacttcatttaaagatcccgatccttggactccagcagctctgattcctgaagcccttcgcgagaagctgagggaagatcaggagaaacggccttgggatcatgaacctgtgaaacctaagcccctcacgtattggaaggacgttcttttactggagggagtgacactgactcaagatagtagacagttgaacggtagtgagcgcgccgtgctggacggtttattaactcccgccgagtgcggtgtgctgctgcagctcgctaaggatgccgcgggggccggggctcggagtggctacagggggcgcaggtccccacatacaccgcatgagagatttgaaggactgacagttttgaaggcagcccaactcgccagggccggtaccgtgggatcgcagggtgccaaacttctgttggaagttagcgagagggtccgtacactaactcaagcctacttcagcccggagaggccactgcatttgtcctttacccatctcgtttgccggagcgccatcgagggcgaacaggaacagcgtatggatctgagccatcccgtacacgctgacaactgcgtgctggatcccgacaccggagaatgttggagggagccccctgcttacacgtaccgcgactattctggtctgctgtatctaaatgatgattttcaggggggggacctgttcttcacagagccaaatgccctgaccgttacagcccgtgtgagaccgcgatgtggccggctggttgcgtttagctccggcgtcgagaatccccacggagtgtgggccgtcacgagggggcgaagatgtgctctggctctttggcatacttgggcccctgagcaccgggagcaggagtggatcgaagcaaaagaactccttcaggagagtcaggaagaagaggaagaagaagaagaagaaatgccctccaaagaccccagcccagaaccgcccagtcgcaggcaccagcgagtgcaagataagactggccgggcccctcgtgttagggaagagctgtag

SEQ ID NO: 178816 - DNA, 2208 bp, Artificial Sequence
  derived and/or modified sequence
atgcttaggctgttacggcctctcctgttgctgctcttgctgcctcccccaggctccccagagcccccaggcctgacccaattaagccctggggctccgcctcaggcacccgatctcttgtacgcagatggcttaagagcatacgctgctggtgcctgggctcccgctgttgctttgctgcgggaggcgctcagaagccaggctgcactggggagagttcggctggattgcggcgctagttgcgctgcggacccgggtgctgctcttccagccgtgttgctgggggcacccgagcccgatagtggacctggcccaacccaaggctcgtgggagcgacagcttctgcgcgctgccctcagaagggccgattgcctcacacagtgtgccgcaagacgtctcggaccaggaggagccgctaggagagtggggtcagccctgcgcgatgctttccgtcgacgagaaccatataactaccttcagagagcctactaccagctgaagaaactggatctcgcagccgctgcagctcataccttcttcgtcgctaaccctatgcatcttcagatgcgcgaagacatggctaaataccggaggatgtctggtgtgcggccacaatcattcagggacctggaaactccccctcactgggcagcttatgacacagggctggagctcttaggaagacaggaggccggtctcgctctcccacggctggaagaggctcttcagggctcattagctcagatggaatcttgtcgtgcagactgtgaagggccagaagagcagcagggagcagaggaggaggaggatggagccgcatcacaggggggattgtatgaagccattgccggacactggatccaggtacttcaatgtcggcaaaggtgtgtcggggaaactgcaacgagacctggtcgaagttttcctgttcccgactttctccctaaccagttgcgccgtttacacgaggcccatgcccaggtcgggaatttatcacaggcgatcgagaacgtactcagtgtcttactgttctatccggaagacgaagctgccaagagagcgttgaaccaataccaggcacaattgggcgaaccccgtccaggcctcggcccaagagaagacatccagagattcattcttagaagcctgggggagaaacgccaactttactacgccatggagcaccttgggacgagttttaaagatcccgatccttggacacctgctgctctcatcccggaggccttgcgcgagaaactgcgggaggaccaagagaagaggccctgggatcacgaacccgtgaagccaaagcctctgacttattggaaagatgtgctgctgctggagggcgtgacgctgactcaggactcgaggcaactcaacgggtcagagcgagccgtcctggacggtctcctgactcccgcagagtgtggagtgttactacagcttgcaaaggatgcagctggagccggtgctagaagtggatacaggggtcgcaggagccctcacaccccgcatgagagatttgaggggctcactgtgttgaaagctgcgcaactggcaagagctggaacagttggctcccagggggctaaattgctgctggaggtttccgagagagtgcggaccctcacgcaggcctatttcagccccgaacgacccctgcacttgtcctttacacacttagtctgccgtagcgccatcgagggagagcaagaacagaggatggatttaagccatcccgtgcatgccgataactgtgtgcttgacccggacactggcgagtgttggcgagaaccccctgcatatacctatcgtgattattcaggcctactgtacctcaatgacgacttccagggcggagacttattctttaccgaacccaatgccctgaccgtgacagccagggtccggcctcggtgcggtcgactagttgcctttagctccggcgtcgagaacccacatggcgtgtgggcggtgacccgaggccgaagatgtgcccttgccctgtggcacacctgggctcctgaacacagggaacaggagtggattgaagctaaggagttgcttcaggagtcccaggaagaggaagaggaagaggaagaggagatgccctccaaggacccgagtcctgagccacccagccgcaggcatcagagagtgcaggataagacagggagagcgccacgagtacgcgaggagctgtag

SEQ ID NO: 178817 - protein, 716 aa, Artificial Sequence
  derived and/or modified sequence
MFSLSSTVQPQVTVPLSHLINAFHTPKNTSVSLSGVSVSQNQHRDVVPEHEAPSSEPSLNLRDLGLSELKIGQIDQLVENLLPGFCKGKNISSHWHTSHVSAQSFFENKYGNLDIFSTLRSSCLYRHHSRALQSICSDLQYWPVFIQSRGFKTLKSRTRRLQSTSERLAETQNIAPSFVKGFLLRDRGSDVESLDKLMKTKNIPEAHQDAFKTGFAEGFLKAQALTQKTNDSLRRTRLILFVLLLFGIYGLLKNPFLSVRFRTTTGLDSAVDPVQMKNVTFEHVKGVEEAKQELQEVVEFLKNPQKFTILGGKLPKGILLVGPPGTGKTLLARAVAGEADVPFYYASGSEFDEMFVGVGASRIRNLFREAKANAPCVIFIDELDSVGGKRIESPMHPYSRQTINQLLAEMDGFKPNEGVIIIGATNFPEALDNALIRPGRFDMQVTVPRPDVKGRTEILKWYLNKIKFDQSVDPEIIARGTVGFSGAELENLVNQAALKAAVDGKEMVTMKELEFSKDKILMGPERRSVEIDNKNKTITAYHESGHAIIAYYTKDAMPINKATIMPRGPTLGHVSLLPENDRWNETRAQLLAQMDVSMGGRVAEELIFGTDHITTGASSDFDNATKIAKRMVTKFGMSEKLGVMTYSDTGKLSPETQSAIEQEIRILLRDSYERAKHILKTHAKEHKNLAEALLTYETLDAKEIQIVLEGKKLEVR

SEQ ID NO: 178818 - protein, 248 aa, Artificial Sequence
  derived and/or modified sequence
MYQVTVPLSHLINAFHTPKNTSVSLSGVSVSQNQHRDVVPEHEAPSSEPSLNLRDLGLSELKIGQIDQLVENLLPGFCKGKNISSHWHTSHVSAQSFFENKYGNLDIFSTLRSSCLYRHHSRALQSICSDLQYWPVFIQSRGFKTLKSRTRRLQSTSERLAETQNIAPSFVKGFLLRDRGSDVESLDKLMKTKNIPEAHQDAFKTGFAEGFLKAQALTQKTNDSLRRTRLILFVLLLFGIYGLLKNPF

SEQ ID NO: 178819 - protein, 516 aa, Artificial Sequence
  derived and/or modified sequence
MKTKNIPEAHQDAFKTGFAEGFLKAQALTQKTNDSLRRTRLILFVLLLFGIYGLLKNPFLSVRFRTTTGLDSAVDPVQMKNVTFEHVKGVEEAKQELQEVVEFLKNPQKFTILGGKLPKGILLVGPPGTGKTLLARAVAGEADVPFYYASGSEFDEMFVGVGASRIRNLFREAKANAPCVIFIDELDSVGGKRIESPMHPYSRQTINQLLAEMDGFKPNEGVIIIGATNFPEALDNALIRPGRFDMQVTVPRPDVKGRTEILKWYLNKIKFDQSVDPEIIARGTVGFSGAELENLVNQAALKAAVDGKEMVTMKELEFSKDKILMGPERRSVEIDNKNKTITAYHESGHAIIAYYTKDAMPINKATIMPRGPTLGHVSLLPENDRWNETRAQLLAQMDVSMGGRVAEELIFGTDHITTGASSDFDNATKIAKRMVTKFGMSEKLGVMTYSDTGKLSPETQSAIEQEIRILLRDSYERAKHILKTHAKEHKNLAEALLTYETMPKRFKLFLRGKSWK

SEQ ID NO: 178820 - DNA, 2151 bp, Artificial Sequence
  derived and/or modified sequence
atgttcagcctgagcagcaccgtgcagccccaggtgaccgtgcccctgagccacctgatcaacgccttccacacccccaagaacaccagcgtgagcctgagcggcgtgagcgtgagccagaaccagcacagagacgtggtgcccgagcacgaggcccccagcagcgagcccagcctgaacctgagagacctgggcctgagcgagctgaagatcggccagatcgaccagctggtggagaacctgctgcccggcttctgcaagggcaagaacatcagcagccactggcacaccagccacgtgagcgcccagagcttcttcgagaacaagtacggcaacctggacatcttcagcaccctgagaagcagctgcctgtacagacaccacagcagagccctgcagagcatctgcagcgacctgcagtactggcccgtgttcatccagagcagaggcttcaagaccctgaagagcagaaccagaagactgcagagcaccagcgagagactggccgagacccagaacatcgcccccagcttcgtgaagggcttcctgctgagagacagaggcagcgacgtggagagcctggacaagctgatgaagaccaagaacatccccgaggcccaccaggacgccttcaagaccggcttcgccgagggcttcctgaaggcccaggccctgacccagaagaccaacgacagcctgagaagaaccagactgatcctgttcgtgctgctgctgttcggcatctacggcctgctgaagaaccccttcctgagcgtgagattcagaaccaccaccggcctggacagcgccgtggaccccgtgcagatgaagaacgtgaccttcgagcacgtgaagggcgtggaggaggccaagcaggagctgcaggaggtggtggagttcctgaagaacccccagaagttcaccatcctgggcggcaagctgcccaagggcatcctgctggtgggcccccccggcaccggcaagaccctgctggccagagccgtggccggcgaggccgacgtgcccttctactacgccagcggcagcgagttcgacgagatgttcgtgggcgtgggcgccagcagaatcagaaacctgttcagagaggccaaggccaacgccccctgcgtgatcttcatcgacgagctggacagcgtgggcggcaagagaatcgagagccccatgcacccctacagcagacagaccatcaaccagctgctggccgagatggacggcttcaagcccaacgagggcgtgatcatcatcggcgccaccaacttccccgaggccctggacaacgccctgatcagacccggcagattcgacatgcaggtgaccgtgcccagacccgacgtgaagggcagaaccgagatcctgaagtggtacctgaacaagatcaagttcgaccagagcgtggaccccgagatcatcgccagaggcaccgtgggcttcagcggcgccgagctggagaacctggtgaaccaggccgccctgaaggccgccgtggacggcaaggagatggtgaccatgaaggagctggagttcagcaaggacaagatcctgatgggccccgagagaagaagcgtggagatcgacaacaagaacaagaccatcaccgcctaccacgagagcggccacgccatcatcgcctactacaccaaggacgccatgcccatcaacaaggccaccatcatgcccagaggccccaccctgggccacgtgagcctgctgcccgagaacgacagatggaacgagaccagagcccagctgctggcccagatggacgtgagcatgggcggcagagtggccgaggagctgatcttcggcaccgaccacatcaccaccggcgccagcagcgacttcgacaacgccaccaagatcgccaagagaatggtgaccaagttcggcatgagcgagaagctgggcgtgatgacctacagcgacaccggcaagctgagccccgagacccagagcgccatcgagcaggagatcagaatcctgctgagagacagctacgagagagccaagcacatcctgaagacccacgccaaggagcacaagaacctggccgaggccctgctgacctacgagaccctggacgccaaggagatccagatcgtgctggagggcaagaagctggaggtgagatag

SEQ ID NO: 178821 - DNA, 747 bp, Artificial Sequence
  derived and/or modified sequence
atgtaccaggtgaccgtgcccctgagccacctgatcaacgccttccacacccccaagaacaccagcgtgagcctgagcggcgtgagcgtgagccagaaccagcacagagacgtggtgcccgagcacgaggcccccagcagcgagcccagcctgaacctgagagacctgggcctgagcgagctgaagatcggccagatcgaccagctggtggagaacctgctgcccggcttctgcaagggcaagaacatcagcagccactggcacaccagccacgtgagcgcccagagcttcttcgagaacaagtacggcaacctggacatcttcagcaccctgagaagcagctgcctgtacagacaccacagcagagccctgcagagcatctgcagcgacctgcagtactggcccgtgttcatccagagcagaggcttcaagaccctgaagagcagaaccagaagactgcagagcaccagcgagagactggccgagacccagaacatcgcccccagcttcgtgaagggcttcctgctgagagacagaggcagcgacgtggagagcctggacaagctgatgaagaccaagaacatccccgaggcccaccaggacgccttcaagaccggcttcgccgagggcttcctgaaggcccaggccctgacccagaagaccaacgacagcctgagaagaaccagactgatcctgttcgtgctgctgctgttcggcatctacggcctgctgaagaaccccttctag

SEQ ID NO: 178822 - DNA, 1551 bp, Artificial Sequence
  derived and/or modified sequence
atgaagaccaagaacatccccgaggcccaccaggacgccttcaagaccggcttcgccgagggcttcctgaaggcccaggccctgacccagaagaccaacgacagcctgagaagaaccagactgatcctgttcgtgctgctgctgttcggcatctacggcctgctgaagaaccccttcctgagcgtgagattcagaaccaccaccggcctggacagcgccgtggaccccgtgcagatgaagaacgtgaccttcgagcacgtgaagggcgtggaggaggccaagcaggagctgcaggaggtggtggagttcctgaagaacccccagaagttcaccatcctgggcggcaagctgcccaagggcatcctgctggtgggcccccccggcaccggcaagaccctgctggccagagccgtggccggcgaggccgacgtgcccttctactacgccagcggcagcgagttcgacgagatgttcgtgggcgtgggcgccagcagaatcagaaacctgttcagagaggccaaggccaacgccccctgcgtgatcttcatcgacgagctggacagcgtgggcggcaagagaatcgagagccccatgcacccctacagcagacagaccatcaaccagctgctggccgagatggacggcttcaagcccaacgagggcgtgatcatcatcggcgccaccaacttccccgaggccctggacaacgccctgatcagacccggcagattcgacatgcaggtgaccgtgcccagacccgacgtgaagggcagaaccgagatcctgaagtggtacctgaacaagatcaagttcgaccagagcgtggaccccgagatcatcgccagaggcaccgtgggcttcagcggcgccgagctggagaacctggtgaaccaggccgccctgaaggccgccgtggacggcaaggagatggtgaccatgaaggagctggagttcagcaaggacaagatcctgatgggccccgagagaagaagcgtggagatcgacaacaagaacaagaccatcaccgcctaccacgagagcggccacgccatcatcgcctactacaccaaggacgccatgcccatcaacaaggccaccatcatgcccagaggccccaccctgggccacgtgagcctgctgcccgagaacgacagatggaacgagaccagagcccagctgctggcccagatggacgtgagcatgggcggcagagtggccgaggagctgatcttcggcaccgaccacatcaccaccggcgccagcagcgacttcgacaacgccaccaagatcgccaagagaatggtgaccaagttcggcatgagcgagaagctgggcgtgatgacctacagcgacaccggcaagctgagccccgagacccagagcgccatcgagcaggagatcagaatcctgctgagagacagctacgagagagccaagcacatcctgaagacccacgccaaggagcacaagaacctggccgaggccctgctgacctacgagaccatgcccaagagattcaagctgttcctgagaggcaagagctggaagtag

SEQ ID NO: 178823 - DNA, 2151 bp, Artificial Sequence
  derived and/or modified sequence
atgttcagcttgtccagtacggtgcagccacaggtgacagtcccactttcccatttgatcaacgcattccacacccccaagaatactagcgtgagcctgagcggagtttctgtttcccagaaccagcatcgcgatgtggtcccagagcacgaggcccctagctcagaacctagcctgaatttacgcgaccttggtttgagtgagcttaagatcggacagattgaccaactcgtagagaacttgttacccggcttctgtaaaggcaaaaatatcagcagccactggcacacctctcacgtgagcgcacaatcattttttgagaataagtacggaaatctggacattttctcaactttgaggtcctcctgtctctataggcaccattcaagagcgctccagtccatatgttctgacttacaatactggccagtattcatccagagcagagggtttaaaactcttaagagcaggactcgccggctccaaagtacgtccgaacgcctggctgaaactcagaacatcgcgccttcattcgtcaaggggttcctgctccgggaccggggcagcgacgtcgagtcccttgacaaactgatgaagaccaaaaacatacccgaggcgcaccaagacgcgtttaaaaccgggtttgcagaaggtttcctgaaggcacaggccctcacacagaaaacaaatgattccctgaggcggacccggctcatcctctttgtgttgttactctttgggatttatgggttactaaagaatccctttctgtctgtgcggtttaggaccacgaccggactggattccgccgtggaccccgtgcaaatgaaaaacgtgacatttgaacatgtcaagggagtagaggaggcaaaacaggaacttcaggaggtggtagagttccttaagaatccccaaaaatttaccattcttggcggcaagttgcccaaaggtattctgctggtggggcctcctggcactggcaagaccttgctggctagggccgtggccggcgaggccgacgtccctttctactacgcgtcaggatcagaattcgacgaaatgttcgtgggcgtgggcgcaagcaggatacgtaatctgttccgcgaggctaaggcgaatgccccttgcgtgatttttatcgatgagttagatagtgtgggcggcaagcgcattgagtcccctatgcacccatacagccgacagactattaaccagctcctggctgagatggatggttttaagcccaatgagggagtgatcatcatcggggctactaattttccggaggccttagataatgccctgatcagacccggaagatttgacatgcaggtcaccgtcccccgaccagacgttaaaggtcgcactgagatactgaaatggtatctcaataaaattaaattcgaccagagcgtggatccagagataatcgctagaggcacagtggggtttagcggtgccgagctggagaatcttgtgaatcaggccgctctgaaggcagcagtcgacggcaaggaaatggtgactatgaaggagctggagttcagcaaagataagattttgatggggcccgaacgccggtctgtggagattgacaataaaaataagaccattaccgcttaccatgaatcggggcatgccatcatcgcttactacaccaaagacgccatgcctatcaacaaggccaccattatgccgcgaggtccaacccttggacatgtgagtttgctcccagagaacgaccggtggaatgagaccagggcccagttgttggcgcagatggacgtgtctatgggtggtcgcgtcgcagaagaactcatctttggtaccgatcatattacaactggagcctcatctgactttgataacgccactaagatcgcaaaacggatggttaccaagtttggtatgagtgagaaattgggggtaatgacatacagcgatactgggaaactgagcccagagacacagagcgctattgagcaggaaatacggatcttactcagagactcatatgagagggccaagcatatcctgaaaactcacgcaaaagaacataaaaatcttgccgaggccctgttgacctacgagacactggacgccaaggaaattcagatagtgcttgagggtaaaaaactggaggtcaggtag

SEQ ID NO: 178824 - DNA, 747 bp, Artificial Sequence
  derived and/or modified sequence
atgtatcaggttacggtgccactctctcatctgattaacgctttccacactcctaaaaacaccagcgtcagcttatcgggggttagcgtgtcccagaatcagcacagagatgttgttcccgagcacgaggccccctcaagcgagccttcattgaatctgcgcgatctagggctatcagagctgaagatcggacagattgaccaactcgtggagaacttgttaccagggttttgcaaaggcaaaaatatctcctcccattggcatacctcccatgtcagtgcccagagtttctttgagaataagtatgggaatctcgatatatttagtacactcagatccagctgcctgtaccggcaccactctcgtgccctgcaatccatatgtagcgatttgcagtactggccagttttcattcaatcgcgtggcttcaagacacttaagtcaaggacaagacgccttcagtccacttctgaacgtctggcggagactcagaatatagctccaagcttcgttaaaggatttcttcttcgcgacagaggctcagacgtagagtccttagacaagctcatgaaaaccaaaaatattcccgaggctcaccaggatgctttcaaaaccggatttgccgaaggatttttaaaagcccaggccttgacgcagaagaccaacgatagcctacgaagaacccgcctgatcctctttgtgctcctcctgttcggcatttacggactactcaagaatcccttctag

SEQ ID NO: 178825 - DNA, 1551 bp, Artificial Sequence
  derived and/or modified sequence
atgaagactaagaatatcccagaggcccatcaggacgcgttcaagacaggctttgcggaagggttcctgaaggctcaggctctcacccagaagaccaacgactcactgaggcgcactcggttaattctgttcgtgctccttttgtttggtatctatggtcttctcaagaatccattcctctctgtacgctttcggacaaccaccggcctggactcagcagtcgatcccgtgcaaatgaagaatgttaccttcgagcatgtgaaaggagtggaggaagcaaaacaggaactacaggaggtagttgaatttctgaagaatccacagaagtttacgatcttgggagggaaactccctaagggcattctgctggttgggcctcccggaaccggtaaaactctgctagcgagggccgtagctggcgaggccgatgttcccttctattacgcctcggggtccgagttcgacgagatgttcgtgggggtgggagcatctcgcatcagaaacctgtttcgcgaggcgaaggcaaatgctccttgtgtaattttcattgatgagctggactctgtaggggggaagagaatcgaaagtccaatgcacccttattcccggcaaactataaaccagttgctggctgagatggacgggttcaaacctaatgagggcgtcatcatcattggcgcaactaactttccagaagccctggacaatgcactgattaggccaggccgtttcgacatgcaggttaccgtccccaggccagatgtgaaaggaaggactgagatactaaaatggtacctgaataagatcaagtttgatcagtctgtggacccggagataatcgccaggggcactgtgggattctctggcgctgaacttgaaaatctcgtgaaccaagcagctctgaaagcagctgtagacggcaaagaaatggtgactatgaaagagttggaatttagtaaggataaaattctcatggggcccgaacgtcgatctgttgaaatcgataataagaacaagacgattactgcctaccacgagtccggacatgcaattattgcctactacacaaaggacgccatgcccataaataaagctactattatgcctagaggccccaccttgggccacgtctctctcttgcctgaaaacgatcggtggaacgaaaccagagcacagctgctcgcgcagatggacgtaagtatgggaggtcgggtcgcagaggagctcatctttggaaccgaccacattacaaccggcgcctcttctgacttcgataatgccacaaagatcgctaaacggatggtcacaaagtttgggatgtcggaaaaactgggggtgatgacctacagcgacaccgggaagttgtctcccgaaacacaatctgctatcgagcaggaaatcaggatcctcctgagggattcctacgaaagggctaagcacattcttaaaacccacgccaaggagcacaaaaacctagccgaggccctgctcacttatgaaactatgcccaagcgtttcaaactatttttacgcggtaagtcctggaaatag

SEQ ID NO: 178826 - DNA, 2151 bp, Artificial Sequence
  derived and/or modified sequence
atgttcagcctgagcagcacagtgcagccccaggtgacagtgcccctgagccacctgatcaatgccttccacacccccaagaacacctctgtgtccctgagcggcgtgtctgtgtcccagaaccagcacagagatgtggtgcctgagcacgaggcccccagcagcgagcccagcctgaacctgcgggacctgggcctgtctgagctgaagattggccagattgaccagctggtggagaacctgctgcccggcttctgcaagggcaagaacatcagcagccactggcacaccagccacgtgtctgcccagagcttctttgagaacaagtatggcaacctggacatcttcagcaccctgcggagcagctgcctgtaccgccaccacagccgggccctgcagagcatctgcagcgacctgcagtactggcctgtgttcatccagagccggggcttcaagaccctgaagagcaggacccggcggctgcagagcaccagcgagcggctggccgagacccagaacatcgcccccagctttgtgaagggcttcctgctgcgggaccggggcagtgatgtggagagcctggacaagctgatgaagaccaagaacatccctgaggcccaccaggatgccttcaagacaggctttgctgagggcttcctgaaggcccaggccctgacccagaagaccaatgacagcctgcggaggaccaggctcatcctgtttgtgctgctgctgtttggcatctacggcctgctgaagaaccccttcctgtctgtgcgcttccgcaccaccaccggcctggacagcgctgtggaccctgtgcagatgaagaatgtgacctttgaacatgtgaagggcgtggaggaggccaagcaggagctgcaggaggtggtggagttcctgaagaacccccagaagttcaccatcctgggcggcaagctgcccaagggcatcctgctggtgggccccccaggcaccgggaagaccctgctggcccgggctgtggccggggaggctgatgtgcccttctactatgccagcggcagcgagtttgatgagatgtttgtgggcgtgggcgccagccgcatccggaacctcttccgggaggccaaggccaatgccccctgcgtcatcttcattgatgagctggacagcgtgggcggcaagagaattgagagccccatgcacccctacagccggcagaccatcaaccagctgctggccgagatggatggcttcaagcccaatgaaggagtcatcatcatcggggccaccaacttccctgaggccctggacaatgccctgatccggcccggccgctttgacatgcaggtgacagtgcccaggccagatgtgaagggccgcacagagatcctgaagtggtacctgaacaagatcaagtttgaccagagcgtggaccctgagatcatcgcccggggcaccgtgggcttctctggagctgagctggagaacctggtgaaccaggccgccctgaaggctgctgtggatggcaaggagatggtgaccatgaaggagctggagttcagcaaggacaagatcctgatgggccctgagcggcgctctgtggagattgacaacaagaacaagaccatcacagcctaccacgagagcggccacgccatcatcgcctactacaccaaggatgccatgcccatcaacaaggccaccatcatgccccggggccccaccctgggccacgtgtccctgctgcctgaaaatgaccgctggaatgagacccgggcccagctgctggcccagatggatgtgtccatgggcggccgggtggccgaggagctgatcttcggcacagaccacatcaccactggagccagcagtgactttgacaatgccaccaagatcgccaagaggatggtgaccaagtttggcatgtctgagaagctgggcgtgatgacctacagcgacaccgggaagctgagccctgagacccagagcgccatcgagcaggagatccgcatcctgctgcgggacagctatgaaagagccaagcacatcctgaagacccacgccaaggagcacaagaacctggccgaggccctgctgacctatgagaccctggatgccaaggagatccagatcgtgctggagggcaagaagctggaggtgaggtag

SEQ ID NO: 178827 - DNA, 747 bp, Artificial Sequence
  derived and/or modified sequence
atgtaccaggtgacagtgcccctgagccacctgatcaatgccttccacacccccaagaacacctctgtgtccctgagcggcgtgtctgtgtcccagaaccagcacagagatgtggtgcctgagcacgaggcccccagcagcgagcccagcctgaacctgcgggacctgggcctgtctgagctgaagattggccagattgaccagctggtggagaacctgctgcccggcttctgcaagggcaagaacatcagcagccactggcacaccagccacgtgtctgcccagagcttctttgagaacaagtatggcaacctggacatcttcagcaccctgcggagcagctgcctgtaccgccaccacagccgggccctgcagagcatctgcagcgacctgcagtactggcctgtgttcatccagagccggggcttcaagaccctgaagagcaggacccggcggctgcagagcaccagcgagcggctggccgagacccagaacatcgcccccagctttgtgaagggcttcctgctgcgggaccggggcagtgatgtggagagcctggacaagctgatgaagaccaagaacatccctgaggcccaccaggatgccttcaagacaggctttgctgagggcttcctgaaggcccaggccctgacccagaagaccaatgacagcctgcggaggaccaggctcatcctgtttgtgctgctgctgtttggcatctacggcctgctgaagaaccccttctag

SEQ ID NO: 178828 - DNA, 1551 bp, Artificial Sequence
  derived and/or modified sequence
atgaagaccaagaacatccctgaggcccaccaggatgccttcaagacaggctttgctgagggcttcctgaaggcccaggccctgacccagaagaccaatgacagcctgcggaggaccaggctcatcctgtttgtgctgctgctgtttggcatctacggcctgctgaagaaccccttcctgtctgtgcgcttccgcaccaccaccggcctggacagcgctgtggaccctgtgcagatgaagaatgtgacctttgagcacgtgaagggcgtggaggaggccaagcaggagctgcaggaggtggtggagttcctgaagaacccccagaagttcaccatcctgggcggcaagctgcccaagggcatcctgctggtgggccccccaggcaccgggaagaccctgctggcccgggctgtggccggggaggctgatgtgcccttctactatgccagcggcagcgagtttgatgagatgtttgtgggcgtgggcgccagccgcatccggaacctcttccgggaggccaaggccaatgccccctgtgtgatcttcattgatgagctggacagcgtgggcggcaagagaattgagagccccatgcacccctacagccggcagaccatcaaccagctgctggccgagatggatggcttcaagcccaatgaaggagtcatcatcattggagccaccaacttccctgaggccctggacaatgccctgatccggcccggccgctttgacatgcaggtgacagtgcccaggccagatgtgaagggccgcacagagatcctgaagtggtacctgaacaagatcaagtttgaccagagcgtggaccctgagatcatcgcccggggcaccgtgggcttcagcggggctgagctggagaacctggtgaaccaggccgccctgaaggctgctgtggatggcaaggagatggtgaccatgaaggagctggagttcagcaaggacaagatcctgatgggccctgagaggagatctgtggagattgacaacaagaacaagaccatcacagcctaccatgaaagtggccacgccatcatcgcctactacaccaaggatgccatgcccatcaacaaggccaccatcatgccccggggccccaccctgggccacgtgtccctgctgcctgaaaatgaccgctggaatgagacccgggcccagctgctggcccagatggatgtgtccatgggcggccgggtggccgaggagctgatctttggaacagaccacatcaccaccggggccagcagtgactttgacaatgccaccaagatcgccaagaggatggtgaccaagtttggcatgtctgagaagctgggcgtgatgacctacagcgacaccgggaagctgagccctgagacccagagcgccatcgagcaggagatccgcatcctgctgcgggacagctatgagcgggccaagcacatcctgaagacccacgccaaggagcacaagaacctggccgaggccctgctgacctatgagaccatgcccaagcgcttcaagctgttcctgcggggcaagtcctggaagtag

SEQ ID NO: 178829 - DNA, 2151 bp, Artificial Sequence
  derived and/or modified sequence
atgttcagcctgagcagcaccgtgcagccccaggtgaccgtgcccctatcgcaccttatcaacgcctttcacactcccaagaatacttctgttagcttgtctggtgtgtctgttagccagaaccagcatcgggatgtcgtgcccgagcacgaagcaccctcttctgagccgagcctgaatctgcgcgatctgggtctgagtgagctgaagattggccagattgatcaacttgtggagaatctgcttcctggcttctgcaaaggaaagaatatctcctcccactggcacactagtcacgtgagcgctcagtccttctttgagaataagtacggtaatctcgatattttcagtacactaagaagctcttgcttatatcgccaccactcaagggctctgcagtcaatctgttccgaccttcagtattggcccgtcttcattcagagcaggggttttaagacacttaagtctaggacacgaaggctgcagtccaccagcgaacgtctggcagagactcagaacatagccccatcatttgtgaagggcttcttgctaagagatcggggatcagatgtagagtctttagataagctcatgaaaactaagaatatccctgaggctcaccaagatgccttcaaaacaggatttgcagagggattcctcaaggcccaggcactcacgcagaaaacaaacgactcactgcggcgcacaaggctgatcctattcgtcctgctgctctttgggatttatggcctgctcaaaaatccctttcttagtgtgaggttcagaaccactactgggctagattccgctgtggaccctgtacagatgaagaatgtgactttcgagcacgtgaagggcgtggaggaggccaagcaggagttgcaggaggtggtagagttcctgaagaacccccagaaatttacgatacttggcggcaaactcccgaaggggatcctcctcgtgggacctccaggcactggaaagactctcttggccagggctgttgctggggaggctgacgtacctttctactatgcctcaggttcagagtttgacgagatgtttgtgggcgtgggtgctagtcgaattcggaatttgttccgggaggctaaggccaatgcaccctgcgtgattttcatcgacgagctggattctgttgggggcaaacgtattgaaagcccaatgcatccgtacagccgccagaccattaaccagttactagcagagatggacgggtttaaaccaaacgaaggcgtgatcatcatcggcgcaacaaacttccccgaggccctggataatgctttgatcaggcccggtcggttcgatatgcaagtcaccgtgccccgccccgacgtcaaaggccgaaccgaaattctgaagtggtacttgaacaagattaagttcgaccagtccgtcgacccggagattattgctcgaggaacggtgggctttagcggggctgagctcgaaaacttagtcaatcaagctgctctgaaggcagctgtggatgggaaagaaatggtgacaatgaaggagctggagttctcaaaagacaaaattctcatgggacccgaaagaaggtctgtcgaaattgacaataagaataaaacaattaccgcataccacgagagcggccatgctataatcgcctactacaccaaggacgctatgcctattaataaggctacaattatgcctaggggaccgaccctggggcacgtttccctgcttcccgagaacgatcgttggaacgagacaagggcccagctgctagcccagatggatgtctctatgggcgggcgcgtggctgaagaactgatttttggcaccgaccacataactacgggggccagtagcgattttgataacgccacaaagattgcaaaacgcatggtgaccaagtttggaatgtctgaaaaactgggcgtgatgacttattcggacacggggaaattgtcacctgagacgcagtcagccatagagcaagagatccggatcttgcttcgcgattcctatgagagggccaaacatatcttaaagacacacgccaaggagcacaagaacctggctgaggctcttttgacatacgaaacattagacgccaaggagatccagatagtcctggaaggcaaaaagctggaggtgcgttag

SEQ ID NO: 178830 - DNA, 747 bp, Artificial Sequence
  derived and/or modified sequence
atgtaccaggtgaccgtgcccctgagccacctgatcaacgccttccacaccccaaagaatacttccgtgtctctcagcggcgttagcgttagccaaaatcaacaccgggacgtagtgcccgaacatgaagctcctagctctgagccctcactgaacctgagagacctggggctttccgagctcaaaattgggcaaatcgatcagctggtcgagaacttgctccctggtttctgtaagggtaagaatataagttctcattggcacacaagccatgtgagtgcccagtcgtttttcgagaataaatacgggaatttagacatattcagcacgctgagaagtagttgtttgtacagacatcacagcagagcgctacagtccatttgcagcgacctgcaatactggccagtctttattcaatcccggggatttaaaaccctcaaatcgaggacaagacgcttacagagcacctcagaacggttggccgagacacagaacattgccccatcctttgtgaaaggctttctactcagggataggggctcggatgtggagtcacttgacaagctcatgaaaactaagaacataccagaggcccaccaggatgccttcaagacgggtttcgctgaagggtttctgaaagcccaagctctgacccaaaaaaccaacgattcccttcgtaggacgcgccttatactattcgtgctgctcttgtttggcatttatggtctcttaaagaacccattctag

SEQ ID NO: 178831 - DNA, 1551 bp, Artificial Sequence
  derived and/or modified sequence
atgaagaccaagaacatccccgaggcccaccaggacgccttcaagactggctttgcagagggcttcttaaaagctcaggcccttactcagaaaaccaacgactcactgcgccggactcgcctgatcctgtttgtgctcctcctctttggaatttatggattactgaagaatcctttcttatcagtgaggtttcgtaccacaacagggttagactctgctgttgacccagtgcagatgaaaaatgtcacttttgagcacgtgaaaggggtggaagaggccaagcaggaattgcaggaggtggtcgaatttctgaaaaatccgcagaagtttacgatccttggggggaagttaccgaaggggatcttgctggtgggacccccggggacaggcaaaaccttgctcgctagagcggtagcgggggaggctgatgtgcctttctactacgctagtggcagcgagtttgacgagatgtttgtgggggtaggcgcatctcggatcaggaacctgttccgtgaggcaaaagctaacgccccctgcgtgattttcatcgatgaacttgatagcgtcgggggcaagaggattgaatctccaatgcatccatacagcaggcagacaattaatcagttgctggccgagatggacggctttaagccgaacgagggagtgattataataggagctactaacttccccgaggccttggacaatgcccttatccggcccggtcggttcgacatgcaggtcacggtgcctcgccccgatgtgaagggtagaaccgaaattctcaaatggtacctgaacaagattaaattcgaccagtccgttgatccagaaatcatcgcccgcggaacggtaggttttagcggagcagagctggaaaacttggtgaaccaagccgcccttaaagcagcagttgatggaaaggaaatggtgaccatgaaggagctagaatttagcaaagacaagatcttgatgggaccagagaggagatccgtggagatcgacaacaagaataaaacaatcacagcttatcatgagagtgggcacgccattatagcttactacaccaaagatgcgatgccgataaataaggccaccattatgccacgcggacctacgctgggccacgtgagcctacttcccgaaaatgacagatggaacgaaacgagggcccagctacttgcccagatggatgttagtatgggcggaagggtcgccgaagaactgattttcgggaccgatcatatcaccactggggcttctagcgacttcgacaatgcaacaaagatcgccaaacgcatggtcacaaaattcggaatgtccgagaaacttggcgtgatgacttacagtgacaccggaaaactatccccagagacacaatcagccatcgagcaggaaattcgaatactgctgcgagactcctacgaacgcgccaagcacattttaaagacgcatgccaaagaacataagaatctggccgaagcgctgctgacttatgagaccatgccgaagcggtttaaactcttcctcaggggcaagagctggaagtag

SEQ ID NO: 178832 - DNA, 2151 bp, Artificial Sequence
  derived and/or modified sequence
atgttctcgctgagcagtactgtacaaccgcaggtgacagtgcccttaagtcacttgatcaacgcgttccatacccccaaaaacacgagtgtgagtttgtctggcgtgtcagtaagtcaaaaccagcaccgtgatgtggtgccagaacacgaagccccaagttctgagcctagtctcaatttgcgcgatttagggctgagcgaacttaaaattggacagattgaccagttggtcgaaaaccttctccccggattctgcaaggggaagaatatctccagccattggcacacatcacacgtatctgcgcagagctttttcgaaaacaagtacggtaacctcgacattttctctactctgaggtcctcctgcctttatcggcatcatagtagggcgttacagagtatctgcagtgacctccagtactggccagttttcattcagagtagaggatttaaaactctgaagtcgagaacacggaggctgcagtccacctcagaacgtcttgcagaaacgcagaacattgctccgtcattcgtcaagggcttcctgctccgggatcgaggcagtgatgtagaatcccttgataagctcatgaaaactaagaacattcctgaggcacaccaggatgctttcaaaacaggttttgcggagggctttctaaaggctcaagctctgacccagaagactaatgacagcctccgacggacccgactgatcctcttcgtcctgctgcttttcggaatttacggtctgcttaagaaccctttcttaagtgtcagatttagaaccacaactggcctggacagcgcagtggaccccgtgcagatgaaaaacgtcacctttgaacacgtcaaaggggtagaggaggctaaacaggagctgcaggaggtggtggagttcctgaaaaatccacaaaaatttacaatcctgggaggcaagctgcctaaaggaattctattggtgggtcccccaggtactggcaagaccctgttagccagggccgtagcaggagaagccgatgtcccattctactacgcatccggctcggaatttgatgaaatgtttgtcggtgtgggagcgtcgagaatacgtaacctcttccgggaagccaaagctaacgctccctgcgttatcttcatcgacgaactggactcagtcggtggtaagaggattgagtctcctatgcatccgtatagcagacagaccatcaaccagctgcttgctgaaatggacgggtttaagccaaatgagggcgtcatcattattggagccactaactttccagaggcgctggacaacgcactcatacgccctggccgattcgacatgcaggttactgtgccaaggccagatgtgaagggacgcacagaaatcttaaaatggtacctcaacaaaattaaatttgaccaatctgtggacccagagatcatagccaggggcaccgtgggctttagcggtgccgaactggaaaacctagtgaaccaggcagccctaaaagctgctgtcgacgggaaggagatggtgaccatgaaagagctcgagttctcgaaggacaaaatcctaatgggccctgaaaggcggagtgtggaaatcgacaataagaacaaaaccataacagcgtatcatgaatctggtcatgcaattattgcatactataccaaagacgccatgcctatcaacaaggcaacaattatgcccagggggcctaccctggggcatgtatctcttctgcctgaaaatgatagatggaacgaaactagagctcaactgttagctcaaatggatgtgagcatgggtggcagagttgcagaggagcttatcttcgggaccgaccatataaccacaggcgcatcttcagactttgacaatgccaccaaaattgccaaaagaatggtgactaaattcggcatgtcagagaagctgggggttatgacctactccgacacaggtaagctgtcccccgagacacagtctgccattgaacaagaaatcagaatcctgcttcgggacagctacgagagggccaaacacatattgaagacccacgctaaggagcacaagaatctcgctgaggcactgctaacatatgaaactctcgacgcaaaagaaattcagattgtgctcgaaggaaagaaacttgaggtaaggtag

SEQ ID NO: 178833 - DNA, 747 bp, Artificial Sequence
  derived and/or modified sequence
atgtaccaggtcacagtacccctgagccacctgattaatgcttttcacactcccaagaatacttcagttagtttatctggagtttccgtctcccagaatcagcatcgcgatgtcgtgcccgagcacgaggccccaagtagcgagccaagcctgaatctgagagacctggggttatccgagctaaagatcgggcaaatagatcaactagttgaaaacctgctgccaggcttctgcaagggtaagaacatttcttcccactggcacactagccatgtcagtgcccagagcttctttgagaataaatacggaaatttggatatcttttcgactcttcgcagtagttgtctgtacagacaccactcccgagctttgcagtccatttgctctgatctgcagtattggccagtgttcatccagagtaggggctttaagacgctaaaatcgcgcacccgcaggttacagtccactagtgagaggctggccgagacacagaatatcgctccttcatttgtcaagggcttcctcctgagggatagggggtccgatgtcgagtcactggacaaattaatgaagacgaaaaatatccccgaagcccatcaggatgcattcaagacagggttcgccgagggcttccttaaggcccaggcattgacacagaaaaccaatgattcactgagaaggacacggctaatcctgttcgtactgctcctgtttggaatatacgggctgctaaaaaatcctttttag

SEQ ID NO: 178834 - DNA, 1551 bp, Artificial Sequence
  derived and/or modified sequence
atgaagaccaaaaatattccggaagcccaccaagatgcttttaagaccggcttcgctgagggattcttgaaggcccaggcgctcacacagaagaccaacgattcattgcgtcgtacaaggctgatcctctttgtcctgttgctattcgggatctatgggttgctgaagaacccgttcctctctgtccgcttcaggacaaccacggggcttgacagcgctgtggacccggtgcagatgaaaaacgttacattcgagcatgtgaaaggcgttgaggaagcaaaacaagaactgcaagaggtcgtcgaattcttgaagaatcctcagaaatttactattctgggtgggaagcttcctaaaggtattttgctggtggggcctcccggaactggcaagactctccttgccagagccgtggcaggagaggcagacgtgcctttttactatgcctccggctccgagttcgacgaaatgtttgttggtgtgggagctagccgcatccggaatctgtttcgggaagccaaggctaacgcaccctgtgtcatcttcatcgatgagctagacagcgtcggcggtaagaggatagaatctcccatgcatccgtactctcgccagaccatcaaccagcttctggctgaaatggacggatttaaaccaaatgagggcgttatcatcatcggagcaactaattttcccgaggctttagataatgcacttattcggccagggcgatttgatatgcaggtgacagtgcccaggcctgatgtgaaggggagaaccgagattcttaaatggtacctgaacaaaattaaatttgatcagagtgtagatcccgagatcatcgcgaggggaactgtggggttcagcggtgccgaactcgagaatctcgtaaatcaggccgctcttaaagctgccgtagatgggaaagagatggttaccatgaaggagttggagttctctaaggacaagatactcatgggaccggagaggaggtccgtcgagatcgacaataaaaacaagaccatcacagcatatcacgagtccgggcatgcgatcattgcttactatacaaaagatgctatgcccatcaacaaggccaccattatgcctagaggtccaactctgggccacgtttcactgctccccgagaatgaccgctggaacgaaactcgggctcaactgctcgcccagatggacgtgagcatgggcggaagggtagctgaggaactgatatttggaacggaccacattaccactggagctagctccgacttcgataatgccaccaagatcgctaagaggatggttaccaaattcggcatgagtgagaaattgggggtgatgacctactctgacacaggaaaactaagcccagagacacaatctgcaattgagcaagagatacgcatcctgctgcgcgattcctacgagcgcgcaaaacacattttgaagacgcatgccaaggagcataaaaatctggcggaggcactgctgacatacgagacgatgcccaagagatttaagctgtttttgcgtggcaagtcttggaagtag

SEQ ID NO: 178835 - DNA, 3856 bp, Artificial Sequence
  derived and/or modified sequence
ggcggattgtctgtcgttgcagtagctgtaggaaggggaggccattttccgtttctgggaggagtgaggggcaacgggtcggagaaaaaggaaaaaagaagggctcagcgcctccccgccgggccgtggacagaggggcacagtttcggcaggcgggtgaggtcgctgagggcccgccggagatgttttccttgtcgagcacggtgcaaccccaggttacagttcctctgagtcatctcatcaatgccttccatacaccaaaaaacacttctgtttctctcagtggagtgtcagtttctcaaaaccagcatcgagatgtagttcctgagcatgaggctcccagcagtgagccttcacttaacttaagggaccttggattatctgaactaaaaattggacagattgatcagctggtagaaaatctacttcctggattttgtaaaggcaaaaacatttcttcccattggcatacatcccatgtctctgcacaatccttctttgaaaataaatatggtaacttagatatatttagtacattacgttcctcttgcttgtatcgacatcattcaagagctcttcaaagcatttgttcagatcttcagtactggccagttttcatacagtctcggggttttaaaactttgaaatcaaggacacgacgtctccagtctacctccgagagattagctgaaacacagaatatagcgccatcattcgtgaaggggtttcttttgcgggacagaggatcagatgttgagagtttggacaaactcatgaaaaccaaaaatatacctgaagctcaccaagatgcatttaaaactggttttgcggaaggttttctgaaagctcaagcactcacacaaaaaaccaatgattccctaaggcgaacccgtctgattctcttcgttctgctgctattcggcatttatggacttctaaaaaacccatttttatctgtccgcttccggacaacaacagggcttgattctgcagtagatcctgtccagatgaaaaatgtcacctttgaacatgttaaaggggtggaggaagctaaacaagaattacaggaagttgttgaattcttgaaaaatccacaaaaatttactattcttggaggtaaacttccaaaaggaattcttttagttggacccccagggactggaaagacacttcttgcccgagctgtggcgggagaagctgatgttcctttttattatgcttctggatccgaatttgatgagatgtttgtgggtgtgggagccagccgtatcagaaatctttttagggaagcaaaggcgaatgctccttgtgttatatttattgatgaattagattctgttggtgggaagagaattgaatctccaatgcatccatattcaaggcagaccataaatcaacttcttgctgaaatggatggttttaaacccaatgaaggagttatcataataggagccacaaacttcccagaggcattagataatgccttaatacgtcctggtcgttttgacatgcaagttacagttccaaggccagatgtaaaaggtcgaacagaaattttgaaatggtatctcaataaaataaagtttgatcaatccgttgatccagaaattatagctcgaggtactgttggcttttccggagcagagttggagaatcttgtgaaccaggctgcattaaaagcagctgttgatggaaaagaaatggttaccatgaaggagctggagttttccaaagacaaaattctaatggggcctgaaagaagaagtgtggaaattgataacaaaaacaaaaccatcacagcatatcatgaatctggtcatgccattattgcatattacacaaaagatgcaatgcctatcaacaaagctacaatcatgccacgggggccaacacttggacatgtgtccctgttacctgagaatgacagatggaatgaaactagagcccagctgcttgcacaaatggatgttagtatgggaggaagagtggcagaggagcttatatttggaaccgaccatattacaacaggtgcttccagtgattttgataatgccactaaaatagcaaagcggatggttaccaaatttggaatgagtgaaaagcttggagttatgacctacagtgatacagggaaactaagtccagaaacccaatctgccatcgaacaagaaataagaatccttctaagggactcatatgaacgagcaaaacatatcttgaaaactcatgcaaaggagcataagaatctcgcagaagctttattgacctatgagactttggatgccaaagagattcaaattgttcttgaggggaaaaagttggaagtgagatgataactctcttgatatggatgcttgctggttttattgcaagaatacaagtagcattgcagtagtctacttttacaacgctttcccctcattcttgatgtggtgtaattgaagggtgtgaaatgctttgtcaatcatttgtcacatttatccagtttgggttattctcattatgacacctattgcaaattagcatcccatggcaaatatattttgaaaaaataaagaactatcaggattgaaaacagctcttttgaggaatgtcaattagttattaagttgaaagtaattaatgattttatgtttggttactctactagatttgataaaaattgtgcctttagccttctatatacatcagtggaaacttaagatgcagtaattatgttccagattgaccatgaataaaatattttttaatctaaatgtagagaagttgggattaaaagcagtctcggaaacacagagccaggaatatagccttttggcatggtgccatggctcacatctgtaatcccagcacttttggaggctgaggcgggtggattgcttgaggccaggagttcgagaccagcctggccaacgtggtgaaacgctgtctctactaaaatacaaaaaaatagggctgggcgcggttgctcacgcctgtaatcccagcacttttcagaggccaaggcgggcaaatcacctgaggtcaagagtttgagaccagcctggccaacatggtgaaaccccatctctactaaacatgcaaaaattacctgggcatggtggcaggtgcttataatcccagctactctgggggccaaggcaggagaattgcttgagcctgggagatggaggttgcagtgagctgagatcatgccactgcactccagcctgggcaacagagcaagactctgcctcaaaaaaaaattaaaataaatttaaatacaaaaaaaaatagccaggtgtggggtgcatgcctggaatcccagctacttgagaggctgaggcacgagaattgcttgaacccaggaggtggaggttgcagtgagccaagatcacaggagccactgcactccagcctgggtgacagagtgagactctgtctcaaaaaaaaattaaataaattattataacctttcagaaatgctgtgtgcattttcatgttcttttttttagcattactgtcactctccctaatgaaatgtacttcagagaagcagtattttgttaaataaatacataacctcattctgaataatgtccctcattttgactataactgtgcttggtttcaaaagcaaaattaaacaaaaatctcagtcccctccgaagtgaactttgtgttaccctgcgtcagaaatgccaagttgtgtttacttttcattcagattttgtgaatatgaacatgctgttataggatctacagatgaatatttaactcaatagaaaaattattttagaacacattgtattggtattacaaccagattatattcttgacgttgacttcattaaaattatctacaatttcctaataa

SEQ ID NO: 178836 - DNA, 986 bp, Artificial Sequence
  derived and/or modified sequence
gtagctgtaggaaggggaggccattttccgtttctgggaggagtgaggggcaacgggtcggagaaaaaggaaaaaagaagggctcagcgcctccccgccgggccgtggacagaggggcacagtttcggcaggcgggtgaggtcgctgagggcccgccggagatgttttccttgtcgagcacggtgcaaccccagtactggctaacaaactgaagcagctgcttgttattgggcatcagttatgtaccaggttacagttcctctgagtcatctcatcaatgccttccatacaccaaaaaacacttctgtttctctcagtggagtgtcagtttctcaaaaccagcatcgagatgtagttcctgagcatgaggctcccagcagtgagccttcacttaacttaagggaccttggattatctgaactaaaaattggacagattgatcagctggtagaaaatctacttcctggattttgtaaaggcaaaaacatttcttcccattggcatacatcccatgtctctgcacaatccttctttgaaaataaatatggtaacttagatatatttagtacattacgttcctcttgcttgtatcgacatcattcaagagctcttcaaagcatttgttcagatcttcagtactggccagttttcatacagtctcggggttttaaaactttgaaatcaaggacacgacgtctccagtctacctccgagagattagctgaaacacagaatatagcgccatcattcgtgaaggggtttcttttgcgggacagaggatcagatgttgagagtttggacaaactcatgaaaaccaaaaatatacctgaagctcaccaagatgcatttaaaactggttttgcggaaggttttctgaaagctcaagcactcacacaaaaaaccaatgattccctaaggcgaacccgtctgattctcttcgttctgctgctattcggcatttatggacttctaaaaaacccattttt

SEQ ID NO: 178837 - protein, 970 aa, Artificial Sequence
  derived and/or modified sequence
MATCIGEKIEDFKVGNLLGKGSFAGVYRAESIHTGLEVAIKMIDKKAMYKAGMVQRVQNEVKIHCQLKHPSILELYNYFEDSNYVYLVLEMCHNGEMNRYLKNRVKPFSENEARHFMHQIITGMLYLHSHGILHRDLTLSNLLLTRNMNIKIADFGLATQLKMPHEKHYTLCGTPNYISPEIATRSAHGLESDVWSLGCMFYTLLIGRPPFDTDTVKNTLNKVVLADYEMPSFLSIEAKDLIHQLLRRNPADRLSLSSVLDHPFMSRNSSTKSKDLGTVEDSIDSGHATISTAITASSSTSISGSLFDKRRLLIGQPLPNKMTVFPKNKSSTDFSSSGDGNSFYTQWGNQETSNSGRGRVIQDAEERPHSRYLRRAYSSDRSGTSNSQSQAKTYTMERCHSAEMLSVSKRSGGGENEERYSPTDNNANIFNFFKEKTSSSSGSFERPDNNQALSNHLCPGKTPFPFADPTPQTETVQQWFGNLQINAHLRKTTEYDSISPNRDFQGHPDLQKDTSKNAWTDTKVKKNSDASDNAHSVKQQNTMKYMTALHSKPEIIQQECVFGSDPLSEQSKTRGMEPPWGYQNRTLRSITSPLVAHRLKPIRQKTKKAVVSILDSEEVCVELVKEYASQEYVKEVLQISSDGNTITIYYPNGGRGFPLADRPPSPTDNISRYSFDNLPEKYWRKYQYASRFVQLVRSKSPKITYFTRYAKCILMENSPGADFEVWFYDGVKIHKTEDFIQVIEKTGKSYTLKSESEVNSLKEEIKMYMDHANEGHRICLALESIISEEERKTRSAPFFPIIIGRKPGSTSSPKALSPPPSVDSNYPTRERASFNRMVMHSAASPTQAPILNPSMVTNEGLGLTTTASGTDISSNSLKDCLPKSAQLLKSVFVKNVGWATQLTSGAVWVQFNDGSQLVVQAGVSSISYTSPNGQTTRYGENEKLPDYIKQKLQCLSSILLMFSNPTPNFH

SEQ ID NO: 178838 - protein, 929 aa, Artificial Sequence
  derived and/or modified sequence
MIDKKAMYKAGMVQRVQNEVKIHCQLKHPSILELYNYFEDSNYVYLVLEMCHNGEMNRYLKNRVKPFSENEARHFMHQIITGMLYLHSHGILHRDLTLSNLLLTRNMNIKIADFGLATQLKMPHEKHYTLCGTPNYISPEIATRSAHGLESDVWSLGCMFYTLLIGRPPFDTDTVKNTLNKVVLADYEMPSFLSIEAKDLIHQLLRRNPADRLSLSSVLDHPFMSRNSSTKSKDLGTVEDSIDSGHATISTAITASSSTSISGSLFDKRRLLIGQPLPNKMTVFPKNKSSTDFSSSGDGNSFYTQWGNQETSNSGRGRVIQDAEERPHSRYLRRAYSSDRSGTSNSQSQAKTYTMERCHSAEMLSVSKRSGGGENEERYSPTDNNANIFNFFKEKTSSSSGSFERPDNNQALSNHLCPGKTPFPFADPTPQTETVQQWFGNLQINAHLRKTTEYDSISPNRDFQGHPDLQKDTSKNAWTDTKVKKNSDASDNAHSVKQQNTMKYMTALHSKPEIIQQECVFGSDPLSEQSKTRGMEPPWGYQNRTLRSITSPLVAHRLKPIRQKTKKAVVSILDSEEVCVELVKEYASQEYVKEVLQISSDGNTITIYYPNGGRGFPLADRPPSPTDNISRYSFDNLPEKYWRKYQYASRFVQLVRSKSPKITYFTRYAKCILMENSPGADFEVWFYDGVKIHKTEDFIQVIEKTGKSYTLKSESEVNSLKEEIKMYMDHANEGHRICLALESIISEEERKTRSAPFFPIIIGRKPGSTSSPKALSPPPSVDSNYPTRERASFNRMVMHSAASPTQAPILNPSMVTNEGLGLTTTASGTDISSNSLKDCLPKSAQLLKSVFVKNVGWATQLTSGAVWVQFNDGSQLVVQAGVSSISYTSPNGQTTRYGENEKLPDYIKQKLQCLSSILLMFSNPTPNFH

SEQ ID NO: 178839 - DNA, 2913 bp, Artificial Sequence
  derived and/or modified sequence
atggccacctgcatcggcgagaagatcgaggacttcaaggtgggcaacctgctgggcaagggcagcttcgccggcgtgtacagagccgagagcatccacaccggcctggaggtggccatcaagatgatcgacaagaaggccatgtacaaggccggcatggtgcagagagtgcagaacgaggtgaagatccactgccagctgaagcaccccagcatcctggagctgtacaactacttcgaggacagcaactacgtgtacctggtgctggagatgtgccacaacggcgagatgaacagatacctgaagaacagagtgaagcccttcagcgagaacgaggccagacacttcatgcaccagatcatcaccggcatgctgtacctgcacagccacggcatcctgcacagagacctgaccctgagcaacctgctgctgaccagaaacatgaacatcaagatcgccgacttcggcctggccacccagctgaagatgccccacgagaagcactacaccctgtgcggcacccccaactacatcagccccgagatcgccaccagaagcgcccacggcctggagagcgacgtgtggagcctgggctgcatgttctacaccctgctgatcggcagaccccccttcgacaccgacaccgtgaagaacaccctgaacaaggtggtgctggccgactacgagatgcccagcttcctgagcatcgaggccaaggacctgatccaccagctgctgagaagaaaccccgccgacagactgagcctgagcagcgtgctggaccaccccttcatgagcagaaacagcagcaccaagagcaaggacctgggcaccgtggaggacagcatcgacagcggccacgccaccatcagcaccgccatcaccgccagcagcagcaccagcatcagcggcagcctgttcgacaagagaagactgctgatcggccagcccctgcccaacaagatgaccgtgttccccaagaacaagagcagcaccgacttcagcagcagcggcgacggcaacagcttctacacccagtggggcaaccaggagaccagcaacagcggcagaggcagagtgatccaggacgccgaggagagaccccacagcagatacctgagaagagcctacagcagcgacagaagcggcaccagcaacagccagagccaggccaagacctacaccatggagagatgccacagcgccgagatgctgagcgtgagcaagagaagcggcggcggcgagaacgaggagagatacagccccaccgacaacaacgccaacatcttcaacttcttcaaggagaagaccagcagcagcagcggcagcttcgagagacccgacaacaaccaggccctgagcaaccacctgtgccccggcaagacccccttccccttcgccgaccccaccccccagaccgagaccgtgcagcagtggttcggcaacctgcagatcaacgcccacctgagaaagaccaccgagtacgacagcatcagccccaacagagacttccagggccaccccgacctgcagaaggacaccagcaagaacgcctggaccgacaccaaggtgaagaagaacagcgacgccagcgacaacgcccacagcgtgaagcagcagaacaccatgaagtacatgaccgccctgcacagcaagcccgagatcatccagcaggagtgcgtgttcggcagcgaccccctgagcgagcagagcaagaccagaggcatggagcccccctggggctaccagaacagaaccctgagaagcatcaccagccccctggtggcccacagactgaagcccatcagacagaagaccaagaaggccgtggtgagcatcctggacagcgaggaggtgtgcgtggagctggtgaaggagtacgccagccaggagtacgtgaaggaggtgctgcagatcagcagcgacggcaacaccatcaccatctactaccccaacggcggcagaggcttccccctggccgacagaccccccagccccaccgacaacatcagcagatacagcttcgacaacctgcccgagaagtactggagaaagtaccagtacgccagcagattcgtgcagctggtgagaagcaagagccccaagatcacctacttcaccagatacgccaagtgcatcctgatggagaacagccccggcgccgacttcgaggtgtggttctacgacggcgtgaagatccacaagaccgaggacttcatccaggtgatcgagaagaccggcaagagctacaccctgaagagcgagagcgaggtgaacagcctgaaggaggagatcaagatgtacatggaccacgccaacgagggccacagaatctgcctggccctggagagcatcatcagcgaggaggagagaaagaccagaagcgcccccttcttccccatcatcatcggcagaaagcccggcagcaccagcagccccaaggccctgagccccccccccagcgtggacagcaactaccccaccagagagagagccagcttcaacagaatggtgatgcacagcgccgccagccccacccaggcccccatcctgaaccccagcatggtgaccaacgagggcctgggcctgaccaccaccgccagcggcaccgacatcagcagcaacagcctgaaggactgcctgcccaagagcgcccagctgctgaagagcgtgttcgtgaagaacgtgggctgggccacccagctgaccagcggcgccgtgtgggtgcagttcaacgacggcagccagctggtggtgcaggccggcgtgagcagcatcagctacaccagccccaacggccagaccaccagatacggcgagaacgagaagctgcccgactacatcaagcagaagctgcagtgcctgagcagcatcctgctgatgttcagcaaccccacccccaacttccactag

SEQ ID NO: 178840 - DNA, 2913 bp, Artificial Sequence
  derived and/or modified sequence
atggcaacctgcattggagaaaaaatcgaggattttaaggtggggaacctcctgggaaaagggtcctttgcaggcgtatacagagccgagtccatccacaccgggctagaggtcgccatcaagatgattgataaaaaagcgatgtacaaggccggcatggttcaaagagtacagaacgaggtcaagattcattgtcagcttaagcaccccagtatcctggagctgtataactatttcgaggactcgaactacgtgtacttggtgcttgagatgtgccacaacggggaaatgaatcggtatctgaagaatcgcgtcaagccttttagcgaaaacgaggctcgtcactttatgcaccaaattataactgggatgctgtacctccattcccacggcattctgcacagggacttgaccctctcaaacctgctcctgaccaggaatatgaatatcaaaatcgccgacttcggacttgcgactcagctgaaaatgccacatgagaaacactacaccctctgcgggacgcctaactacatttcacctgaaatcgcaacaagatctgctcacggtttggagtcagatgtgtggtccctggggtgtatgttctatactctgcttatcggccggcctccttttgacactgacactgtgaagaataccctcaacaaggtggtgttggcagattatgaaatgccaagtttcctgagcattgaggctaaggacctaatacatcagctcctgaggaggaacccggccgaccgactctcgctcagttcagtactggatcatccatttatgtctaggaactcatctacaaagtctaaggacctaggcaccgtggaagatagcattgattccggacacgcaactataagcaccgccatcaccgcctctagttccacctccatcagtggcagtctgtttgataaacgccggctcctgattggacaacccttgccaaataagatgaccgtcttcccgaaaaataaatcaagcacagatttctcttcaagtggcgacgggaattccttctatacgcagtggggcaaccaggaaacttccaactctgggcgaggacgcgtgatccaagatgccgaggaacgcccacactcccggtaccttcgcagagcatactcatccgatcgttccggaacttctaacagccaaagtcaagctaagacttataccatggaacgatgtcattccgcagaaatgctctctgtctccaaaagatccggagggggcgagaacgaggaaagatattctccgaccgacaataatgctaacatttttaattttttcaaggaaaagacctcttcatccagtgggtcctttgagcgccctgacaataaccaagccttatctaaccacctctgccctggaaagactcctttcccttttgctgatcctactccccagaccgagactgtgcagcagtggttcggtaacctccaaataaacgctcacctgagaaaaaccaccgagtacgacagcatctccccaaatagagacttccaggggcacccggacctgcagaaggacacctccaagaacgcatggacagatacaaaagttaagaaaaattcggatgcctccgataacgcacatagcgtgaaacagcagaacacaatgaagtacatgactgcgctgcacagcaaaccagagattattcagcaggagtgtgtgtttggttccgaccccctctcagaacagagcaagacgcgtggaatggaaccaccatgggggtatcaaaaccgaaccctccggtcaatcaccagccctctagttgcccatcgcctaaaaccgatccgccaaaagacaaagaaagctgtggtcagcatactggattctgaggaggtctgtgtggagctggttaaggagtacgcctcccaggagtatgttaaggaagtcctgcaaatatcaagcgatggtaatacaatcacaatttactaccccaacgggggacgcgggttcccacttgctgaccggccaccgtcaccaaccgacaacatctctcgatactcgtttgataaccttcccgagaaatattggaggaagtatcagtacgcaagccgttttgtacagctggttcgcagcaagagcccaaaaattacctacttcacaagatacgccaaatgcattttaatggagaacagtcctggtgccgatttcgaggtatggttttatgacggtgttaagatccataagaccgaggatttcatacaggttattgagaaaaccggtaaaagctacaccctcaagtccgaatccgaagtgaattcactaaaggaggagattaaaatgtacatggaccatgctaacgagggacataggatctgtctggcactcgagagtataatctccgaagaggaaagaaagacacgcagcgctccttttttccctatcattatagggagaaagcctggatcgaccagctctccaaaggccctgagcccccccccatccgtagactctaattatcccacccgtgaacgcgcgtcctttaatcggatggttatgcattctgccgcctccccgacacaggctcctatactgaacccctctatggttacaaatgagggtctgggtctgactacaaccgcatccggtactgatatttcttccaactccctgaaagattgtctgcctaaatccgctcaacttctgaagtctgtcttcgtcaagaatgtggggtgggcgactcagctcacaagtggtgctgtctgggttcagttcaacgacggatcccagctggttgtgcaggccggggtgtcttcaatctcttacaccagtcccaatggacagacaaccagatatggtgagaatgagaagctccctgactacattaagcaaaaactgcagtgtttgtcatccattctcctgatgttttccaaccccaccccaaacttccactag

SEQ ID NO: 178841 - DNA, 2913 bp, Artificial Sequence
  derived and/or modified sequence
atggccacctgcattggagagaagattgaggacttcaaggtgggcaacctgctgggcaagggcagctttgctggggtgtacagagctgagagcatccacacaggcctggaggtggccatcaagatgattgacaagaaggccatgtacaaggccggcatggtgcagagggtgcagaatgaggtgaagatccactgccagctgaagcaccccagcatcctggagctgtacaactactttgaggacagcaactacgtgtacctggtgctggagatgtgccacaacggggagatgaaccgctacctgaagaacagagtgaagcccttctctgaaaatgaggcccggcacttcatgcaccagatcatcaccggcatgctgtacctgcacagccacggcatcctgcaccgggacctgaccctgagcaacctgctgctgaccaggaacatgaacatcaagattgctgactttggcctggccacccagctgaagatgcctcatgagaagcactacaccctgtgtggcacccccaactacatcagccctgagatcgccaccaggtctgcccacggcctggagagtgatgtgtggagcctgggctgcatgttctacaccctgctgattggccggcccccatttgacacagacacagtgaagaacaccctgaacaaggtggtgctggccgactatgagatgcccagcttcctgagcattgaggccaaggacctgatccaccagctgctgcggaggaacccagctgaccggctgagcctgagctctgtgctggaccaccccttcatgagcaggaacagcagcaccaagagcaaggacctgggcaccgtggaggacagcattgattctggccacgccaccatcagcacagccatcacagccagcagcagcaccagcatcagcggcagcctgtttgacaagaggcggctgctgattggccagcccctgcccaacaagatgacagtgttccccaagaacaagagcagcacagacttcagcagcagtggagatggcaacagcttctacacccagtggggcaaccaggagaccagcaacagcggccggggccgggtcatccaggatgctgaggagcggccccacagccgctacctgcggcgggcctacagcagtgacaggagcggcaccagcaacagccagagccaggccaagacctacaccatggagcgctgccacagcgctgagatgctgtctgtgtccaagaggtctggaggaggagaaaatgaggagcgctacagccccacagacaacaatgccaacatcttcaacttcttcaaggagaagaccagcagcagcagcggcagctttgagaggccagacaacaaccaggccctgagcaaccacctgtgccctgggaagacccccttcccctttgctgaccccaccccccagacagaaacagtgcagcagtggtttggaaacctgcagatcaatgcccacctgaggaagaccacagaatatgacagcatcagccccaacagagacttccagggccacccagacctgcagaaggacaccagcaagaatgcctggacagacaccaaggtgaagaagaacagtgatgccagtgacaatgcccacagcgtgaagcagcagaacaccatgaagtacatgacagccctgcacagcaagccagagatcatccagcaggagtgtgtgtttggaagtgaccccctgtctgagcagagcaagacccggggcatggagcccccctggggctaccagaacagaaccctgcggagcatcaccagccccctggtggcccaccggctgaagcccatccggcagaagaccaagaaggctgtggtgtccatcctggacagcgaggaggtgtgtgtggagctggtgaaggagtatgccagccaggagtatgtgaaggaggtgctgcagatcagcagtgatggcaacaccatcaccatctactaccccaacggcggccggggcttccccctggccgacaggcctcccagccccacagacaacatcagccgctacagctttgacaacctgcctgagaagtactggaggaagtaccagtatgccagcagatttgtgcagctggtgcgcagcaagagccccaagatcacctacttcaccaggtatgccaagtgcatcctgatggagaacagccctggagctgactttgaggtgtggttctatgatggagtgaagatccacaagacagaggacttcatccaggtgattgagaagacaggcaagagctacaccctgaagtctgagagcgaggtgaacagcctgaaggaggagatcaagatgtacatggaccacgccaatgaaggccaccgcatctgcctggccctggagagcatcatcagcgaggaggagaggaagaccaggtctgcccccttcttccccatcatcattggaaggaagccaggcagcaccagcagccccaaggccctgagccccccaccttctgtggacagcaactaccccacccgggagcgggccagcttcaacaggatggtgatgcacagcgctgccagccccacccaggcccccatcctgaaccccagcatggtgaccaatgaaggcctgggcctgaccaccacagccagcggcacagacatcagcagcaacagcctgaaggactgcctgcccaagagcgcccagctgctgaagtctgtgtttgtgaagaatgtgggctgggccacccagctgaccagcggggctgtgtgggtgcagttcaatgatggcagccagctggtggtgcaggccggcgtgagcagcatctcctacaccagccccaacggccagaccacccgctacggggagaatgagaagctgcctgactacatcaagcagaagctgcagtgcctgagcagcatcctgctgatgttcagcaaccccacccccaacttccactag

SEQ ID NO: 178842 - DNA, 2913 bp, Artificial Sequence
  derived and/or modified sequence
atggccacctgcatcggcgagaagatcgaggacttcaaggtgggcaacctccttggaaaaggatcttttgcgggagtctatcgcgccgaaagcatccacactggattggaggttgccatcaaaatgattgataaaaaggcaatgtataaggctggcatggtccagcgcgtgcaaaacgaggtaaaaatccactgtcagctcaagcacccaagcattctggaactttacaattactttgaggatagcaactatgtctatcttgtcctcgaaatgtgtcataatggtgagatgaataggtatcttaagaatcgagtgaagcctttttctgagaatgaagcccgtcatttcatgcaccaaattatcaccgggatgttgtatctgcactctcacggcatactgcatcgcgatctcacattgtctaatctcctcctgacccggaacatgaacatcaaaatcgcagatttcggcctggccacccagctgaaaatgccacacgaaaagcactacactttatgcggaacacccaattacatcagccctgagattgctacccggagtgcccacggtctggaatccgatgtttggtccctgggctgtatgttctacaccttgttgatcggtcgcccaccgtttgacacagacacggtgaagaacacactgaataaggtcgtcctggctgactacgagatgccatccttcttgtctatcgaggcaaaggacctgatccatcagctgcttaggagaaaccctgctgataggctgtccttgagctcagtgctggaccatccttttatgagcagaaactccagcaccaaatccaaggacttaggtactgttgaggactctatcgacagtggccatgctaccatcagcaccgccattacggcatctagttctacgagtatttccggctctcttttcgacaagcgacgcttattaattggccaacctctgccgaataagatgaccgtttttcccaagaacaagagcagtaccgacttttcttccagcggcgatggaaacagtttctatactcagtggggtaaccaggaaaccagtaactccggacgagggcgggtgattcaggacgctgaagagcggccccacagcagataccttcggagggcctattcctctgatcgctcaggcacatccaactcccagtcacaggccaaaacttacacaatggagaggtgccattctgctgaaatgctgtcagtttccaaacgaagcggagggggcgagaacgaggagcgctattcaccaactgacaacaacgctaacatttttaacttcttcaaagaaaaaaccagctcctcgtcaggtagcttcgaacgccccgataataatcaggcactgtccaaccatctgtgccctggcaagactccgttcccattcgctgatccaacgccccagacagagactgttcagcaatggttcggaaatctgcagatcaatgcccacttgcggaagacgactgagtacgactcaattagcccaaatagagactttcaaggacaccccgacctgcagaaagatacctcaaagaacgcctggaccgacaccaaggtcaaaaaaaactctgacgccagcgataacgcccactccgtaaaacagcagaatacaatgaagtacatgaccgcactgcattccaaaccagaaatcattcagcaggagtgtgtctttggtagcgatcccctttcagaacagagcaagacgcggggtatggaacccccctgggggtaccagaacaggacgctacgttctatcaccagccccctggtggctcacagactgaagccaatccgacagaaaactaagaaagccgtagtctctatcctcgattcagaggaggtgtgtgttgagctagtaaaggaatacgccagccaggaatatgtcaaggaggtactccagatctcctctgacggcaacaccatcaccatctattacccgaacgggggccgcggcttcccacttgccgatcgaccgccctctcccacggataacatctcaaggtattccttcgacaacttgcctgaaaaatactggcgcaagtaccagtatgccagtaggttcgttcagctggttcggtcaaaatctcccaaaattacctatttcactaggtatgcaaagtgcattctgatggagaattctccgggggccgattttgaagtgtggttttacgatggagtcaaaattcacaagacagaagatttcatacaagtgattgaaaagaccgggaagagttataccctcaagtccgaaagtgaggtgaattccctaaaggaagagatcaagatgtatatggaccacgcaaatgaaggacaccgcatttgtctggccctggagagcatcatcagcgaagaagagagaaaaactcggagcgctcctttctttccaattatcatcggcaggaaacccggttctacgagcagtccaaaagccctgagccctcccccaagtgtcgactccaattaccccactcgcgaacgggcaagcttcaacaggatggttatgcattccgccgcatcccccacacaagcaccaatccttaatccttctatggtgacaaacgaaggactcggactcacaaccaccgcgtctggcacggacatatcttccaattctctcaaagactgtctgcctaagtccgcccagctgctgaagtctgtattcgtgaagaacgtcgggtgggcaacccagttgacctctggagccgtgtgggttcagttcaatgacgggagccagttagttgtgcaagccggggtgtcatccatcagttatacctctccgaatggccagacgactagatacggggagaacgagaaactaccagactatattaagcaaaagctgcagtgcttgtcatccatactcttgatgttcagtaaccccacacctaactttcattag

SEQ ID NO: 178843 - DNA, 2913 bp, Artificial Sequence
  derived and/or modified sequence
atggccacttgtataggcgagaaaatcgaggacttcaaagtcggaaatctgctgggcaaaggtagttttgccggagtttaccgcgcagaaagcatccatacaggtctcgaggttgctatcaaaatgattgataagaaagccatgtataaggcaggaatggttcagcgtgtccagaacgaggtgaagatccattgccaactgaaacacccctcaatattggagctgtacaactatttcgaggactcaaattatgtttacctggtgctggagatgtgccacaacggcgaaatgaacagatatctgaagaaccgtgtgaaacctttttccgaaaacgaggccaggcactttatgcatcagattatcactggaatgctctatctccacagtcacgggatactgcatcgggaccttacactatccaatctccttctgactcgcaacatgaacataaaaatcgcggattttggactggccactcagctgaagatgccacacgagaagcactatacactctgcggcacacccaactacatttctcctgagattgccacaagaagcgcacatggtctcgagagcgatgtctggagcctcgggtgtatgttctacactctgttgattgggcgtccaccctttgacaccgatacggtcaagaacacgctaaataaggtcgtgctggctgactacgaaatgccgtcattcctctccattgaagccaaggatctgatacatcagctgttgcggaggaatcctgcagaccgcctctctctctcctccgtgctcgatcacccctttatgtccaggaatagctctacgaagagcaaggacttggggactgtggaagattctatagatagtgggcacgcaactatatctaccgccattaccgccagcagctctacttctatatcgggatccctgttcgataagagaagactgctgatcgggcaaccgctgccgaacaaaatgactgtttttccaaagaacaagtcttccacggatttctctagcagtggggacggaaattccttttacacacagtggggaaatcaggaaacgtcaaactctgggagaggaagggtcatacaggatgccgaggaacggccacacagcaggtacctgagacgggcatattccagcgatagatccggtacatctaactctcaatctcaggctaaaacctacactatggaaaggtgtcacagtgctgaaatgttgtcagtctcaaaacgctcaggaggcggtgagaacgaggagcgctattcaccaacggacaacaacgcaaatatcttcaacttctttaaagaaaaaaccagctcgtcctcaggcagctttgagagaccagacaacaaccaagctctcagcaaccacctgtgcccagggaagacgccatttcctttcgcggatcctacacctcagacggagaccgtgcagcagtggtttgggaatctacagataaacgcacacctcaggaagaccacggaatacgattcaattagtccaaatcgggactttcaggggcaccccgatctacagaaggacaccagcaagaacgcctggacagatactaaggtaaaaaagaattcagatgcttccgataatgcccactccgtgaaacaacaaaataccatgaagtacatgaccgccttgcacagcaaacctgagatcatccagcaggaatgcgtctttggcagcgacccgctatccgagcagtctaagacccgcggaatggagcccccatggggttaccaaaatcgcactcttagatctattacttcccctctggtggcccatcggctgaagcccattcgacagaaaaccaagaaagctgttgtctctattctggactccgaggaggtgtgtgtggaactggtcaaagagtacgctagccaggaatacgtgaaggaggtccttcagataagctcagacggaaacaccatcacaatttattaccctaatggaggacgcggattccccttggcggacagacctccatccccaaccgataatatatccagatactccttcgacaatctgccggaaaagtactggcgcaagtatcaatacgccagccgtttcgtacaactggtcaggtccaagtcacctaaaattacatactttacccggtacgccaagtgcattttgatggagaactctcctggagctgactttgaagtgtggttttacgatggtgtcaagatccacaagacagaagattttatccaggttatcgagaagacggggaagtcttacacgttgaagtccgagagcgaggtgaactcattgaaggaagagattaaaatgtatatggaccacgccaatgaaggccaccggatctgcctggctctggaatccataatatctgaggaagaaagaaagacacgctctgccccttttttcccaataataatcggccgtaagcccggatccacaagctctcctaaggcgctgtctcctcccccatccgtggactccaactatcccacacgggagcgtgccagctttaatcgaatggtcatgcacagtgctgcttcccctacacaggctcccatattgaatccatctatggtcacaaacgaagggctcggcctcacaacgactgccagcggcacagatatatcctcaaatagcctcaaggactgcctcccgaagagcgctcagctgctgaagtcagtattcgtgaaaaatgttggctgggcaacacaactgaccagtggggctgtctgggtacagtttaacgacggcagccagcttgtggtgcaggccggagtgtcgtcaatcagctacacatctcccaatggacaaactacacgatatggagagaatgaaaaactgcccgattacatcaaacagaaacttcagtgcctgagttcaattcttttgatgttcagtaatcctacacccaatttccactag

SEQ ID NO: 178844 - DNA, 3841 bp, Artificial Sequence
  derived and/or modified sequence
agcctatccggagcgatccatctcgttacgtcaccaccagcctagctcggacggcaagcggcgggagattttcaaaatgggagcccagaggcaccgcccaggcctcggaaggtgtcagggagaactttccgtggtttcagcgtcgtcgcctggagcggcggtttagagagccgagcctgatgggcgccaaggccggctggctgcttggagcgctgcctcgaagggactgcgtgaaggaagctaatccggagaacccaggccagagcctggaaatatggcgacctgcatcggggagaagatcgaggattttaaagttggaaatctgcttggtaaaggatcatttgctggtgtctacagagctgagtccattcacactggtttggaagttgcaatcaaaatgatagataagaaagccatgtacaaagcaggaatggtacagagagtccaaaatgaggtgaaaatacattgccaattgaaacatccttctatcttggagctttataactattttgaagatagcaattatgtgtatctggtattagaaatgtgccataatggagaaatgaacaggtatctaaagaatagagtgaaacccttctcagaaaatgaagctcgacacttcatgcaccagatcatcacagggatgttgtatcttcattctcatggtatactacaccgggacctcacactttctaacctcctactgactcgtaatatgaacatcaagattgctgattttgggctggcaactcaactgaaaatgccacatgaaaagcactatacattatgtggaactcctaactacatttcaccagaaattgccactcgaagtgcacatggccttgaatctgatgtttggtccctgggctgtatgttttatacattacttatcgggagaccacccttcgacactgacacagtcaagaacacattaaataaagtagtattggcagattatgaaatgccatcttttttgtcaatagaggccaaggaccttattcaccagttacttcgtagaaatccagcagatcgtttaagtctgtcttcagtattggaccatccttttatgtcccgaaattcttcaacaaaaagtaaagatttaggaactgtggaagactcaattgatagtgggcatgccacaatttctactgcaattacagcttcttccagtaccagtataagtggtagtttatttgacaaaagaagacttttgattggtcagccactcccaaataaaatgactgtatttccaaagaataaaagttcaactgatttttcttcttcaggagatggaaacagtttttatactcagtggggaaatcaagaaaccagtaatagtggaaggggaagagtaattcaagatgcagaagaaaggccacattctcgataccttcgtagagcttattcctctgatagatctggcacttctaatagtcagtctcaagcaaaaacatatacaatggaacgatgtcactcagcagaaatgctttcagtgtccaaaagatcaggaggaggtgaaaatgaagagaggtactcacccacagacaacaatgccaacatttttaacttctttaaagaaaagacatccagtagttctggatcttttgaaagacctgataacaatcaagcactctccaatcatctttgtccaggaaaaactccttttccatttgcagacccgacacctcagactgaaaccgtacaacagtggtttgggaatctgcaaataaatgctcatttaagaaaaactactgaatatgacagcatcagcccaaaccgggacttccagggccatccagatttgcagaaggacacatcaaaaaatgcctggactgatacaaaagtcaaaaagaactctgatgcttctgataatgcacattctgtaaaacagcaaaataccatgaaatatatgactgcacttcacagtaaacctgagataatccaacaagaatgtgtttttggctcagatcctctttctgaacagagcaagactaggggtatggagccaccatggggttatcagaatcgtacattaagaagcattacatctccgttggttgctcacaggttaaaaccaatcagacagaaaaccaaaaaggctgtggtgagcatacttgattcagaggaggtgtgtgtggagcttgtaaaggagtatgcatctcaagaatatgtgaaagaagttcttcagatatctagtgatggaaatacgatcactatttattatccaaatggtggtagaggttttcctcttgctgatagaccaccctcacctactgacaacatcagtaggtacagctttgacaatttaccagaaaaatactggcgaaaatatcaatatgcttccaggtttgtacagcttgtaagatctaaatctcccaaaatcacttattttacaagatatgctaaatgcattttgatggagaattctcctggtgctgattttgaggtttggttttatgatggggtaaaaatacacaaaacagaagatttcattcaggtgattgaaaagacagggaagtcttacactttaaaaagtgaaagtgaagttaatagcttgaaagaggagataaaaatgtatatggaccatgctaatgagggtcatcgtatttgtttagcactggaatccataatttcagaagaggaaaggaaaactaggagtgctccctttttcccaataatcataggaagaaaacctggtagtactagttcacctaaggccttatcacctcctccttctgtggattcaaattacccaacgagagagagagcatctttcaacagaatggtcatgcatagtgctgcttctccaacacaggcaccaatccttaatccctctatggttacaaatgaaggacttggtcttacaactacagcttctggaacagacatctcttctaatagtctaaaagattgtcttcctaaatcagcacaacttttgaaatctgtttttgtgaaaaatgttggttgggctacacagttaactagtggagctgtgtgggttcagtttaatgatgggtcccagttggttgtgcaggcaggagtgtcttctatcagttatacctcaccaaatggtcaaacaactaggtatggagaaaatgaaaaattaccagactacatcaaacagaaattacagtgtctgtcttccatccttttgatgttttctaatccgactcctaattttcattgattaaaactcctttcagacatataagtttaataaataacttttttgttgactttcaagtaaagtgattttttttaatttaacataaagtcttcagaaagcctttctatgaaagaattttaacctataatgtaaaggatgtattctgagagaacaaagcagaatgaaacttgagtcacttactaaatatagtggatataaaatagaacacctgactttgctcttagaccataacccccgaacttactatgttcatatatttgtattgaacaatcttttaaaagcaaaaatgtaaatgatgtgtagtttatttgtgcttttattgttttccctgcgtctcagacatgttgagaatcatggacaaaacctgctggaattttggaatttttgaagatgtaaataatgtgtatttatgttataagtaacatatgtaaacatgtatatttgttttatatttatttttgtaacaccagtgtctgatgaaacatttttgcaaatgcattttataaaaaaataaatatagtgataagttacattatcttttgattcatttaattaaatacttatttttaaataacttaccagtaaactcactttttaaattttgttgcctgttgaggagccaattaaattttaaatattaattttgcaaatgtt

SEQ ID NO: 178845 - DNA, 3060 bp, Artificial Sequence
  derived and/or modified sequence
gggaaggggagcgaacgaagctaacggctgcggggcgggcaccgaggtgcttagggagggtcccaacggcccagacccctgctgtttaggggcggagcggcccgcccctcaagagacaagagtagggaaggcgggacaggattttaaagttggaaatctgcttggtaaaggatcatttgctggtgtctacagagctgagtccattcacactggtttggaagttgcaatcaaaatgatagataagaaagccatgtacaaagcaggaatggtacagagagtccaaaatgaggtgaaaatacattgccaattgaaacatccttctatcttggagctttataactattttgaagatagcaattatgtgtatctggtattagaaatgtgccataatggagaaatgaacaggtatctaaagaatagagtgaaacccttctcagaaaatgaagctcgacacttcatgcaccagatcatcacagggatgttgtatcttcattctcatggtatactacaccgggacctcacactttctaacctcctactgactcgtaatatgaacatcaagattgctgattttgggctggcaactcaactgaaaatgccacatgaaaagcactatacattatgtggaactcctaactacatttcaccagaaattgccactcgaagtgcacatggccttgaatctgatgtttggtccctgggctgtatgttttatacattacttatcgggagaccacccttcgacactgacacagtcaagaacacattaaataaagtagtattggcagattatgaaatgccatcttttttgtcaatagaggccaaggaccttattcaccagttacttcgtagaaatccagcagatcgtttaagtctgtcttcagtattggaccatccttttatgtcccgaaattcttcaacaaaaagtaaagatttaggaactgtggaagactcaattgatagtgggcatgccacaatttctactgcaattacagcttcttccagtaccagtataagtggtagtttatttgacaaaagaagacttttgattggtcagccactcccaaataaaatgactgtatttccaaagaataaaagttcaactgatttttcttcttcaggagatggaaacagtttttatactcagtggggaaatcaagaaaccagtaatagtggaaggggaagagtaattcaagatgcagaagaaaggccacattctcgataccttcgtagagcttattcctctgatagatctggcacttctaatagtcagtctcaagcaaaaacatatacaatggaacgatgtcactcagcagaaatgctttcagtgtccaaaagatcaggaggaggtgaaaatgaagagaggtactcacccacagacaacaatgccaacatttttaacttctttaaagaaaagacatccagtagttctggatcttttgaaagacctgataacaatcaagcactctccaatcatctttgtccaggaaaaactccttttccatttgcagacccgacacctcagactgaaaccgtacaacagtggtttgggaatctgcaaataaatgctcatttaagaaaaactactgaatatgacagcatcagcccaaaccgggacttccagggccatccagatttgcagaaggacacatcaaaaaatgcctggactgatacaaaagtcaaaaagaactctgatgcttctgataatgcacattctgtaaaacagcaaaataccatgaaatatatgactgcacttcacagtaaacctgagataatccaacaagaatgtgtttttggctcagatcctctttctgaacagagcaagactaggggtatggagccaccatggggttatcagaatcgtacattaagaagcattacatctccgttggttgctcacaggttaaaaccaatcagacagaaaaccaaaaaggctgtggtgagcatacttgattcagaggaggtgtgtgtggagcttgtaaaggagtatgcatctcaagaatatgtgaaagaagttcttcagatatctagtgatggaaatacgatcactatttattatccaaatggtggtagaggttttcctcttgctgatagaccaccctcacctactgacaacatcagtaggtacagctttgacaatttaccagaaaaatactggcgaaaatatcaatatgcttccaggtttgtacagcttgtaagatctaaatctcccaaaatcacttattttacaagatatgctaaatgcattttgatggagaattctcctggtgctgattttgaggtttggttttatgatggggtaaaaatacacaaaacagaagatttcattcaggtgattgaaaagacagggaagtcttacactttaaaaagtgaaagtgaagttaatagcttgaaagaggagataaaaatgtatatggaccatgctaatgagggtcatcgtatttgtttagcactggaatccataatttcagaagaggaaaggaaaactaggagtgctccctttttcccaataatcataggaagaaaacctggtagtactagttcacctaaggccttatcacctcctccttctgtggattcaaattacccaacgagagagagagcatctttcaacagaatggtcatgcatagtgctgcttctccaacacaggcaccaatccttaatccctctatggttacaaatgaaggacttggtcttacaactacagcttctggaacagacatctcttctaatagtctaaaagattgtcttcctaaatcagcacaacttttgaaatctgtttttgtgaaaaatgttggttgggctacacagttaactagtggagctgtgtgggttcagtttaatgatgggtcccagttggttgtgcaggcaggagtgtcttctatcagttatacctcaccaaatggtcaaacaactaggtatggagaaaatgaaaaattaccagactacatcaaacagaaattacagtgtctgtcttccatccttttgatgttttctaatccgactcctaattttcattgattaaaactcctttcagacatataagtttaataaataac

SEQ ID NO: 178846 - protein, 775 aa, Artificial Sequence
  derived and/or modified sequence
MLQGLLPVSLLLSVAVSAIKELPGVKKYEVVYPIRLHPLHKREAKEPEQQEQFETELKYKMTINGKIAVLYLKKNKNLLAPGYTETYYNSTGKEITTSPQIMDDCYYQGHILNEKVSDASISTCRGLRGYFSQGDQRYFIEPLSPIHRDGQEHALFKYNPDEKNYDSTCGMDGVLWAHDLQQNIALPATKLVKLKDRKVQEHEKYIEYYLVLDNGEFKRYNENQDEIRKRVFEMANYVNMLYKKLNTHVALVGMEIWTDKDKIKITPNASFTLENFSKWRGSVLSRRKRHDIAQLITATELAGTTVGLAFMSTMCSPYSVGVVQDHSDNLLRVAGTMAHEMGHNFGMFHDDYSCKCPSTICVMDKALSFYIPTDFSSCSRLSYDKFFEDKLSNCLFNAPLPTDIISTPICGNQLVEMGEDCDCGTSEECTNICCDAKTCKIKATFQCALGECCEKCQFKKAGMVCRPAKDECDLPEMCNGKSGNCPDDRFQVNGFPCHHGKGHCLMGTCPTLQEQCTELWGPGTEVADKSCYNRNEGGSKYGYCRRVDDTLIPCKANDTMCGKLFCQGGSDNLPWKGRIVTFLTCKTFDPEDTSQEIGMVANGTKCGDNKVCINAECVDIEKAYKSTNCSSKCKGHAVCDHELQCQCEEGWIPPDCDDSSVVFHFSIVVGVLFPMAVIFVVVAMVIRHQSSREKQKKDQRPLSTTGTRPHKQKRKPQMVKAVQPQEMSQMKPHVYDLPVEGNEPPASFHKDTNALPPTVFKDNPVSTPKDSNPKA

SEQ ID NO: 178847 - DNA, 2328 bp, Artificial Sequence
  derived and/or modified sequence
atgcttcaaggattgctgccggtgagcttactgctttccgtggcagtgtctgcaatcaaggaactcccaggagtcaagaagtatgaggtcgtgtacccaatcagactgcaccctctacacaagcgtgaggctaaagaacccgaacaacaagaacagttcgagaccgagctgaaatataagatgactataaacgggaagattgcggttctgtacttaaaaaaaaacaaaaatctgctagcccccggttatacagagacttattacaactctacgggaaaggaaattacgaccagcccgcagattatggatgattgttactaccagggacatatcctgaacgagaaagttagcgacgcatctatcagcacgtgcaggggcctgcgtggctattttagccaaggggatcaacgatactttatcgaaccattgagccccattcaccgggatggccaggaacatgccctattcaagtacaacccagacgagaaaaactatgactccacatgcggtatggacggggtcctgtgggcccatgatcttcagcaaaatatagccctgcccgcaactaaattggtaaaactgaaagacaggaaggtgcaagagcacgagaaatatatcgagtactacttagtcctcgacaacggagaattcaagcgatacaacgagaaccaggacgaaattcggaagcgagtcttcgaaatggcaaattatgtcaacatgctgtataaaaaactgaatacccatgtcgccctcgtgggcatggagatctggaccgacaaggacaaaatcaaaatcaccccaaatgctagttttacactcgaaaacttttctaagtggcgcggttccgtgctgtcgcggcggaagagacatgatatcgcgcagctgataacagctacagaacttgctgggactactgtcggactggcctttatgagcaccatgtgctccccctacagcgtgggagtagtgcaggaccattctgataacttactgcgcgtcgccggaactatggcccatgagatgggacacaattttgggatgtttcatgacgactatagttgcaaatgccccagtaccatctgcgtgatggataaagccttaagtttctatatcccaaccgatttttccagttgcagccggctatcttatgataaatttttcgaggataagttgagcaactgtctgtttaacgctcctcttcccactgacatcatttccacaccaatctgcggaaatcagctcgtggagatgggtgaagattgcgactgcggcacgtccgaagaatgcactaatatctgctgcgatgccaagacttgcaaaataaaagccacatttcaatgtgccttgggggagtgctgcgaaaaatgtcagttcaagaaagcaggcatggtatgccgcccagctaaggatgaatgtgaccttcctgagatgtgtaacgggaaatcgggtaattgcccagatgacaggtttcaggtgaacggcttcccatgtcatcatggcaagggacattgtctgatgggcacctgtcctaccctgcaagaacagtgcaccgagctctgggggcccggaactgaggtggccgacaagagttgttacaaccgcaacgagggcggcagcaagtatgggtattgccggagagttgacgacacgctcatcccctgtaaagcaaacgatactatgtgcgggaaactgttttgccagggtggatcagacaatctaccttggaaaggtaggatagtgacatttctcacatgcaagaccttcgaccctgaagacaccagccaggagatcggcatggtagcaaacggcacaaagtgcggggacaataaggtttgtatcaatgccgagtgtgtggacatcgaaaaggcctataagtccactaactgcagcagcaagtgcaaaggccacgccgtctgtgatcatgagttgcagtgtcaatgtgaagagggctggatacccccagactgtgatgattcatcagtcgtgtttcatttctcgatcgtggtcggggttttattcccgatggctgtgatcttcgtcgtcgtggcaatggttatccgtcatcagtcttctcgggagaaacagaagaaggaccagcgtccgttaagtacaaccggcactcgacctcataaacaaaaaaggaagccccagatggtgaaggccgtccaaccacaggagatgtctcagatgaagccccacgtgtatgacctccccgtggaggggaacgagcctcctgcaagctttcacaaggacacaaatgccttaccgcctactgtgttcaaggacaaccctgtcagtacaccaaaagatagcaaccctaaggcatag

SEQ ID NO: 178848 - DNA, 2328 bp, Artificial Sequence
  derived and/or modified sequence
atgctgcagggcctgctgcctgtgtccctgctgctgtctgtggccgtgtctgccatcaaggagctgcccggggtgaagaagtatgaggtggtgtaccccatccggctgcaccccctgcacaagcgggaggccaaggagcctgagcagcaggagcagtttgaaacagagctgaagtacaagatgaccatcaacgggaagattgctgtgctgtacctgaagaagaacaagaacctgctggcccctggctacacagagacctactacaacagcacaggcaaggagatcaccaccagcccccagatcatggatgactgctactaccagggccacatcctgaatgagaaggtgtctgatgccagcatcagcacctgccggggcctgcggggctacttcagccagggcgaccagcgctacttcatcgagcccctgagccccatccacagagatggccaggagcacgccctcttcaagtacaacccagatgagaagaactatgacagcacctgtggcatggatggagtgctgtgggcccatgacctgcagcagaacatcgccctgcctgccaccaagctggtgaagctgaaggacaggaaggtgcaggagcacgagaagtacatcgagtactacctggtgctggacaacggggagttcaagcgctacaatgaaaaccaggatgagatcaggaagagggtgtttgagatggccaactacgtgaacatgctgtacaagaagctgaacacccacgtggccctggtgggcatggagatctggacagacaaggacaagatcaagatcaccccaaatgccagcttcaccctggagaacttcagcaagtggaggggctctgtgctgagcaggaggaagagacatgacatcgcccagctgatcacagccacagagctggccggcaccaccgtgggcctggccttcatgagcaccatgtgcagcccctacagcgtgggcgtggtgcaggaccacagcgacaacctgctgcgggtggccggcaccatggcccacgagatgggccacaactttggcatgtttcatgatgactacagctgcaagtgccccagcaccatctgtgtgatggacaaggccctgtccttctacatccccacagacttcagcagctgcagccggctgtcctatgacaagttctttgaggacaagctgagcaactgcctcttcaatgcccccctgcccacagacatcatcagcacccccatctgtggcaaccagctggtggagatgggagaggactgtgactgtggcaccagcgaggagtgcaccaacatctgctgtgatgccaagacctgcaagatcaaggccaccttccagtgtgccctgggggagtgctgtgagaagtgccagttcaagaaggccggcatggtgtgcaggcctgccaaggatgaatgtgacctgcctgagatgtgcaatggcaagagcggcaactgcccagatgaccgcttccaggtgaatggcttcccctgccaccacggcaagggccactgcctgatgggcacctgccccaccctgcaggagcagtgcacagagctgtggggccctggaacagaggtggccgacaagagctgctacaacagaaatgaaggaggcagcaaatatggctactgcagaagagtggatgacaccctcatcccctgcaaggccaatgacaccatgtgtgggaagctgttctgccagggcggcagtgacaacctgccctggaagggcagaattgtgaccttcctgacctgcaagacctttgatcctgaggacaccagccaggagatcggcatggtggccaacggcaccaagtgtggggacaacaaggtgtgcatcaatgcagaatgtgtggacatcgagaaggcctacaagagcaccaactgcagcagcaagtgcaagggccatgctgtgtgtgaccacgagctgcagtgccagtgtgaggagggctggatccccccagactgtgatgacagctctgtggtgttccacttcagcatcgtggtgggcgtgctcttccccatggccgtcatctttgtggtggtggccatggtgatccgccaccagagcagccgggagaagcagaagaaggaccagaggcccctgagcaccaccggcacccggccccacaagcagaagaggaagccccagatggtgaaggctgtgcagccccaggagatgagccagatgaagccccacgtgtatgacctgcctgtggagggcaatgagcccccagccagcttccacaaggacaccaatgccctgccccccaccgtcttcaaggacaaccctgtgtccacccccaaggacagcaaccccaaggcctag

SEQ ID NO: 178849 - DNA, 2328 bp, Artificial Sequence
  derived and/or modified sequence
atgctgcagggcctgctgcccgtgagcctgctgctgagcgtggccgtcagtgccattaaggagctgcctggggtcaaaaaatatgaagtcgtgtatccaatccggctgcaccctctgcacaagagagaagccaaagaaccagagcagcaggaacaattcgaaactgagctgaagtacaagatgacgatcaacgggaaaattgccgtcctttaccttaagaaaaataaaaatctcctggctcctggatatacggagacttattacaattctacagggaaagagattaccacgagcccccaaattatggatgactgttattaccagggccacattttgaacgaaaaggtgtcagatgcttcaatcagcacatgccggggactgcgcggctactttagccagggcgaccagaggtactttattgaacctttgagccccatacaccgcgacggacaggagcacgccctgtttaaatataacccggacgagaaaaactacgacagcacctgtggtatggatggcgtcttatgggcgcacgatctgcagcagaatatagcccttccggccacgaaactggtgaagttgaaggacagaaaggtacaagagcatgaaaagtacattgaatactacttggttctcgataacggggagtttaagcggtataacgaaaatcaggacgaaatccggaagagagtgtttgaaatggccaattatgtaaacatgttgtacaagaagctaaatacccacgtggccttggtggggatggagatatggactgataaggataaaataaagatcactcctaatgcatccttcaccctcgaaaacttctcgaagtggcgggggtctgtgctgagcaggcgaaagcgacatgacattgcccagctcataaccgccacagagttagcaggcacgaccgtgggcctcgccttcatgtctacaatgtgtagcccctatagtgtcggagtcgtccaggaccacagcgacaacttactacgcgtggctgggacaatggcccacgaaatgggccacaacttcggcatgtttcacgatgattactcttgcaagtgccctagcacaatctgcgtcatggacaaggctctcagtttttatatccccaccgacttctcttcctgctcccgcttgtcctatgataaatttttcgaagataaactttctaactgcttatttaacgcccccttgcccactgatatcatttccactcctatttgcgggaaccagctggttgagatgggcgaagattgcgactgcgggacaagtgaagaatgtacaaacatttgttgcgatgccaagacttgtaagatcaaagcaacctttcaatgcgcgcttggagagtgttgtgagaagtgtcagtttaaaaaggctggcatggtctgtcgtcccgcgaaagacgagtgcgacctgcccgaaatgtgcaatggtaagtctggaaattgcccggacgatcgcttccaggtcaatggcttcccctgtcatcatggcaaaggacactgcctgatgggcacgtgcccaaccctacaagagcaatgcaccgagctttggggcccggggactgaagtcgcggacaagagctgttacaatcgcaacgagggcggcagtaagtatgggtattgccgcagagtggatgacacgctgatcccctgcaaggctaatgatactatgtgtggaaagctgttttgccaaggcggcagtgacaacttaccctggaagggacgcatcgtgacattccttacatgtaaaacctttgatccggaggatactagccaagagatcggcatggtcgcaaatgggacgaagtgcggcgacaataaagtttgcattaatgccgagtgcgtggatatagagaaggcttacaaatccacaaactgctcttccaagtgtaaggggcacgccgtctgcgaccacgagttacagtgtcagtgcgaggagggctggatccccccggactgtgacgatagttcagttgtttttcactttagcattgtggtgggggtgctgtttcctatggccgtgatattcgtcgtcgtggccatggtaattagacatcagagcagtcgtgagaaacagaagaaggatcaacgtcccctttccacaacaggcacaagacctcacaaacagaagaggaagccccaaatggtcaaggcagtgcagccgcaggaaatgagccagatgaagcctcacgtatacgatctacctgtcgaaggtaacgaacctccagcaagctttcataaagacacaaacgccttacctcctaccgtgtttaaggacaatcccgtatctactcctaaggattccaaccccaaagcgtag

SEQ ID NO: 178850 - DNA, 2328 bp, Artificial Sequence
  derived and/or modified sequence
atgctccaggggctccttcccgtgtcactgttgctctcggtagctgtgtcagctattaaggaactccctggagttaaaaaatacgaggtggtgtatcctatacggttgcaccccctgcacaagcgagaggccaaggagccagaacagcaagaacaatttgagacagagctcaaatacaagatgactatcaacgggaaaattgcagtactttatttgaaaaagaacaagaatctcctggcccctggatataccgaaacctattacaacagcaccggaaaagaaattacaacctctccccaaatcatggacgattgctactatcagggccatattttgaacgagaaagtttctgatgctagtatatctacctgcagaggtttgagaggatacttctctcagggggaccagcgttacttcatagaaccactgagcccgatccaccgcgacggccaagagcatgcgctgtttaagtacaaccctgatgagaaaaactacgactcgacgtgcggcatggatggagtgctgtgggctcacgacttgcagcagaatatagctctgccagcgacaaaactcgttaagctgaaggataggaaggtccaggaacatgagaagtacatagagtactatctcgtcctggataacggggaattcaagagatataacgagaaccaggatgagattcgaaaaagagtctttgagatggctaactacgtgaacatgctctacaaaaagttgaatactcacgtggcactggtcggcatggagatttggaccgataaggacaaaataaagatcacccctaatgcttcgttcacccttgagaacttctctaaatggcgaggctccgtcctgtctagaagaaaacgccatgacatcgcccaactgatcactgcaactgagctggccggtaccaccgtaggactcgctttcatgtcgactatgtgctcaccatactctgtgggtgtcgttcaggatcacagtgataatctcttaagagtcgctggtaccatggctcatgagatgggtcataactttggtatgttccatgatgattacagttgcaaatgcccctcaactatttgcgtgatggacaaggcgttatccttctatattcctactgacttctcaagctgctccaggctctcttacgataaattcttcgaagacaagctttcaaactgtttgttcaatgcgcctttacctacagacatcattagcacccccatctgcgggaatcagctggttgagatgggtgaggactgtgactgcgggaccagtgaggaatgcaccaacatctgctgcgacgcaaaaacctgtaagattaaggccacctttcagtgcgcccttggggagtgttgtgaaaaatgccagttcaagaaggctggcatggtatgtcgacccgctaaggacgaatgtgatttgcccgagatgtgcaacgggaagagcggaaactgtccagacgaccggttccaagttaatggatttccatgtcatcatggaaagggacattgcctgatgggcacctgtcccactttgcaggagcagtgcacggagctttggggtcctgggactgaagtagcagacaaatcttgttacaaccgaaatgaaggcggatcaaagtacggctactgtaggcgcgtcgatgacacactgataccatgcaaagccaatgacactatgtgcgggaaactcttctgtcagggtggatccgataatctaccatggaaaggacggatagtcaccttcttaacgtgcaagaccttcgaccccgaggatacaagtcaagagatcgggatggtagcaaacggtaccaagtgcggggataacaaagtctgcataaatgcggaatgcgtagatattgagaaagcttataaaagcaccaattgtagtagcaagtgtaaaggccatgcggtatgcgaccatgagctgcaatgccagtgcgaagagggatggatcccccctgactgcgacgattcctcagtggtgttccacttctctatagtggttggagttctgtttcctatggccgttatcttcgtagtggtcgctatggtcatcaggcaccagtctagtagagaaaaacagaaaaaagaccaaagaccactttctactacagggacccgtcctcacaaacagaagcgcaaaccccagatggtcaaggcggtgcagccccaagagatgtcccagatgaagccccatgtgtacgatctacccgtagaaggaaatgagccacccgcatctttccataaagacacaaatgcgctccctcccacggtgtttaaggataatccagtgtccacgcctaaagacagcaacccaaaagcttag

SEQ ID NO: 178851 - DNA, 2328 bp, Artificial Sequence
  derived and/or modified sequence
atgctgcagggcctgctgcccgtgagcctgctgctgagcgtggccgtgagcgccatcaaggagctgcccggcgtgaagaagtacgaggtggtgtaccccatcagactgcaccccctgcacaagagagaggccaaggagcccgagcagcaggagcagttcgagaccgagctgaagtacaagatgaccatcaacggcaagatcgccgtgctgtacctgaagaagaacaagaacctgctggcccccggctacaccgagacctactacaacagcaccggcaaggagatcaccaccagcccccagatcatggacgactgctactaccagggccacatcctgaacgagaaggtgagcgacgccagcatcagcacctgcagaggcctgagaggctacttcagccagggcgaccagagatacttcatcgagcccctgagccccatccacagagacggccaggagcacgccctgttcaagtacaaccccgacgagaagaactacgacagcacctgcggcatggacggcgtgctgtgggcccacgacctgcagcagaacatcgccctgcccgccaccaagctggtgaagctgaaggacagaaaggtgcaggagcacgagaagtacatcgagtactacctggtgctggacaacggcgagttcaagagatacaacgagaaccaggacgagatcagaaagagagtgttcgagatggccaactacgtgaacatgctgtacaagaagctgaacacccacgtggccctggtgggcatggagatctggaccgacaaggacaagatcaagatcacccccaacgccagcttcaccctggagaacttcagcaagtggagaggcagcgtgctgagcagaagaaagagacacgacatcgcccagctgatcaccgccaccgagctggccggcaccaccgtgggcctggccttcatgagcaccatgtgcagcccctacagcgtgggcgtggtgcaggaccacagcgacaacctgctgagagtggccggcaccatggcccacgagatgggccacaacttcggcatgttccacgacgactacagctgcaagtgccccagcaccatctgcgtgatggacaaggccctgagcttctacatccccaccgacttcagcagctgcagcagactgagctacgacaagttcttcgaggacaagctgagcaactgcctgttcaacgcccccctgcccaccgacatcatcagcacccccatctgcggcaaccagctggtggagatgggcgaggactgcgactgcggcaccagcgaggagtgcaccaacatctgctgcgacgccaagacctgcaagatcaaggccaccttccagtgcgccctgggcgagtgctgcgagaagtgccagttcaagaaggccggcatggtgtgcagacccgccaaggacgagtgcgacctgcccgagatgtgcaacggcaagagcggcaactgccccgacgacagattccaggtgaacggcttcccctgccaccacggcaagggccactgcctgatgggcacctgccccaccctgcaggagcagtgcaccgagctgtggggccccggcaccgaggtggccgacaagagctgctacaacagaaacgagggcggcagcaagtacggctactgcagaagagtggacgacaccctgatcccctgcaaggccaacgacaccatgtgcggcaagctgttctgccagggcggcagcgacaacctgccctggaagggcagaatcgtgaccttcctgacctgcaagaccttcgaccccgaggacaccagccaggagatcggcatggtggccaacggcaccaagtgcggcgacaacaaggtgtgcatcaacgccgagtgcgtggacatcgagaaggcctacaagagcaccaactgcagcagcaagtgcaagggccacgccgtgtgcgaccacgagctgcagtgccagtgcgaggagggctggatcccccccgactgcgacgacagcagcgtggtgttccacttcagcatcgtggtgggcgtgctgttccccatggccgtgatcttcgtggtggtggccatggtgatcagacaccagagcagcagagagaagcagaagaaggaccagagacccctgagcaccaccggcaccagaccccacaagcagaagagaaagccccagatggtgaaggccgtgcagccccaggagatgagccagatgaagccccacgtgtacgacctgcccgtggagggcaacgagccccccgccagcttccacaaggacaccaacgccctgccccccaccgtgttcaaggacaaccccgtgagcacccccaaggacagcaaccccaaggcctag

SEQ ID NO: 178852 - DNA, 7052 bp, Artificial Sequence
  derived and/or modified sequence
gaatgaaccagggagtttcattctgtctcactggagaggaggcagggacagacccagcagcacccacctgagcgagaagagcagacaccgtgctcctggaatcacccagcatgttgcaaggtctcctgccagtcagtctcctcctctctgttgcagtaagtgctataaaagaactccctggggtgaagaagtatgaagtggtttatcctataagacttcatccactgcataaaagagaggccaaagagccagagcaacaggaacaatttgaaactgaattaaagtataaaatgacaattaatggaaaaattgcagtgctttatttgaaaaaaaacaagaacctccttgcaccaggctacacggaaacatattataattccactggaaaggagatcaccacaagcccacaaattatggatgattgttattatcaaggacatattcttaatgaaaaggtttctgacgctagcatcagcacatgtaggggtctaaggggctacttcagtcagggggatcaaagatactttattgaacctttaagccccatacatcgggatggacaggagcatgcactcttcaagtataaccctgatgaaaagaattatgacagcacctgtgggatggatggtgtgttgtgggcccacgatttgcagcagaacattgccctacctgccaccaaactagtaaaattgaaagacaggaaggttcaggaacatgagaaatacatagaatattatttggtcctggataatggtgagtttaaaaggtacaatgagaatcaagatgagatcagaaagagggtatttgagatggctaattatgtcaacatgctttataaaaagctcaatactcatgtggccttagttggtatggaaatctggactgacaaggataagataaagataaccccaaatgcaagcttcaccttggagaatttttctaaatggagggggagtgttctctcaagaagaaagcgtcatgatattgctcagttaatcacagcaacagaacttgctggaacgactgtgggtcttgcatttatgtctacaatgtgttctccttattctgttggcgttgttcaggaccacagcgataatcttcttagagttgcagggacaatggcacatgaaatgggccacaactttggaatgtttcatgacgactattcttgcaagtgtccttctacaatatgtgtgatggacaaagcactgagcttctatatacccacagacttcagttcctgcagccgtctcagctatgacaagttttttgaagataaattatcaaattgcctctttaatgctccattgcctacagatatcatatccactccaatttgtgggaaccagttggtggaaatgggagaggactgtgattgtgggacatctgaggaatgtaccaatatttgctgtgatgctaagacatgtaaaatcaaagcaacttttcaatgtgcattaggagaatgttgtgaaaaatgccaatttaaaaaggctgggatggtgtgcagaccagcaaaagatgagtgcgacctgcctgaaatgtgtaatggtaaatctggtaattgtcctgatgatagattccaagtcaatggcttcccttgccatcacgggaagggccactgcttgatggggacatgccccacactgcaggagcagtgcacagagctgtggggaccaggaactgaggttgcagataagtcatgttacaacaggaatgaaggtgggtcaaagtacgggtactgtcgcagagtggatgacacactcattccctgcaaagcaaatgataccatgtgtgggaagttgttctgtcaaggtgggtcggataatttgccctggaaaggacggatagtgactttcctgacatgtaaaacatttgatcctgaagacacaagtcaagaaataggcatggtggccaatggaactaagtgtggcgataacaaggtttgcattaatgcagaatgtgtggatattgagaaagcctacaaatcaaccaattgctcatctaagtgcaaaggacatgctgtgtgtgaccatgagctccagtgtcaatgtgaggaaggatggatccctcccgactgcgatgactcctcagtggtcttccacttctccattgtggttggggtgctgttcccaatggcggtcatttttgtggtggttgctatggtaatccggcaccagagctccagagaaaagcagaagaaagatcagaggccactatctaccactggcaccaggccacacaaacagaagaggaaaccccagatggtaaaggctgttcaaccccaagagatgagtcagatgaagccccatgtgtatgatctgccagtagaaggcaatgagcccccagcctcttttcataaagacacaaacgcacttccccctactgttttcaaggataatccagtgtctacacctaaggactcaaatccaaaagcatgaagcaacagctaagcaagaactaatggctaaattatcaacttggaaaactggaaaatctggatggcagagaaatatactatctatctcaccagtatttgctctcgactcaagaaggttaacattttctgattcatgttagactttgaagagactaaagaaaattttcaagaggaacatatgcctgagaacctttgcatgaatttaaaatttcaattatccattcttataagaaggaagatgattgtaaagaaatatctccgaagttaaaatctgtaataggaattgattcattctctaatgaaaacaaaacataaaaacatcacactaatcttggaggaataagaaaaattgtacatccattaaatgtacaattgattgcaacatcttgattgttttaaccattaacttgtcaaattacaatcacagttaagaaaatgatgtaaaattctgttttgtggatctctttcctagattagcttctgaaatcattattagctatatcatttgaggttttctacaatttggtataactaagaatttaaaaatgttttatcatatatatttgtataattaattactggcatggttaaagtggttttcactttttaaatggagaaaatttcagttaaattaataggataaaccaggttgcgaactggtgacctgtaggccatgtttgcactgcaaatatatttggtctgaatgatattgatattggacacatagtacttttacatgttttgaatgtattgctaatatttaaaaattgagagatcttgcataaacaatagattcccagctttgtcagatgtaatctaaaagtaatccgatgctttgtcaacaacagacttacattgcccatagcaaccgtcagcttagttgatgggtaatgtagcaaacactattggtttcctaccaaataatcccctttttcctggcttttagaacaataattttgttcacctgcccacttctaggaaagaatatcctatctaatctatctatctcagggataaatccctatccttttaagtaagtcaagtcaattaaaataacctcatttttccttgctagtggtcgacttggagatgattttataatcctccccctccctttttttttttgctagtaagacgacagaggaattatgttacaacacttctggaaaatttttcctcgtctctttttctggatatgggcatctgaatactctagctggtactgctgcgctccacacggtgattatgaaggctgaaaaagatagatagagcagaaagatgaaaagaataaaacctggcctttcaatgatgtcatggaattggtagatcagtgactgctggagttacctcacactttcttggtactccttattatatgagccatacattttccttgttgtttaagccattttgaattggattttctctcactttcaacagagatcatcctaactagtaaagtagctgtttccataatcagggaacatgctttagttcatcatcacagctacagtttttcttgtatttgtctgcttcacccatttctatcaatcacttacctggtccccacaggcctgtcgcttcatgaggaactttatggttcatttacccttgcagtatgaggttctagataagcccactctggcctcaaaagtgaagctcagtcctcaggaaatccagagtccactgatcaaatcactgtcaaggatacaggctttttctccatgtggcatttgcagaagaacaactttaaaagtagagctttatctgccctgtgaggtttcagaagaccctcccctgacccagaaataaatccctatttcctggaaagccattatgtactcgtgaccaacttgtgaacttttctgtgttgttgttgttgttttttaaatatctgtccccagtaatagattcacctaatccttttttatactgatggaatggaaatcttaaatctatgaatcctcaactagccatgtaccataacccaagcaaaaactaaaccatacactctcaaaagcagtggcatgtgaacatgcctgcaagttcctaaatgatgtcactaggtccctgatgcagatgcatcatacgtcctatttgaagagaagaaatgcagtacaatgacaggaaaaccattattttatcatagaactgcgaacccaagtcctacaatgtttccctttcagctcaactgcagaatagtttagaacagactttttgatttcacaatactgtttccacacttacttatatccgtaactttctaactttaagggaattccgcttatttgacatttaactacctcagatatgccaccaaacctgttttcatcattagttatttttaccttgtctactttaaaacagtgaaattattaggttaaattatgtttttatccagttactctaagataccttagtgtttgtctacttattacaactcaccaaattactggttttatatggcctttgggaaggcttttagctttttataaaataatgaagtatgcatgaaaagaaagcaaattttagttggttgcagtcagagaatatggaaagggttattattataattaggattttattattcacattggaaatcactgctatgtgttaaggaattgaaggtggcctctggctagcagccattaagaaaatgagcccctgagttcaacgaccctcaaatgaagtgaagtctaccaataaccactgaataagcttggaattttagattccttcccagctgaatcttgacttcagccttgtgagacaccctgaagtagaggatgcagctaaattttgtccagattacacacccacagaaactgtatgataattaatatgtgttgtttaaagttgttatggtttggagatatttgttatgcagcaatagatagctgatacaaggaagtagagaacaaacattttctattagtctgttttcacatggctataaagaataccacctgagactgggtaatttataaagaaaggaggattaattgactcagatttccacatggcctaggaggcctcaggaaacttacaatcatgatgaaagaggaagcagaaacatctcatatgatggaagatgtgtatgaaggaggaactgtcaaacacttataaaaccatcagatctcttgagagcttactatctcgacaaaagcatgggggaaaccacccccatgatccaatcacctcccacctggtccctccctcaacatgtggagattatagcaattaaaaaaatgagatttggggggatggacacagagccaaaccatataatgttttaaatgctccagataggtttaggtaaaattaactatatttaataggctttcatcactgcaaaactttttttcctttctttgtgtctctagtctcttccatttgttctcccttctttactagcaccgaggatttgcttgaaatctctgatagccagtattctcatttatcatattctttctcactttgtgtttccttggtaattttggataactccttaaatttatcttccaaattactggtttttatattctgtactgtcagtcctcctgttcactaatttcaaaatttatagttgtttctcttgtttacttatatagttgtttctcttgtttacttaataacattctcttctttcctatcagtttaattttataaaggctaaccaattaactgtttttaacttatatttccagatattttaaaaattaaagcaaaatgtgtataaactttattactgcttcccacagtaaatatttttcagaagtacatgctttctcagccacttgactagtatgttccccatcattcaaagacaccattatttcctaagtgttatattgctatttttcagttggtgcatccaatattattatcagctttaatattgtttcatcatatgtcattgttcaaagaatccatctcttgagcgtaagctaaataatttgcatacactagcatctggatgtaatatggaaaaatatggaaatggttggggtgataagcaagtcttgcatattcttttctcctcaattttttttctccaaagtgggccaagccaagagtggcacagctgtgtggagatactgagctccaccttgtcagggaagatcccaactcaggagaaaacacctctaacaaaatctgtagccacgttggcacatctgcccttgaattcactttgtctcttttgctgcttccataaaaaggctttcccttgacaatgttaggcactttttagcaactaggcctgggtggtctgctacaatgcccaacacttaatacagtatcactattactgttagtagtatgctaagcgaatactattgttataaaaaaaatcctaagcatgaaaattacggtatacaatttattgtgaaggcaacttcttgtgaacattaaacggtttatctccttcacctcatattaaagtccatactcttgggatatatctgacatctcaatattaaatgactaagatgactaagtcgtttatgttgctcccacctcacacaaagttaaaactatttgttactttaaatagtttgacaatgttattttaaaatctggacaaatcacaaatataaaatacttatttaatttt

SEQ ID NO: 178853 - protein, 93 aa, Artificial Sequence
  derived and/or modified sequence
MIHLGHILFLLLLPVAAAQTTPGERSSLPAFYPGTSGSCSGCGSLSLPLLAGLVAADAVASLLIVGAVFLCARPRRSPAQEDGKVYINMPGRG

SEQ ID NO: 178854 - DNA, 282 bp, Artificial Sequence
  derived and/or modified sequence
atgatccacctgggccacatcctgttcctgctgctgctgcccgtggccgccgcccagaccacccccggcgagagaagcagcctgcccgccttctaccccggcaccagcggcagctgcagcggctgcggcagcctgagcctgcccctgctggccggcctggtggccgccgacgccgtggccagcctgctgatcgtgggcgccgtgttcctgtgcgccagacccagaagaagccccgcccaggaggacggcaaggtgtacatcaacatgcccggcagaggctag

SEQ ID NO: 178855 - DNA, 282 bp, Artificial Sequence
  derived and/or modified sequence
atgatacacttgggacacatcctcttcctactcttattacctgttgccgccgctcagaccacaccgggggagcgttctagcttgcctgctttctaccccggtacatccgggagctgctccggctgcggatccttgtcccttcccctgctggcaggtctcgttgccgctgatgccgttgcctccctcctaatcgttggcgccgtctttttgtgtgctaggccacgccgatctcccgctcaggaagatggaaaggtttacatcaacatgcctggccgcgggtag

SEQ ID NO: 178856 - DNA, 507 bp, Artificial Sequence
  derived and/or modified sequence
cttgacaccagcagggtgacatccgctattgctacttctctgctcccccacagttcctctggacttctctggaccacagtcctctgccagacccctgccagaccccagtccaccatgatccatctgggtcacatcctcttcctgcttttgctcccagtggctgcagctcagacgactccaggagagagatcatcactccctgccttttaccctggcacttcaggctcttgttccggatgtgggtccctctctctgccgctcctggcaggcctcgtggctgctgatgcggtggcatcgctgctcatcgtgggggcggtgttcctgtgcgcacgcccacgccgcagccccgcccaagaagatggcaaagtctacatcaacatgccaggcaggggctgaccctcctgcagcttggacctttgacttctgaccctctcatcctggatggtgtgtggtggcacaggaacccccgccccaacttttggattgtaataaaacaattgaaacacc

SEQ ID NO: 178857 - DNA, 282 bp, Artificial Sequence
  derived and/or modified sequence
atgatccacctgggccacatcctcttcctgctgctgctgcctgtggccgccgcccagaccaccccaggagagaggagcagcctgcctgccttctacccaggcaccagcggcagctgcagcggctgcggcagcctgagcctgcccctgctggccggcctggtggccgcagatgctgtggccagcctgctgattgtgggcgctgtgttcctgtgtgcccggcccaggaggagccctgcccaggaggatggcaaggtgtacatcaacatgcctggccggggctag

SEQ ID NO: 178858 - DNA, 282 bp, Artificial Sequence
  derived and/or modified sequence
atgatccacctgggccacatcctgttcctgctgctgctgcccgtggccgcagcccaaactactcctggggaacgatcttccctgccagccttctatccaggtacatctggatcatgctcaggatgtggctctctgagtctgcctctgttagcagggctcgtcgcagcagacgctgtcgctagtcttttgatcgtgggtgcggtcttcttgtgcgcgcgccctagacgtagtccagctcaggaggatggaaaggtgtacattaacatgccaggccgaggctag

SEQ ID NO: 178859 - DNA, 282 bp, Artificial Sequence
  derived and/or modified sequence
atgatccacctgggccacatccttttcctccttctgctgcctgtcgccgctgcacagaccactcccggagaacgatcctctcttccagccttctaccccggaacaagcggctcctgttctggttgcgggagcctgtctttgccactgttggccggactggtggccgcagacgcagtggcgagccttctaattgtgggcgctgtgttcttatgtgcgagaccacgcaggtcgcctgcccaggaagatgggaaggtgtacattaatatgcccggacgcggttag

SEQ ID NO: 178860 - protein, 327 aa, Artificial Sequence
  derived and/or modified sequence
MPGPTQTLSPNGENNNDIIQDNNGTIIPFRKHTVRGERSYSWGMAVNVYSTSITQETMSRHDIIAWVNDIVSLNYTKVEQLCSGAAYCQFMDMLFPGCISLKKVKFQAKLEHEYIHNFKLLQASFKRMNVDKVIPVEKLVKGRFQDNLDFIQWFKKFYDANYDGKEYDPVEARQGQDAIPPPDPGEQIFNLPKKSHHANSPTAGAAKSSPAAKPGSTPSRPSSAKRASSSGSASKSDKDLETQVIQLNEQVHSLKLALEGVEKERDFYFGKLREIELLCQEHGQENDDLVQRLMDILYASEEHEGHTEEPEAEEQAHEQQPPQQEEY

SEQ ID NO: 178861 - DNA, 984 bp, Artificial Sequence
  derived and/or modified sequence
atgccagggcctacacagaccctgagccccaatggggagaacaataatgatatcattcaagacaacaatggaaccattattccatttcgcaaacacaccgtgcgaggagaacgaagttacagctggggcatggccgttaacgtgtattccacaagcataacacaggaaacgatgtctcggcatgatatcatcgcctgggtgaatgacatagtttccttaaactacacaaaagtagaacagctgtgctctggggcagcttactgtcaattcatggacatgctttttccaggctgtatcagcctgaagaaagtcaaattccaggcaaaacttgaacatgagtatattcataatttcaagctcctgcaggcctccttcaagcggatgaatgtagataaggttattcccgtggagaagctggtgaaggggcgtttccaggataatctcgacttcattcagtggttcaagaaattctacgatgccaactacgatggtaaagagtacgaccccgtggaggcacgccaggggcaggacgcaattcccccccccgacccaggagaacagatcttcaatctgcccaaaaagtcacaccacgccaacagtcctactgcgggggcggctaagtcaagccccgcagcaaagcccggatcaacaccatcaagaccttcttcagcaaagcgagctagcagtagtgggtccgcctctaagagcgataaagacctagaaacccaggtgatacagttgaacgagcaggttcactccctaaagctggccctcgagggggtcgaaaaagagcgtgacttttatttcggtaagctgagggagatcgagctgctgtgccaggagcacggccaggagaatgatgatctcgttcagcgtctgatggatattttgtacgcctcagaagaacacgagggacacaccgaggagcctgaggccgaagaacaagcgcatgagcagcagcccccccagcaggaagagtactag

SEQ ID NO: 178862 - DNA, 984 bp, Artificial Sequence
  derived and/or modified sequence
atgcctggccccacccagaccctgagccccaatggagagaacaacaatgacatcatccaggacaacaacggcaccatcatccccttcaggaagcacacagtgcggggggagaggagctacagctggggcatggctgtgaatgtgtacagcaccagcatcacccaggagaccatgagcagacatgacatcatcgcctgggtgaatgacatcgtgtccctgaactacaccaaggtggagcagctgtgcagcggggccgcctactgccagttcatggacatgctgtttcctggctgcatcagcctgaagaaggtgaagttccaggccaagctggagcacgagtacatccacaacttcaagctgctgcaggccagcttcaagaggatgaatgtggacaaggtgattcctgtggagaagctggtgaagggccgcttccaggacaacctggacttcatccagtggttcaagaagttctatgatgccaactatgatggcaaggagtatgaccctgtggaggcccggcagggccaggatgccatccccccaccagaccccggggagcagatcttcaacctgcccaagaagagccaccacgccaacagccccacagctggagctgccaagagcagccctgctgccaagccaggcagcacccccagccggcccagcagcgccaagagggccagcagcagcggcagcgccagcaagagtgacaaggacctggagacccaggtgatccagctgaatgagcaggtgcacagcctgaagctggccctggagggcgtggagaaggagcgggacttctactttgggaagctgcgggagattgagctgctgtgccaggagcacggccaggagaatgatgacctggtgcagaggctgatggacatcctgtatgccagcgaggagcacgagggccacacagaggagcctgaggccgaggagcaggcccacgagcagcagcccccccagcaggaggagtactag

SEQ ID NO: 178863 - DNA, 6202 bp, Artificial Sequence
  derived and/or modified sequence
agagggcggggccgcaggagggcggggcgcgagcgagagctgggagaaggcagtgagcgagcaggcggcaggcacggtccgtgcggagcaggcgagcgagcgggaagacgcagccaccttcctcaccagccagcccacagcggtttgttccccttctcgggagtgcgccaatgcctgggccgacccaaaccctgtccccaaatggcgagaacaacaacgacatcatccaggataataacgggaccatcattcctttccggaagcacacagtgcgcggggagcgttcctacagttggggaatggcggtcaatgtgtattctacctcgataacccaagagactatgagcagacatgacatcattgcatgggttaatgacatagtatctttaaactacacaaaagtggaacagctttgttcaggagcggcctattgccaattcatggacatgctcttccctggctgcattagtttgaagaaagtaaaatttcaagcaaagctggaacatgaatatattcacaattttaaacttctgcaagcatcatttaagcgaatgaacgttgataaggtaattccagtggagaagctagtgaaaggacgtttccaggacaacctggattttattcaatggtttaagaaattctatgatgctaactacgatgggaaggagtatgatcctgtagaggcacgacaagggcaagatgcaattcctcctcctgaccctggtgaacagatcttcaacctgccaaaaaagtctcaccatgcaaactcccccacagcaggtgcagctaaatcaagtccagcagctaaaccaggatccacaccttctcgaccctcatcagccaaaagggcttcttccagtggctcagcatccaaatccgataaagatttagaaacgcaggtcatacagcttaatgaacaggtacattcattaaaacttgcccttgaaggcgtggaaaaggaaagggatttctactttgggaagttgagagagatcgagctactctgccaagaacacgggcaggaaaatgatgacctcgtgcagagactaatggacatcctgtatgcttcagaagaacacgagggccacacagaagagccggaagcagaggagcaagcccacgaacagcagcccccgcagcaggaagagtactgacccaccccggctgctcttgacacttccattgtgtgtgggaacgtttcttctggagaattggaacatgtgtggccccaagctcaacagaaaccagttgttcccaatctgccgttaccatcaacgcactgttgcatatgccagccactgcgcttggttcccattttctttgccaaggtgtattagcggacggccctctggccacctacccgagagatcgtagggtcacatacatccaacttcaccacttggctgcttgagattggttctgctcttttcttcatttctttccagaacaactctttcccaccccaacaccactgccaccacccctctttttatcctggtgtgaaacaatggtaatttgatatatggtatttatattggcatttttcaacccagtgtcactagatgtcacacacatttgtggtgctttgatgtttgcaagtctaacctctgaacataaatttggtcaaataattggaacaaagggaaacagatacttgatatgaaagccataatgacggtgacttgtgtcgtgggggaaaacataaggtcattttctccctctactcacaatactaaagggaaaaaatggattcaaagctaggatttcagggcccagcagtgttcctccatcagcatgttagacaactacacagtatgttgttagttttgaaagacattcactcaaggaaaacaccatctcaactttgcccgctcaccatgtcccttgcccccatgtagcccatttcccaggttatgctcttttctttctcagggtcctctttggtgggcagccactccccgagatgttgccatcagttttctgcagtccaaagagggtatggttaggtacgggtcttcctgcctcattcctcttcctctttgtgtaggtttcagccacaaaactgtcattcactctaggggacccctactaaagggtaacttcaggtgtgcagccctgagctccaaggctctgcaccatgccacacacttgctgtaaggctagaagtgaagaccttattaataggagcataattgcgagggagaatcatggttctgcagtctggtgtagacactggaataacagcacagaaaaatctatgactcccaatatcttctagaataaagaattttccctctttaacacaagggccctccttgtcattgaccttagctaaaccatggcaattcataaatagaggaaacattaatgaattaaaagcattccttattttttaactaatatttgtacattttcttagtctctttccaagtctttgcctcttttttttctttatttttattttttcctttgacagatggtatcccttcctggatcattcatttcaccttggtttctaactttaggtttactttcacttgttatttgacttagcaggtgcaacaaaaacaagaaacaaatgtgcccaccccactttccgcttaactgaaaagcttaaaataaatttctgaattatgtatcctgaagctttgaaatttctttattaatcgatgaaatatgaattctaaattctagcattgaagcttttcaccaaaagaagtctctccaaaataaatcttttgcagcaaagtgatatttattgagttatgtggaaaagatggcttgtatttttcagattattacaacacactgtgcagaattagacagatgttccgtggtgtttggtttccctttcttctctctcctgctcactctgcattatagcagcagcttatttctctaaggctggacagcctggctctcggcagtgacgtcctcccacacctggtcacaagtagtagtggctgtgctatacccagcatcatgcttaacagcgtgttgcccttctgagcctgttgtactcactgatctctttaaaaacaaaaaatagctcttgtaaaaggtcacaataactctatgcacctgatactgcagtggttcctaggccattcttcatctgctctggacatctcagtcatacccaatgctcagtggatcatgaccaaactcctgtcatgtggatgcacgtgagtgggtagcagggagtcaggatcctgccttctccagcaaccccttactgctgtataacttgcataagcctccctggtgactcttgcaggaaccactccattgccctccagctccccagccttctcagttataaacatgctggccagatctcttagcctgcaaagagaactttccccagtcaccatagaccattctccttcctgaaggcttggggcagaccattcgtttatttagagaagagctatacattcttctttctggtcccatcttaaacgtcttctgttgtgctgcaccccagatggtgtctcagatgctttggggaatctttaacagctgaatttgagtcagtcctcttaggctgcacctccagcctctgcagatcccccctcatttcccatggatggtgggaccccattattctctcatctcggcattcagggaacagtttccttagcggcccctggtcacatgtcatcgggctgggcaggaagcgtccctgattgcgtgctccacttctccctctcaggaagcccagtttcatccttagtaccccccctcgtgcccgctgtcggctggttatagcacttccactgctactgtcagataggaagtgatcgaagcagggggcaaagagaaagcccatatttgttctaagcagaaaagcaggaaaaaaaaaaaaaaaaaagaaagaaaaacacctgttgacctgagagaagtaaattccagaagggaaccaagaactcttcccttccctggtgagtatttccattattccgttaaggtttaatatgcattcagattacttttactaaataggacaccataaagcttttgttatatattaaatgtaaactgaaaggaatgtaaacatatgtattgttaattataaatatagataagtaatgacataatagatgaaaaagtcttattcagatgtatcacattcattttacattacccacctattgtcgcatggtagaatagttttttgtctctgaatatgtgaataacttgacttgcattgatctttttacatatttaataaaaaaaaaagtatatgttaaaatctgcctggagttacagattcttaaatttttatgctgaagcttcccttttcagtcagcatgtgaataggaatagatttgtgtggatttacacatctacccacattttattatgatttccccggggcgggggttgtctttgtttttattgatggccaatgttgttaacaagagttacagactcgtatttgatatcaaatgtagcagctataataccttttaaaaactttaccaaaaaaaaaaaaaaaaagacataaagagaaaacattcccttgggaaacattccacctgcaagcaaacagaatcctagctcctgcaggtccagcatactccatctggacaagacagtgctgggcaaataggaaactgtgggagaagcaggcagatgtttctaagtacagctttgtggcagaatgacctgcttgacaaaaaccctttgaataagtgtttgttgactttaaacggcaatgatttatcgacatgagctataattgtaataacaatttaacagatacaggaataggtgaaaagagaaatgtatttcaactggcccagtaatcacctgtggagactgcagagcaggccacactgggatgcagacgttaccctggagcctgcaggttactgggcttcagctaatacccttttcaccgtgaagagtgccagccttccctacgctgcttccaagcaccacctagaggccagtttggtttctctactgtcctttggccactattttccagtcacttgcctttaggcacatttctattaaaataagtgggaaaataacagaaagcaaagatgttacccctcttctccatctacattcatttcctcccaaggtacaccacttgtgacagaagtttgtgagccattacctgggtttgaaatttcatgctcaaagtacatgtgtgtttcccatttaatccacgaactctggggttttaaacacttgatcttagacatttgtgcacagacaaaaatacatgtgattcatcttacaaaatgtacactggtggactctagtaaatctgtcactgatggttcaaaggtggcgaaataacatgcttgttctattttattaaatctgacatcatttctaaaaatttgttgcttctggtactatggataggctcaagtccagagacaccccttctcaaaaaagttaatggaattccattgaatttgagttacaaaatgccagttctctaaaacacacacagacaacttggtttctgacttgttttattccttttaactgctagaacacaactatgatcattaattaaggctgctatcactagtaataacttttactgacccagtttctcagcactgaggcaatgttgccaaatagcacaaatgatggataaaaacatctccgtggatgtctaatagctcctgtcttgccaaactaggaactcataaaagatgttttccactcattagaggaatcctggctttatttgcctaaaggaaagcaaagctgaggagaaaatccattgatccctggaggaccctcacgtggcattggtactttggatcacaagactgccccacgggcagaccccccaactctgagccagaccccatgtcttgtatagattacgagtacacagaaggtgcatttactgaggctgtgcttctgttttgggtttacaaatgtcatcaaaatggaagacccagctgaagttaatttgttggatgcctttttctctcaattcactggaaaaaaaaaatgtttaactttttagcttccaagttttaatttctaaaacaggtttcttgtggtattttgcaacgattttatcatcaagcctggtgataaattgtttttaaagggtaatgatgtattaatgtacctttgaatttacgattctcagtaggaaactaacccaagacctaaatgttttcttttctagagaataaaaaagttaagtacatgtttc

SEQ ID NO: 178864 - DNA, 984 bp, Artificial Sequence
  derived and/or modified sequence
atgcccggccccacccagaccctgagccccaacggcgagaacaacaacgatatcatacaagacaataacggtactatcattccattcaggaaacataccgtgcggggcgagcgaagttattcgtggggcatggccgtgaatgtctacagtacatctattactcaggaaactatgtcccgccatgacatcatagcttgggtcaatgatatcgtttccctcaattacacaaaggtcgagcagttatgcagcggggccgcttattgccagtttatggacatgcttttcccaggctgcattagtttgaaaaaggtgaagtttcaggccaagcttgaacacgagtacattcataactttaaactgctgcaggccagcttcaaacggatgaacgtcgataaggtgatccctgtggagaaactggtcaaggggcgatttcaggacaatcttgacttcatccagtggttcaagaagttctacgacgctaactatgacggtaaagagtacgaccccgtggaagcgcggcagggccaggatgccattcctccccccgaccctggggagcagatctttaatcttcccaagaaatcacaccatgctaacagtccaaccgctggtgccgccaagtcatctcctgcggccaagcctggctcaacaccaagccggccgtcatctgccaaaagagcttctagctctggctctgcttcgaaaagcgataaggatctcgagacacaggtcatccagctcaatgagcaggtacacagcttgaagttggcccttgaaggtgtggaaaaagagcgggacttttattttggcaagctgagagagatcgagctattgtgtcaggaacacggacaggaaaacgacgatcttgtgcaacgccttatggacattctgtacgcctctgaggagcatgaagggcacaccgaagaacccgaggccgaagaacaagcgcacgaacagcagccgccccagcaggaggaatattag

SEQ ID NO: 178865 - DNA, 984 bp, Artificial Sequence
  derived and/or modified sequence
atgcctggcccaacacagacattgtcccctaacggcgaaaataacaatgacataatccaggataataacggcacaatcataccttttcgcaagcacactgtccgcggagagcgatcctattcatggggtatggccgtcaatgtgtattcaacaagtatcacccaggagaccatgagtcgtcatgacattattgcgtgggttaacgacattgttagtcttaactatactaaagtggaacagctgtgttcaggagcggcatattgccagttcatggacatgcttttccccggatgcatctccctcaagaaggttaaatttcaggctaaactcgagcatgaatatattcataatttcaaactgctccaggcatccttcaaaaggatgaatgtggacaaggtgattccagtggagaagcttgtcaaaggcagattccaggataatttggactttatacagtggttcaagaagttttatgacgctaattatgatggaaaagaatacgatcctgtggaagccaggcaggggcaagacgcaatccccccacctgaccctggagagcaaatatttaacttgccaaagaaatctcatcatgcgaatagtcccaccgctggcgcagccaagtctagtcctgcggctaaaccgggatcgactcctagccggccttcttcagctaagcgagctagcagtagcggatcagcctcgaaatccgataaggacttagagacccaggtcattcagctcaacgagcaggttcatagtctcaaactcgccctcgagggagtggaaaaagaacgagatttttattttggtaaactccgcgagattgagctgttatgccaggagcatggccaggagaatgatgatcttgtgcagcgcctgatggacatcctttatgcaagcgaagagcatgagggtcataccgaagaaccagaggcagaggagcaggcacacgagcagcaaccaccacagcaagaggagtactag

SEQ ID NO: 178866 - DNA, 984 bp, Artificial Sequence
  derived and/or modified sequence
atgcccggccccacccagaccctgagccccaacggcgagaacaacaacgacatcatccaggacaacaacggcaccatcatccccttcagaaagcacaccgtgagaggcgagagaagctacagctggggcatggccgtgaacgtgtacagcaccagcatcacccaggagaccatgagcagacacgacatcatcgcctgggtgaacgacatcgtgagcctgaactacaccaaggtggagcagctgtgcagcggcgccgcctactgccagttcatggacatgctgttccccggctgcatcagcctgaagaaggtgaagttccaggccaagctggagcacgagtacatccacaacttcaagctgctgcaggccagcttcaagagaatgaacgtggacaaggtgatccccgtggagaagctggtgaagggcagattccaggacaacctggacttcatccagtggttcaagaagttctacgacgccaactacgacggcaaggagtacgaccccgtggaggccagacagggccaggacgccatccccccccccgaccccggcgagcagatcttcaacctgcccaagaagagccaccacgccaacagccccaccgccggcgccgccaagagcagccccgccgccaagcccggcagcacccccagcagacccagcagcgccaagagagccagcagcagcggcagcgccagcaagagcgacaaggacctggagacccaggtgatccagctgaacgagcaggtgcacagcctgaagctggccctggagggcgtggagaaggagagagacttctacttcggcaagctgagagagatcgagctgctgtgccaggagcacggccaggagaacgacgacctggtgcagagactgatggacatcctgtacgccagcgaggagcacgagggccacaccgaggagcccgaggccgaggagcaggcccacgagcagcagcccccccagcaggaggagtactag

SEQ ID NO: 178867 - protein, 1686 aa, Artificial Sequence
  derived and/or modified sequence
MPGGPSPRSPAPLLRPLLLLLCALAPGAPGPAPGRATEGRAALDIVHPVRVDAGGSFLSYELWPRALRKRDVSVRRDAPAFYELQYRGRELRFNLTANQHLLAPGFVSETRRRGGLGRAHIRAHTPACHLLGEVQDPELEGGLAAISACDGLKGVFQLSNEDYFIEPLDSAPARPGHAQPHVVYKRQAPERLAQRGDSSAPSTCGVQVYPELESRRERWEQRQQWRRPRLRRLHQRSVSKEKWVETLVVADAKMVEYHGQPQVESYVLTIMNMVAGLFHDPSIGNPIHITIVRLVLLEDEEEDLKITHHADNTLKSFCKWQKSINMKGDAHPLHHDTAILLTRKDLCAAMNRPCETLGLSHVAGMCQPHRSCSINEDTGLPLAFTVAHELGHSFGIQHDGSGNDCEPVGKRPFIMSPQLLYDAAPLTWSRCSRQYITRFLDRGWGLCLDDPPAKDIIDFPSVPPGVLYDVSHQCRLQYGAYSAFCEDMDNVCHTLWCSVGTTCHSKLDAAVDGTRCGENKWCLSGECVPVGFRPEAVDGGWSGWSAWSICSRSCGMGVQSAERQCTQPTPKYKGRYCVGERKRFRLCNLQACPAGRPSFRHVQCSHFDAMLYKGQLHTWVPVVNDVNPCELHCRPANEYFAEKLRDAVVDGTPCYQVRASRDLCINGICKNVGCDFEIDSGAMEDRCGVCHGNGSTCHTVSGTFEEAEGLGYVDVGLIPAGAREIRIQEVAEAANFLALRSEDPEKYFLNGGWTIQWNGDYQVAGTTFTYARRGNWENLTSPGPTKEPVWIQLLFQESNPGVHYEYTIHREAGGHDEVPPPVFSWHYGPWTKCTVTCGRGVQRQNVYCLERQAGPVDEEHCDPLGRPDDQQRKCSEQPCPARWWAGEWQLCSSSCGPGGLSRRAVLCIRSVGLDEQSALEPPACEHLPRPPTETPCNRHVPCPATWAVGNWSQCSVTCGEGTQRRNVLCTNDTGVPCDEAQQPASEVTCSLPLCRWPLGTLGPEGSGSGSSSHELFNEADFIPHHLAPRPSPASSPKPGTMGNAIEEEAPELDLPGPVFVDDFYYDYNFINFHEDLSYGPSEEPDLDLAGTGDRTPPPHSHPAAPSTGSPVPATEPPAAKEEGVLGPWSPSPWPSQAGRSPPPPSEQTPGNPLINFLPEEDTPIGAPDLGLPSLSWPRVSTDGLQTPATPESQNDFPVGKDSQSQLPPPWRDRTNEVFKDDEEPKGRGAPHLPPRPSSTLPPLSPVGSTHSSPSPDVAELWTGGTVAWEPALEGGLGPVDSELWPTVGVASLLPPPIAPLPEMKVRDSSLEPGTPSFPTPGPGSWDLQTVAVWGTFLPTTLTGLGHMPEPALNPGPKGQPESLSPEVPLSSRLLSTPAWDSPANSHRVPETQPLAPSLAEAGPPADPLVVRNAGWQAGNWSECSTTCGLGAVWRPVRCSSGRDEDCAPAGRPQPARRCHLRPCATWHSGNWSKCSRSCGGGSSVRDVQCVDTRDLRPLRPFHCQPGPAKPPAHRPCGAQPCLSWYTSSWRECSEACGGGEQQRLVTCPEPGLCEEALRPNTTRPCNTHPCTQWVVGPWGQCSGPCGGGVQRRLVKCVNTQTGLPEEDSDQCGHEAWPESSRPCGTEDCEPVEPPRCERDRLSFGFCETLRLLGRCQLPTIRTQCCRSCSPPSHGAPSRGHQRVARR

SEQ ID NO: 178868 - DNA, 5489 bp, Artificial Sequence
  derived and/or modified sequence
cttttctttgcctctgcagcggccaagggggcgggccctgcagcctttgttgcccgcggaccgagcgcagccgaacggagtcggggccgggtcgccgggagctgcacgccggccgggcatgtcctgagccggacctgggaccaggcagcgaccggacgggacggacgagagcgtgcgcgcggggtcacccggcggccgcccggttcctgccatgcccggcggccccagtccccgcagccccgcgcctttgctgcgccccctcctcctgctcctctgcgctctggctcccggcgcccccggacccgcaccaggacgtgcaaccgagggccgggcggcactggacatcgtgcacccggttcgagtcgacgcggggggctccttcctgtcctacgagctgtggccccgcgcactgcgcaagcgggatgtatctgtgcgccgagacgcgcccgccttctacgagctacaataccgcgggcgcgagctgcgcttcaacctgaccgccaatcagcacctgctggcgcccggctttgtgagcgagacgcggcggcgcggcggcctgggccgcgcgcacatccgggcccacaccccggcctgccacctgcttggcgaggtgcaggaccctgagctcgagggtggcctggcggccatcagcgcctgcgacggcctgaaaggtgtgttccagctctccaacgaggactacttcattgagcccctggacagtgccccggcccggcctggccacgcccagccccatgtggtgtacaagcgtcaggccccggagaggctggcacagcggggtgattccagtgctccaagcacctgtggagtgcaagtgtacccagagctggagtctcgacgggagcgttgggagcagcggcagcagtggcggcggccacggctgaggcgtctacaccagcggtcggtcagcaaagagaagtgggtggagaccctggtagtagctgatgccaaaatggtggagtaccacggacagccgcaggttgagagctatgtgctgaccatcatgaacatggtggctggcctgtttcatgaccccagcattgggaaccccatccacatcaccattgtgcgcctggtcctgctggaagatgaggaggaggacctaaagatcacgcaccatgcagacaacaccctgaagagcttctgcaagtggcagaaaagcatcaacatgaagggggatgcccatcccctgcaccatgacactgccatcctgctcaccagaaaggacctgtgtgcagccatgaaccggccctgtgagaccctgggactgtcccatgtggcgggcatgtgccagccgcaccgcagctgcagcatcaacgaggacacgggcctgccgctggccttcactgtagcccacgagctcgggcacagttttggcattcagcatgacggaagcggcaatgactgtgagcccgttgggaaacgacctttcatcatgtctccacagctcctgtacgacgccgctcccctcacctggtcccgctgcagccgccagtatatcaccaggttccttgaccgtgggtggggcctgtgcctggacgaccctcctgccaaggacattatcgacttcccctcggtgccacctggcgtcctctatgatgtaagccaccagtgccgcctccagtacggggcctactctgccttctgcgaggacatggataatgtctgccacacactctggtgctctgtggggaccacctgtcactccaagctggatgcagctgtggacggcacccggtgtggggagaataagtggtgtctcagtggggagtgcgtacccgtgggcttccggcccgaggccgtggatggtggctggtctggctggagcgcctggtccatctgctcacggagctgtggcatgggcgtacagagcgccgagcggcagtgcacgcagcctacgcccaaatacaaaggcagatactgtgtgggtgagcgcaagcgcttccgcctctgcaacctgcaggcctgccctgctggccgcccctccttccgccacgtccagtgcagccactttgacgctatgctctacaagggccagctgcacacatgggtgcccgtggtcaatgacgtgaacccctgcgagctgcactgccggcccgcgaatgagtactttgccgagaagctgcgggacgccgtggtcgatggcaccccctgctaccaggtccgagccagccgggacctctgcatcaacggcatctgtaagaacgtgggctgtgacttcgagattgactccggtgctatggaggaccgctgtggtgtgtgccacggcaacggctccacctgccacaccgtgagcgggaccttcgaggaggccgagggcctggggtatgtggatgtggggctgatcccagcgggcgcacgcgagatccgcatccaagaggttgccgaggctgccaacttcctggcactgcggagcgaggacccggagaagtacttcctcaatggtggctggaccatccagtggaacggggactaccaggtggcagggaccaccttcacatacgcacgcaggggcaactgggagaacctcacgtccccgggtcccaccaaggagcctgtctggatccagctgctgttccaggagagcaaccctggggtgcactacgagtacaccatccacagggaggcaggtggccacgacgaggtcccgccgcccgtgttctcctggcattatgggccctggaccaagtgcacagtcacctgcggcagaggtgtgcagaggcagaatgtgtactgcttggagcggcaggcagggcccgtggacgaggagcactgtgaccccctgggccggcctgatgaccaacagaggaagtgcagcgagcagccctgccctgccaggtggtgggcaggtgagtggcagctgtgctccagctcctgcgggcctgggggcctctcccgccgggccgtgctctgcatccgcagcgtggggctggatgagcagagcgccctggagccacccgcctgtgaacaccttccccggccccctactgaaaccccttgcaaccgccatgtaccctgtccggccacctgggctgtggggaactggtctcagtgctcagtgacatgtggggagggcactcagcgccgaaatgtcctctgcaccaatgacaccggtgtcccctgtgacgaggcccagcagccagccagcgaagtcacctgctctctgccactctgtcggtggcccctgggcacactgggccctgaaggctcaggcagcggctcctccagccacgagctcttcaacgaggctgacttcatcccgcaccacctggccccacgcccttcacccgcctcatcacccaagccaggcaccatgggcaacgccattgaggaggaggctccagagctggacctgccggggcccgtgtttgtggacgacttctactacgactacaatttcatcaatttccacgaggatctgtcctacgggccctctgaggagcccgatctagacctggcggggacaggggaccggacacccccaccacacagccatcctgctgcgccctccacgggtagccccgtgcctgccacagagcctcctgcagccaaggaggagggggtactgggaccttggtccccgagcccttggcctagccaggccggccgctccccacccccaccctcagagcagacccctgggaaccctttgatcaatttcctgcctgaggaagacacccccataggggccccagatcttgggctccccagcctgtcctggcccagggtttccactgatggcctgcagacacctgccacccctgagagccaaaatgatttcccagttggcaaggacagccagagccagctgccccctccatggcgggacaggaccaatgaggttttcaaggatgatgaggaacccaagggccgaggagcaccccacctgcccccgagacccagctccacgctgccccctttgtcccctgttggcagcacccactcctctcctagtcctgacgtggcggagctgtggacaggaggcacagtggcctgggagccagctctggagggtggcctggggcctgtggacagtgaactgtggcccactgttggggtggcttctctccttcctcctcccatagcccctctgccagagatgaaggtcagggacagttccctggagccggggactccctccttcccaaccccaggaccaggctcatgggacctgcagactgtggcagtgtgggggaccttcctccccacaaccctgactggcctcgggcacatgcctgagcctgccctgaacccaggacccaagggtcagcctgagtccctcagccctgaggtgcccctgagctctaggctgctgtccacaccagcttgggacagccccgccaacagccacagagtccctgagacccagccgctggctcccagcctggctgaagcggggccccccgcggacccgttggttgtcaggaacgccggctggcaagcgggaaactggagcgagtgctctaccacctgtggcctgggtgcggtctggaggccggtgcgctgtagctccggccgggatgaggactgcgcccccgctggccggccccagcctgcccgccgctgccacctgcggccctgtgccacctggcactcaggcaactggagtaagtgctcccgcagctgcggcggaggttcctcagtgcgggacgtgcagtgtgtggacacacgggacctccggccactgcggcccttccattgtcagcccgggcctgccaagccgcctgcgcaccggccctgcggggcccagccctgcctcagctggtacacatcttcctggagggagtgctccgaggcctgtggcggtggtgagcagcagcgtctagtgacctgcccggagccaggcctctgcgaggaggcgctgagacccaacaccacccggccctgcaacacccacccctgcacgcagtgggtggtggggccctggggccagtgctcaggcccctgtggtggtggtgtccagcggcgcctggtcaagtgtgtcaacacccagacagggctgcccgaggaagacagtgaccagtgtggccacgaggcctggcctgagagctcccggccgtgtggcaccgaggattgtgagcccgtcgagcctccccgctgtgagcgggaccgcctgtccttcgggttctgcgagacgctgcgcctactgggccgctgccagctgcccaccatccgcacccagtgctgccgctcgtgctctccgcccagccacggcgccccctcccgaggccatcagcgggttgcccgccgctgactgcgccaggatgcacagaccgaccgacagacctcagtgcccaccacgggctgtggcggagctcccgccccctgcgccctaatggtgctaaccccctctcactacccagcagcaggctggggacctcctccccctcaaaaaaggtatttttttattctaacagtttgtgtaacatttattatgattttacataaatgagcatctaccattccaaagc

SEQ ID NO: 178869 - DNA, 1758 bp, Artificial Sequence
  derived and/or modified sequence
tttctttctttctctccttctagctctcttgtcttttctttgcctctgcagcggccaagggggcgggccctgcagcctttgttgcccgcggaccgagcgcagccgaccggacgggacggacgagagcgtgcgcgcggggtcacccggcggccgcccggttcctgccatgcccggcggccccagtccccgcagccccgcgcctttgctgcgccccctcctcctgctcctctgcgctctggctcccggcgcccccggacccgcaccaggacgtgcaaccgagggccgggcggcactggacatcgtgcacccggttcgagtcgacgcggggggctccttcctgtcctacgagctgtggccccgcgcactgcgcaagcgggatgtatctgtgcgccgagacgcgcccgccttctacgagctacaataccgcgggcgcgagctgcgcttcaacctgaccgccaatcagcacctgctggcgcccggctttgtgagcgagacgcggcggcgcggcggcctgggccgcgcgcacatccgggcccacaccccggcctgccacctgcttggcgaggtgcaggaccctgagctcgagggtggcctggcggccatcagcgcctgcgacggcctgaaaggtgtgttccagctctccaacgaggactacttcattgagcccctggacagtgccccggcccggcctggccacgcccagccccatgtggtgtacaagcgtcaggccccggagaggctggcacagcggggtgattccagtgctccaagcacctgtggagtgcaagtgtacccagagctggagtctcgacgggagcgttgggagcagcggcagcagtggcggcggccacggctgaggcgtctacaccagcggtcggtcagcaaagagaagtgggtggagaccctggtagtagctgatgccaaaatggtggagtaccacggacagccgcaggttgagagctatgtgctgaccatcatgaacatggtggctggcctgtttcatgaccccagcattgggaaccccatccacatcaccattgtgcgcctggtcctgctggaagatgaggaggaggacctaaagatcacgcaccatgcagacaacaccctgaagagcttctgcaagtggcagaaaagcatcaacatgaagggggatgcccatcccctgcaccatgacactgccatcctgctcaccagaaaggacctgtgtgcagccatgaaccggccctgtgagaccctgggactgtcccatgtggcgggcatgtgccagccgcaccgcagctgcagcatcaacgaggacacgggcctgccgctggccttcactgtagcccacgagctcgggcacagctcctgtacgacgccgctcccctcacctggtcccgctgcagccgccagtatatcaccaggttccttgagtgtgcagaggcagaatgtgtactgcttggagcggcaggcagggcccgtggacgaggagcactgtgaccccctgggccggcctgatgaccaacagaggaagtgcagcgagcagccctgccctgccagtgctcagtgacatgtggggagggcactcagcgccgaaatgtcctctgcaccaatgacaccggtgtcccctgtgacgaggcccagcagccagccagcgaagtcacctgctctctgccactctgtcggtggcccctgggcacactgggccctgaaggctcaggcagcggctcctccagccacgagctcttcaacgaggctgacttcatcccgcaccacctg

SEQ ID NO: 178870 - DNA, 5061 bp, Artificial Sequence
  derived and/or modified sequence
atgccagggggcccatctccaagaagcccggcccccctgctgcggccacttcttcttctcctgtgtgcacttgcccccggagctccgggccccgcccccggtcgcgccaccgagggccgggcagcactagatatagtacatcctgttcgcgtggacgctggaggcagcttcttgtcctatgaattatggcctcgtgccctccgtaagagagacgtcagcgtccggcgtgatgctcccgcgttctacgaactgcagtatcgaggacgagagttgaggttcaacctgaccgctaaccagcatcttttggcacctggatttgtctcagaaacaagacgcagaggaggcctgggtagggcccatatacgagcacacacacccgcgtgtcacctccttggtgaggttcaggaccctgagctggaaggtggactggccgccatttccgcctgcgacggtctgaagggggtgttccagctgtccaacgaggactatttcatagagccacttgactcagcccccgcaaggcctggacatgctcagccgcacgtagtctacaagagacaggctcctgaaagattagcccagcgcggggactcttcggcaccttccacttgtggtgttcaggtataccccgaacttgagagcagacgcgaaaggtgggaacaacggcaacaatggcgacgaccccggctgcgacgcctgcatcagagatcagtttctaaggaaaaatgggtcgagacccttgtggtcgccgacgccaaaatggtagaatatcatggtcagcctcaagtggagtcctacgtgttaacgattatgaatatggtcgccggcctgtttcacgatccgtctataggaaatcccatccatatcactatcgtgcgcctggtgcttctggaagatgaagaagaagatttgaagatcacccaccacgccgacaatactctcaagtctttttgcaagtggcaaaagtctatcaatatgaagggcgatgcacaccccctacaccacgacaccgccattctgctgacgcgtaaggacctatgcgccgctatgaatagaccctgcgaaaccctgggactgtctcacgtggccgggatgtgccaaccccatcgctcctgttccattaacgaagacactggcctgccactggcctttaccgtggcccacgagctaggccactcgttcggcattcaacatgatggctcaggaaatgactgcgaaccagtggggaagagaccctttatcatgtcccctcaattgctttatgatgctgccccgctaacgtggtcaagatgttcccgccagtacattacccgctttttggatcgcggatgggggctttgtctggacgatcccccggccaaagatataattgatttcccctctgtccctcccggcgtgttgtatgacgtgagtcatcagtgtagattacagtatggagcctactcagccttttgtgaggacatggataacgtgtgtcacacactatggtgcagtgttggcacgacctgccactccaaactcgacgcagctgtcgatggaactaggtgtggcgagaataaatggtgtctctcaggtgaatgtgtacccgttggtttcaggcccgaggctgtcgatggtggctggtccgggtggtccgcttggtcaatttgctctcggtcctgtgggatgggagtacaatctgctgaacggcagtgcacccagccgacacccaagtacaaggggcgctactgcgttggagaacgcaaacgtttccggctctgtaacctgcaagcttgccccgcgggccgccctagcttcagacatgttcagtgctctcactttgatgccatgttgtataaggggcagttacatacttgggtgcctgttgtgaacgatgtgaatccttgcgagctccattgtagacccgcgaatgagtactttgcggaaaaactccgcgacgccgtggtcgacgggaccccttgctaccaggtcagagctagtcgggatctttgtattaatggcatttgcaagaacgtcgggtgtgatttcgagattgactcaggagcaatggaggatcgttgcggggtgtgccacggaaacggatcaacctgccacaccgtgagtggcacattcgaggaggctgaaggactggggtacgtcgacgtaggtcttattccagcgggcgccagggagatccgtattcaggaggtggctgaggccgccaatttcctggccttaaggtcagaggatcccgagaaatatttccttaacggagggtggaccatccagtggaacggagattatcaggtcgccgggaccacttttacgtatgcacgccgagggaattgggaaaatctgacatctccagggcctacgaaagaaccagtgtggatccagctgctgtttcaggagagcaacccgggggtacactatgagtacaccatccaccgcgaggcggggggccatgatgaggtgcctccccccgtgtttagctggcattacggaccttggactaaatgtacagtaacatgcgggcgcggagttcagagacaaaatgtgtattgtctcgaaagacaagcaggccccgtcgacgaggaacactgcgatcctttgggacggcctgatgaccagcagaggaagtgttccgagcagccttgcccagcacgttggtgggcaggtgaatggcagctttgcagttcatcctgcggtccaggaggcctctctagaagagccgttctctgtattagatcggttggcctagatgaacagtcagctcttgagccacctgcttgcgagcatctgccaaggccacccacagaaactccctgcaatcgccacgtgccatgccctgcaacttgggctgtgggtaactggtctcaatgctccgtgacctgcggtgagggaacccagcgtagaaacgtcctgtgtactaacgataccggtgtgccctgtgacgaagcccagcagcccgcttctgaggttacatgttctctgccgctctgccggtggccgctcggcacactgggacctgagggcagtggaagcggctccagttcacacgaactcttcaatgaggccgactttatccctcaccacctcgctcctaggccatcaccggcttcaagtccgaagcccggcaccatggggaacgctatcgaggaagaggcgcccgagttggacctgcctggacctgtgttcgtcgacgacttttactacgactataattttattaacttccacgaagatctctcttacggtccatccgaagagccagatctcgacctggcaggaacgggcgacaggacccctcctcctcatagtcatcctgccgccccctctactggaagccccgtacctgccactgagccgccagcggcaaaggaggagggtgttctgggcccttggagcccctccccctggccaagccaggctggacgatccccgccgccaccttcagaacagacccccggaaaccccctaattaattttctccccgaagaggataccccaatcggcgcaccagatctgggtctaccttctttgtcatggcccagagtgtctacagacggtctacagacgccagcaactccagagagccaaaatgacttccccgtgggtaaagattcacaatctcaactgccacccccttggcgtgacagaacaaacgaggttttcaaggatgacgaagaacccaaaggtcggggtgcgccccatcttccaccgaggcccagttccacattaccaccgctgagtccagtgggaagcacccactcttctcccagtccagatgtcgccgaactgtggactggtggcacagtggcttgggagcccgcactggagggcggcctcgggcccgtggactccgagctgtggcccacagtgggggtggcttcactgttaccccctcctatcgctcctctgcccgaaatgaaggtaagagacagcagcctggaacctggaacccctagttttcctaccccgggaccaggttcgtgggacctgcagaccgtggccgtctggggtacgttcctaccaacaactttgacaggccttggacacatgcccgaaccagccttaaaccctggtcctaaagggcagccagaatcactctccccagaggtcccactgagcagtaggcttctcagtacccccgcttgggacagtcccgctaactcacaccgtgtgcccgaaacccagccactcgctccgagtctggccgaggccggccctcccgcggatcctctggtggtgcgaaatgcggggtggcaggccggaaactggtccgagtgcagtacgacatgcgggttgggggccgtgtggcgtccggtgagatgtagctctgggcgggatgaagattgtgcgcccgcgggccgcccccaacccgccagacggtgccatctgcgtccctgcgctacgtggcattcagggaattggtccaagtgctctcgatcatgcggcggaggaagtagtgtccgagatgtgcagtgtgtcgacacccgggacctgaggcccctccggccgttccactgtcagcctgggcccgccaaacctcccgctcaccggccatgcggggctcagccatgtctttcgtggtatactagctcctggcgcgaatgttcagaggcatgcggcggtggcgagcaacagcgactggtcacatgtcctgagcccggcctttgcgaggaggctctcagaccgaatacaacaagaccttgcaatacccatccgtgtacacagtgggtggttgggccctgggggcagtgttcaggtccatgcggcggtggggtgcagaggcgtctggtcaaatgtgtgaatactcaaaccggtcttcccgaggaggactctgatcaatgtggacacgaagcgtggcccgagagttctcgaccgtgcggaactgaggattgtgaaccggtcgaaccacccagatgcgagagagacagactgagtttcgggttctgtgagacgctgcgcctgcttggtcggtgtcagttgcccactatcaggacccaatgttgccgtagctgtagccccccttcccatggagcgccgagtcgtggtcaccaacgcgtagcccgccgctag

SEQ ID NO: 178871 - DNA, 1383 bp, Artificial Sequence
  derived and/or modified sequence
atgcctggaggcccttccccaagatccccagctccactgctgaggccactgcttttgcttctttgtgcccttgcccctggggcacctggccctgcccccggaagggcaaccgagggccgggcagccctcgatatcgtgcacccagtcagagtcgatgctggcggatctttcctcagttacgagttgtggccccgcgccctccggaagagggatgtgagtgtgcgacgcgacgccccagccttttacgagctgcagtatagaggtcgggaacttaggttcaaccttaccgctaaccagcacttacttgcgcccggattcgtgagcgaaacaaggaggaggggggggctcggacgcgcccacatccgggcccacacccctgcctgccacttgctgggtgaagtgcaggatccggagttggaaggcggccttgcggctattagcgcctgtgatgggttgaaaggcgtgttccagctgagcaacgaggattactttatagagcctctggactcagcacccgcgagaccggggcacgcacagcctcacgtcgtttacaaacgtcaggcccccgaacggctggcgcagcgaggagatagtagtgcaccgtctacctgtggggtgcaggtttaccccgagctggaatcgaggagagagaggtgggaacagcggcaacaatggaggcgcccgcggttgcgcagattacatcagcgaagcgttagcaaggaaaaatgggtagaaactctggtcgttgcagacgccaagatggtcgaataccatggacaaccgcaggtggaaagttacgtgttgactataatgaatatggtcgccggtctgttccacgacccctctataggcaacccaattcacattaccatcgtgcggctagttctcctggaagacgaggaggaggacttaaaaattacccatcacgccgacaacactcttaagagtttttgcaagtggcagaagtccatcaacatgaagggggatgcccaccccttgcaccacgataccgcgattctgcttactcgaaaggacttgtgtgcagcaatgaacagaccgtgcgagaccctgggcctctcacacgtcgccggcatgtgccaaccccacagaagctgctctattaacgaggacacaggccttcctctggcgtttaccgtcgctcacgagctcggacacagttcctgcacaacccccctaccaagccccggccccgcggcagctgcgagtatttctccaggctcgctctcagtgcagagacaaaatgtgtactgtcttgaacgtcaggccggacccgtagatgaggagcactgtgatccccttgggaggcctgacgatcagcagcgtaagtgttcagagcaaccttgtcctgcttcagcgcaatag

SEQ ID NO: 178872 - DNA, 5061 bp, Artificial Sequence
  derived and/or modified sequence
atgcctgggggccccagccccaggagccctgcccccctgctgcggcccctgctgctgctgctgtgtgccctggcccctggggcccctggccctgcccctggccgggccacagagggccgggccgccctggacatcgtgcaccctgtgcgggtggatgctgggggcagcttcctgtcctatgagctgtggccccgggccctgaggaagagagatgtgtctgtgagaagagatgccccagccttctatgagctgcagtaccggggccgggagctgcgcttcaacctgacagccaaccagcacctgctggcccctggctttgtgtctgagacccggcggcggggcggcctgggccgggcccacatccgggcccacaccccagcctgccacctgctgggggaggtgcaggaccctgagctggagggcggcctggccgccatcagcgcctgtgatggcctgaagggcgtcttccagctgagcaatgaagactacttcatcgagcccctggacagcgccccagcccggcccggccacgcccagccccacgtggtgtacaagaggcaggcccctgagcggctggcccagagaggagacagcagcgcccccagcacctgtggggtgcaggtgtacccagagctggagagcagaagagagcgctgggagcagaggcagcagtggaggcggccccggctgcggcggctgcaccagaggtctgtgtccaaggagaagtgggtggagaccctggtggtggctgatgccaagatggtggagtaccacggccagccccaggtggagagctatgtgctgaccatcatgaacatggtggccggcctcttccatgaccccagcatcggcaaccccatccacatcaccatcgtgcggctggtgctgctggaggatgaggaggaggacctgaagatcacccaccacgccgacaacaccctgaagagcttctgcaagtggcagaagagcatcaacatgaagggagatgcccaccccctgcaccacgacacagccatcctgctgaccaggaaggacctgtgtgccgccatgaaccggccctgtgagaccctgggcctgagccacgtggccggcatgtgccagccccacaggagctgcagcatcaatgaagacaccggcctgcccctggccttcaccgtggcccacgagctgggccacagctttggcatccagcatgatggcagcggaaatgactgtgagcctgtgggcaagaggcccttcatcatgagcccccagctgctgtatgatgctgcccccctgacctggagccgctgcagccggcagtacatcacccgcttcctggaccggggctggggcctgtgcctggatgatcctccagccaaggacatcatcgacttccccagcgtgcccccaggagtgctgtatgatgtgagccaccagtgccgcctgcagtacggggcctacagcgccttctgtgaggacatggacaacgtgtgccacaccctgtggtgcagcgtgggcaccacctgccacagcaagctggatgctgctgtggatggcacccgctgtggggagaacaagtggtgcctgagcggggagtgtgtgcctgtgggcttccggcctgaggccgtggatggcggctggagcggctggagcgcctggagcatctgcagccgcagctgtggcatgggcgtgcagagcgctgagcggcagtgcacccagcccacccccaagtacaagggccgctactgtgtgggggagaggaagcgcttccggctgtgcaacctgcaggcctgcccagctggccggcccagcttcagacatgtgcagtgcagccactttgatgccatgctgtacaagggccagctgcacacctgggtgcctgtggtgaatgatgtgaacccctgtgagctgcactgcaggcctgccaatgagtactttgctgagaagctgagagatgctgtggtggatggcaccccctgctaccaggtgcgggccagccgggacctgtgcatcaatggcatctgcaagaatgtgggctgtgactttgaaattgacagcggggccatggaggacagatgtggggtgtgccacggcaatggcagcacctgccacacagtgtctggcacctttgaggaggccgagggcctgggctacgtggatgtgggcctcatcccagctggggcccgggagatccgcatccaggaggtggccgaggccgccaacttcctggccctgcggtctgaggaccctgagaagtacttcctgaatggaggctggaccatccagtggaatggagactaccaggtggccggcaccaccttcacctacgcccggcggggcaactgggagaacctgaccagccctggccccaccaaggagcctgtgtggatccagctgctcttccaggagagcaaccctggggtgcactatgagtacaccatccaccgggaggccggcggccatgatgaggtgcccccacctgtgttctcctggcactacggcccctggaccaagtgcaccgtgacctgtggccggggcgtgcagaggcagaatgtgtactgcctggagcggcaggccggccctgtggatgaggagcactgtgaccccctgggccgcccagatgaccagcagaggaaatgttctgagcagccctgcccagcccgctggtgggccggggagtggcagctgtgcagcagcagctgtggccctgggggcctgagccggcgggctgtgctgtgcatccgctctgtgggcctggatgagcagagcgccctggagcccccagcctgtgagcacctgccccggcccccaacagagaccccctgcaacagacatgtgccctgcccagccacctgggccgtgggcaactggagccagtgcagcgtgacctgtggggagggcacccagaggagaaatgtgctgtgcaccaatgacacaggagtgccctgtgatgaggcccagcagcctgccagcgaggtgacctgcagcctgcccctgtgccgctggcccctgggcaccctgggccctgagggcagcggcagcggcagcagcagccatgagctgttcaatgaagctgacttcatcccccaccacctggccccccggcccagccctgccagcagccccaagccaggcaccatgggaaatgccatcgaggaggaggcccctgagctggacctgcccggccctgtgtttgtggatgacttctactatgactacaacttcatcaacttccacgaggacctgtcctatggccccagcgaggagccagacctggacctggccggcactggagacaggaccccaccaccccacagccaccctgctgcccccagcacaggcagccctgtgcctgccacagagcccccagctgccaaggaggagggcgtgctgggcccctggagccccagcccctggcccagccaggccggccgcagccccccacctccttctgagcagaccccaggcaaccccctcatcaacttcctgcctgaggaggacacccccatcggggccccagacctgggcctgcccagcctgtcctggccccgggtgtccacagatggcctgcagaccccagccaccccagagagccagaatgacttccctgtgggcaaggacagccagagccagctgcccccaccctggagggacaggaccaatgaggtgttcaaggatgatgaggagcccaagggccgcggggccccccacctgcccccccggcccagcagcaccctgccccccctgagccctgtgggcagcacccacagcagccccagcccagatgtggccgagctgtggacaggaggcaccgtggcctgggagcccgccctggagggcggcctgggccctgtggacagcgagctgtggcccaccgtgggcgtggccagcctgctgcccccacccatcgcccccctgcctgagatgaaggtgcgggacagcagcctggagcccggcacccccagcttccccaccccaggccctggctcctgggacctgcagacagtggccgtgtggggcaccttcctgcccaccaccctgaccggcctgggccacatgcctgagcccgccctgaaccctggccccaagggccagcctgagagcctgagccctgaggtgcccctgagcagccggctgctgagcaccccagcctgggacagccctgccaacagccaccgggtgcctgagacccagcccctggcccccagcctggccgaggccggccccccagctgaccccctggtggtgagaaatgccggctggcaggccggcaactggagcgagtgcagcaccacctgtggcctgggcgctgtgtggaggcctgtgcgctgcagcagcggcagagatgaggactgtgccccagctggccggccccagcctgcccggcgctgccacctgcggccctgtgccacctggcacagcggcaactggagcaagtgcagccgcagctgtggcggcggcagctctgtgagagatgtgcagtgtgtggacacccgggacctgcggcccctgcggcccttccactgccagcccggccctgccaagcccccagcccaccggccctgtggggcccagccctgcctgtcctggtacaccagctcctggagagaatgttctgaggcctgtggcggcggggagcagcagaggctggtgacctgcccagagcccggcctgtgtgaggaggccctgcggcccaacaccacccggccctgcaacacccacccctgcacccagtgggtggtgggcccctggggccagtgcagcggcccctgtggcggcggcgtgcagaggcggctggtgaagtgtgtgaacacccagacaggcctgcctgaggaggacagcgaccagtgtggccacgaggcctggccagagagcagccggccctgtggcacagaggactgtgagcctgtggagcccccaagatgtgagcgggaccggctgagctttggcttctgtgagaccctgcggctgctgggccgctgccagctgcccaccatccgcacccagtgctgccgcagctgcagcccccccagccatggagcccccagccggggccaccagagggtggcccggaggtag

SEQ ID NO: 178873 - DNA, 1383 bp, Artificial Sequence
  derived and/or modified sequence
atgcctgggggccccagccccaggagccctgcccccctgctgcggcccctgctgctgctgctgtgtgccctggcccctggggcccctggccctgcccctggccgggccacagagggccgggccgccctggacatcgtgcaccctgtgcgggtggatgctgggggcagcttcctgtcctatgagctgtggccccgggccctgaggaagagagatgtgtctgtgagaagagatgccccagccttctatgagctgcagtaccggggccgggagctgcgcttcaacctgacagccaaccagcacctgctggcccctggctttgtgtctgagacccggcggcggggcggcctgggccgggcccacatccgggcccacaccccagcctgccacctgctgggggaggtgcaggaccctgagctggagggcggcctggccgccatcagcgcctgtgatggcctgaagggcgtcttccagctgagcaatgaagactacttcatcgagcccctggacagcgccccagcccggcccggccacgcccagccccacgtggtgtacaagaggcaggcccctgagcggctggcccagagaggagacagcagcgcccccagcacctgtggggtgcaggtgtacccagagctggagagcagaagagagcgctgggagcagaggcagcagtggaggcggccccggctgcggcggctgcaccagaggtctgtgtccaaggagaagtgggtggagaccctggtggtggctgatgccaagatggtggagtaccacggccagccccaggtggagagctatgtgctgaccatcatgaacatggtggccggcctcttccatgaccccagcatcggcaaccccatccacatcaccatcgtgcggctggtgctgctggaggatgaggaggaggacctgaagatcacccaccacgccgacaacaccctgaagagcttctgcaagtggcagaagagcatcaacatgaagggagatgcccaccccctgcaccacgacacagccatcctgctgaccaggaaggacctgtgtgccgccatgaaccggccctgtgagaccctgggcctgagccacgtggccggcatgtgccagccccacaggagctgcagcatcaatgaagacaccggcctgcccctggccttcaccgtggcccacgagctgggccacagcagctgcaccacccccctgcccagccctggccctgctgctgctgccagcatcagccctggcagcctgtctgtgcagaggcagaatgtgtactgcctggagcggcaggccggccctgtggatgaggagcactgtgaccccctgggccgcccagatgaccagcagaggaaatgttctgagcagccctgcccagccagcgcccagtag

SEQ ID NO: 178874 - DNA, 5061 bp, Artificial Sequence
  derived and/or modified sequence
atgcccggcggccccagcccccggagccccgcccccctgctgcggcctctgctgttgctcctttgtgcgctggcccctggagcacctggcccagctccaggacgagctacagaggggcgcgcagctctcgatatagtacaccccgtgagagtggatgctggaggcagcttcctgtcttatgagctttggccacgcgccctgcgcaagcgggatgtgtcagtgcggcgcgatgcccctgcattttatgagctgcagtaccgcggccgcgaacttagattcaacctgactgcaaaccagcatctcctggcgcccgggtttgtttctgagacacgtaggcgggggggcctaggacgagcccacataagggctcacactcccgcctgtcaccttctgggagaagtccaggatcctgagttggagggcggcctggctgctatttctgcatgcgatggactgaagggagtttttcagctgtctaacgaggattatttcattgagccactcgatagtgccccagcgaggcccgggcatgctcaaccacacgtggtgtataagagacaggcacccgaacggttggcccagagaggcgatagctctgccccctccacctgcggcgttcaggtctaccctgaactggaatccaggagggagcgatgggaacagcgtcagcagtggaggcggccgagactcaggaggcttcaccagcggagtgtttccaaggagaagtgggtcgaaaccctcgtcgttgctgatgcaaaaatggtggagtaccatggtcagccccaggtagaatcatacgtccttactattatgaatatggtcgcaggcctgttccatgatcccagtattgggaacccgatccacattacgattgtgcgattagtcctactggaggatgaggaagaagatcttaagattacccatcacgccgacaacacactcaaaagtttctgtaagtggcaaaaatcgatcaacatgaaaggtgatgcccaccctctgcaccacgacacagccattcttctcaccagaaaagatctgtgcgctgctatgaatcgaccatgtgaaaccctggggttgtctcatgttgccggcatgtgtcagccacacagatcttgcagcatcaatgaagataccggcctccctttagctttcaccgtggcccacgaactcggacacagttttggaatccagcacgatgggtccggcaatgactgtgagccagtgggtaagcggccgtttattatgtctccacagcttctatatgatgccgcccctttgacatggtcacgctgctcccgacagtacatcacccggttcctggaccgtggatggggactgtgccttgatgatccacctgcaaaggacatcatcgattttccatccgtaccacccggggttttgtatgatgtatcacatcagtgcagactgcagtatggtgcctacagcgcattttgcgaagacatggacaacgtgtgccatacgctctggtgtagcgtaggcacaacttgccactcaaaactggatgccgcggtggatggcacccggtgcggtgagaacaaatggtgcctcagtggagaatgtgtcccagtcggattccgccctgaagccgtggacggcggctggagcggatggtctgcgtggtcaatttgttctcggtcatgtggtatgggcgtgcagagtgccgagcggcagtgtacccagccaactccaaagtataaggggcggtattgtgttggcgaacgaaaacggtttcggttatgcaatcttcaggcctgccccgccggcaggcctagttttagacatgtgcagtgtagtcactttgacgctatgttgtataagggtcagctgcatacctgggtgcccgttgtgaatgacgtcaacccttgtgagctccattgtagacccgcaaatgaatattttgctgaaaagctacgagacgccgtagtggatgggacaccatgttaccaggtccgcgccagccgagacctctgcatcaacgggatttgcaagaatgtcgggtgtgacttcgaaattgactcgggggccatggaagatagatgcggtgtgtgtcacggaaacgggagcacatgccacactgtctcaggaacatttgaggaagcagagggcctgggatatgtcgacgttggactcatacctgccggcgcccgagaaattcgcattcaagaagtggccgaagctgcaaactttctggccttgaggtcggaagaccctgagaaatattttttgaatggtggatggaccatccagtggaacggtgactaccaggtggcaggcacaacgttcacttatgccaggcgggggaattgggaaaatctgaccagccccggaccgacaaaggaacctgtgtggattcagcttctttttcaggagagcaacccaggagtgcactacgaatacactattcacagagaagctgggggacacgatgaggtccccccgcctgtgttctcatggcattacggcccttggacaaagtgtacggtgacatgtggacggggcgtacagcgccaaaacgtttactgcctcgagaggcaggccgggcccgttgatgaagaacactgtgaccctttaggaaggcccgacgaccagcagcgtaagtgcagcgagcagccatgtcccgctaggtggtgggccggagagtggcagctttgctccagctcctgcggccctgggggtctaagccgtagggctgttctttgcataagatctgtgggcctagacgagcagagcgctttggagccccctgcctgcgaacatctgccccggccccctaccgaaaccccctgcaatcgacacgttccttgtccggcgacatgggctgtagggaactggtctcagtgtagcgtgacatgtggagaagggacgcagcgtcgcaacgtgctttgcacgaacgacaccggtgtgccatgtgatgaggctcagcagcccgcatcagaggttacctgttcccttccactctgccgatggcccctgggaaccctgggccctgaaggcagcggtagtggatcctcctcccatgaactgttcaacgaagctgattttattccccatcacctggctcctcgccccagtccggccagctccccaaagcccggcaccatgggtaacgccattgaggaagaggctccggaactcgacctgccaggccctgtctttgttgacgacttttattatgattataactttattaacttccatgaagacctcagttatggcccctcagaggagcctgacctggacctggccgggacaggggatcgcacccctccccctcacagccatcccgctgcacctagcaccgggtctccagtcccagcaactgagccaccagccgccaaggaggaaggagttctcggtccctggtctccctctccatggcccagccaggcgggaaggagtccgcctcctccttcagagcaaaccccaggtaacccattgattaatttcctacccgaagaggacaccccaattggcgcccctgacctgggcttgccttctctgtcttggccacgggtctctacagacggcctgcagaccccagcaaccccggagtcccagaatgattttcccgttggcaaggactcccagtcacagctcccaccgccctggagggaccgtactaacgaagtctttaaggatgatgaagaacccaagggaaggggtgctcctcacctccctcctcggccatccagtactctgcccccactgtctcctgttggatctacacactcctccccatccccagacgttgctgagctgtggacagggggaactgtggcttgggagcccgcacttgagggaggcctcggacccgtggatagcgaactgtggccaaccgtcggggtggcttctctcttgcctccccccatagccccccttcctgagatgaaagttagggatagctccctggaacctgggacacctagtttccccactcctggccctggcagctgggatttgcagaccgttgctgtatggggcacttttctccctacaactctgaccggtctggggcatatgcctgagcctgcactgaatcctggtcctaaggggcagcccgaatccctctcgccggaagttccactcagcagtaggctcctgagtactccagcatgggattctcccgcgaactcacaccgggtgccagagacccagcctctggcacccagtcttgctgaggccggcccccccgccgaccctctagtggttcgcaacgcaggttggcaggccgggaactggagtgagtgttctacgacgtgcggcctgggtgccgtgtggaggcctgtccgctgttcgtctggaagggatgaggactgtgcccccgccggtcgccctcagcccgctcggaggtgccaccttaggccatgtgctacatggcactccggaaactggagcaagtgcagtagaagttgcggcgggggtagctccgttcgcgatgtgcagtgtgtcgatactagagatcttaggccgttacgtccgttccattgtcaacctgggccagccaaacctccggctcataggccctgtggcgcacaaccttgtctgagctggtatacatcctcgtggagggaatgctctgaggcctgcgggggaggcgaacagcagcgcctggtgacatgtcccgaaccaggactctgcgaagaggctttgagacccaacacaactagaccctgtaacacgcatccctgtacacaatgggtggtgggaccgtggggacagtgcagcgggccttgtggaggcggcgtacagcgccggctcgtcaagtgcgtcaatacccagacggggctgcccgaagaggacagtgaccaatgcggacacgaagcctggccggagtcatccagaccgtgcggcactgaggattgtgaacctgtagaacccccacgatgcgaacgagaccgtttaagtttcgggttctgtgagacactgcggcttctaggacggtgccaacttcccactataagaacacagtgctgccggagttgcagcccgccttctcacggcgccccctctcggggccaccagagagtcgccagaagatag

SEQ ID NO: 178875 - DNA, 1383 bp, Artificial Sequence
  derived and/or modified sequence
atgcccggcggccccagcccccggagccccgcccccctgctgcggcctctcctactgctcctttgcgctctcgctcccggtgcgcccggccccgcccccggtcgagccacggaggggagagctgccttagatatcgtgcacccagttcgggtcgacgcaggaggaagctttctctcgtacgagctttggccccgtgcccttcggaaaagagatgtcagcgttcgtagggatgcacccgccttttatgaactccagtaccgcggtagagaactgagatttaacctgaccgcaaaccagcatctgctggcccctgggtttgtgtccgaaacacgtagaaggggaggcctgggtcgagctcacatcagggctcacaccccagcctgtcacctcctgggagaggtgcaggaccctgaattggaaggcggcctggccgctatttctgcttgcgatgggctcaagggcgtctttcagctgtccaacgaggattattttatcgaaccattagactctgcaccagctcgtccggggcacgcccagccccacgttgtctataagcgacaggcccctgagaggctagcccagcgaggggacagctcggcgccctctacttgtggtgtgcaggtgtaccccgaactcgaatctaggcgcgaacgttgggaacagcgacaacaatggcgccgtccacggttgcggcgcctgcaccagaggtctgtttctaaagagaagtgggtcgaaacactggtcgtggccgatgcgaaaatggtagaatatcatgggcagccccaggtggaaagctacgtcttgaccattatgaacatggtagccggcctgtttcacgacccttcaatcggcaaccccattcatatcacaatagtaaggttagttttattagaagacgaagaagaggacctgaaaatcactcatcatgccgataataccctgaaatctttttgtaagtggcagaaaagcattaacatgaagggcgacgcacatccgctccaccatgacacagccatcttgctgactcggaaggatctctgcgcagctatgaatcggccctgtgagacacttggtcttagtcacgtcgcgggaatgtgccagccacacagatcctgttccattaacgaagacaccggcctccccctggccttcaccgtggcccatgagctcgggcacagcagctgtactacccccctgccatcccctggacccgccgcagcagcgtcaattagcccaggctctctaagcgttcagcggcagaacgtgtactgtctggaacgccaggcgggtcccgtagatgaggagcactgcgatcctttgggccgtccggacgaccagcagagaaagtgtagcgaacagccatgcccagcttcggctcagtag

SEQ ID NO: 178876 - DNA, 5061 bp, Artificial Sequence
  derived and/or modified sequence
atgcctggtggcccaagtccaaggtcgcccgcaccgttgctgagaccgttattgctgctcctttgtgctttggcccctggggctccgggtccggcaccagggcgtgctacagagggcagggcagcgctggatatagtacatccagtgcgggttgacgcaggagggtccttcctatcttatgagctgtggccacgtgctttaaggaagcgcgatgtgtccgtgcggagggacgcccctgccttttacgagctccagtaccgcggaagagagctccggtttaacctgaccgctaatcagcacttgttggcacccggatttgtctccgagacccgaaggcgaggcggactcgggagagcacacataagggcccacactcccgcttgccatctcctaggagaagtgcaggacccagagctggagggtggcctggctgcaatcagcgcctgcgatggcctgaagggggtgtttcagctctcaaatgaggactattttatcgaacctcttgatagtgccccagcccgtcccggacatgcacagccccacgtcgtttataagcgtcaagccccagaacgactagcccagagaggcgattcatccgctccttccacctgcggcgttcaagtgtaccctgaactggagagcagacgggagcggtgggaacagcgccagcaatggagacggcctaggctgcgtcgtctccaccagcgctcagtgagcaaggaaaagtgggttgaaacgctggtagtggcggacgcgaagatggttgagtaccatggccagccccaggttgagtcctatgtattgaccattatgaatatggtggccggtttgttccatgacccatccatcggtaatcctatccatatcaccatcgtccggctggttctgctagaggacgaagaagaggacctgaaaatcactcaccacgccgataacacactgaaatctttctgcaaatggcagaagtcaataaatatgaagggtgacgcacaccccctccatcacgacacagccatcctgctcaccagaaaggacttatgtgctgctatgaacaggccttgcgagacgctgggcctgagccatgtcgccggaatgtgccaaccccaccggagctgttcaatcaatgaggacactggactgcctttagccttcaccgtggcacatgagctggggcatagtttcggcatccaacacgacgggagcggaaacgactgcgagccggtcgggaaaaggccctttattatgagcccacagctgttgtacgacgccgcacccctcacttggtcccgatgtagccgacaatacataactcggttcctagatcggggttgggggttatgtcttgacgaccctcccgcaaaggatattatcgattttcctagcgttcctccgggagtgctatacgacgtcagtcaccaatgtcgcctgcagtatggtgcttacagtgctttctgcgaggatatggacaacgtgtgccatacactatggtgtagtgtaggcacaacgtgccatagtaagctcgacgccgcagtggatgggaccagatgcggagaaaacaagtggtgcctctccggagaatgcgttcccgtgggcttccgcccagaagctgtggatggaggctggagtggatggtctgcctggtccatttgttcgcgctcttgcggaatgggcgtgcagtctgcggagagacagtgcacccagcctactcccaaatataaagggcgatattgcgttggcgaacgaaaacggttccgtttatgtaaccttcaggcctgtcccgcaggccgaccctcgtttcgacacgtccagtgcagccatttcgacgctatgctctataagggacagctacatacatgggtgcccgtggtcaacgatgttaacccttgtgagcttcactgcaggcccgcaaatgaatactttgctgagaagctccgggacgcagtggtagacggcacaccgtgttatcaggtcagagcgtctcgagatttgtgcattaacggaatttgtaagaacgtgggctgcgacttcgagatcgattcaggcgctatggaagaccgctgcggcgtgtgtcacggtaacggcagcacttgccataccgtctctggaacctttgaggaagcagaggggttgggttacgtcgacgtgggcctgattccagccggtgcgagagaaatccggatacaggaggtcgcggaggctgctaacttcttggcccttcgcagcgaggacccagagaagtactttctgaacgggggatggaccatccagtggaacggagattaccaggtggcagggactacatttacgtatgctaggaggggcaactgggagaatctgacttctccgggaccaactaaggaacccgtgtggatacagctgctttttcaggagtcaaacccaggggtccactatgagtacaccatacatagagaggcaggtggccacgatgaggtacccccacccgtgttctcctggcattacggaccgtggaccaagtgtacagtgacctgcggcagaggggtgcagagacagaacgtctactgccttgaacggcaggcagggccagtagacgaggaacactgcgaccctctggggagacccgatgatcagcagagaaaatgctccgaacagccatgccctgcaaggtggtgggcgggagagtggcagctgtgtagctcctcttgcggtcccggtggcctttcaaggcgcgcagtcctgtgcattaggagcgttggattagatgaacagagtgcactggagccacccgcttgcgagcatctgccaagacccccaaccgagacaccctgtaacaggcacgttccatgtcctgccacatgggctgtgggcaactggtctcaatgctctgtcacttgcggggagggaacccagagacggaacgtactgtgcacaaacgatacaggcgtcccttgtgacgaggcacagcagcccgctagcgaggtgacctgttcactccctctgtgtcgctggcccttgggcaccctgggtcccgaaggttctggcagcgggtcaagttcgcatgagttgttcaatgaagccgactttataccgcaccacttggccccaaggccttctcccgctagtagccctaaaccaggcaccatgggaaatgctatcgaggaggaagcaccagagcttgacctaccagggccagtattcgtggatgacttttactatgattataattttattaatttccatgaagacctgtcctacgggccaagcgaggagccagacctggacctggccggaaccggcgatcggacccctccccctcactcccaccccgctgcgccatcaaccggaagccctgtaccagccactgaaccccctgccgcaaaagaagaaggggtattaggaccttggtctccctctccctggcccagccaggccggacgatcccccccaccaccctctgaacagacaccaggaaaccctctgatcaatttcctgcccgaagaagacactcctatcggcgctcctgatctaggcctcccatcgctgagctggcctagggtctccactgacgggctccaaaccccagccactcctgaatcgcagaatgatttccccgtgggcaaagacagccagagtcaactgccgcctccctggagagatcgaactaatgaagtcttcaaagacgacgaggaacccaaggggaggggagcgccacatctgccgcctcgcccttccagcactctgccgccattgtcacctgttgggtccacccatagtagtccatctcccgatgtcgccgagctgtggaccggcggaacagttgcttgggagcctgccctcgaagggggtttgggccctgtcgacagcgagttgtggcctacagtgggggtcgcttctcttctgccccctcccatcgcccctcttccggaaatgaaagtccgtgattccagtctggaacctggcaccccctcttttcctactcccggaccgggaagttgggacttacagactgtggctgtgtggggtacatttcttcctactacgctgaccgggttgggtcatatgcctgaaccagccctgaaccccggaccaaaagggcagcccgagagcctgtcccctgaagtgccactgtccagcagactgctgtctacccctgcttgggattcccctgctaatagtcaccgcgttcccgagacccaaccactggccccttccctggcagaagccggtccacctgcagatcctctggttgtccgcaatgctggctggcaggccggtaactggagtgagtgttccaccacatgtggactcggagccgtgtggcggccagttcggtgctcaagtggtcgcgatgaggactgtgcccctgctggacgcccacagccagctagacgatgtcatcttaggccgtgcgccacctggcactctggcaattggagtaagtgttctcgctcatgcgggggaggctcttccgtgcgcgatgtgcagtgcgtggacaccagggacttgaggcctctgcggcctttccattgtcaaccaggacccgctaaacctccagcgcatcgcccttgtggcgctcagccttgcctgagctggtacacaagctcttggagagagtgcagcgaggcatgcggaggcggtgaacagcaacggctggtgacctgtcctgagccgggactttgtgaggaggctctccgacctaacaccacacgtccctgtaacacgcatccgtgtactcagtgggtcgttggcccttggggtcaatgctcaggcccttgtggcggtggcgtgcaacgtcgcctggttaagtgcgtcaatacacaaacaggtctacccgaagaggactccgaccaatgcggtcatgaagcatggcctgagtctagtagaccatgtgggacagaggattgcgagcccgtggagcctcccagatgtgagcgggatcgcctaagcttcggattttgtgaaacgctgcggcttttagggcgttgtcagctcccgacaatccgcacccagtgctgccgttcgtgctcacctccctcccatggcgcaccttctcgaggacaccagagagtggcaaggaggtag

SEQ ID NO: 178877 - DNA, 1383 bp, Artificial Sequence
  derived and/or modified sequence
atgccaggcggaccttccccacgctcccctgctcctctgctacggcctctattgctgctgttgtgcgcccttgcccctggtgccccaggacccgcacccggacgcgctacggaaggcagggcagctctggacattgtgcatcctgtgcgggtggatgccggagggagcttcctctcctatgaactgtggccgagagcactgcgaaaaagggatgtgtccgtgagaagggatgctcctgctttttacgagctgcagtacagaggtagggagttacggttcaatctgacagcaaaccagcacttactggcacctgggtttgtgtctgagactagacgaaggggaggactcggcagggcccacattagggcccacacccctgcatgccacctgctgggagaggtgcaggatccagaactggaagggggtctcgctgccatttccgcttgcgacggccttaagggagtgttccaattatcaaacgaggactattttattgaacccctcgactcagcccctgctcgtcctggccacgcccaaccgcatgtggtgtataagcgacaggcccctgagagactggctcagagaggagatagctcagctccttctacatgtggcgttcaggtgtaccccgagctggaaagccgcagagagcgctgggaacagcgacaacagtggagaagaccacgattgcgaaggctgcatcagcggagcgtgtccaaagaaaaatgggtggaaaccctcgtggtggccgatgcaaaaatggttgagtaccatggacagccccaagtagagagctacgtgctcacaatcatgaacatggtggcaggtctttttcacgaccctagcatcgggaaccccattcacattactatcgtgaggttagtgctattggaggacgaagaggaggacttgaaaatcacgcaccacgctgataataccttaaaatccttttgcaaatggcagaagtccatcaacatgaagggagacgcccacccactgcaccacgacacagccattctccttacaaggaaggacctgtgcgcagcgatgaatcgcccatgtgagacattgggactgagtcacgtagctgggatgtgccagccccatcggtcttgcagtattaacgaagacacaggtctccccttggcgtttactgtggctcatgagctgggccatagctcttgtactacacccctacctagtcccggtcccgctgccgcagcatcaataagtcccggaagtctttccgtgcaacggcagaatgtttactgcctggagcgacaggccggtcccgtggacgaagagcattgtgatccccttggcaggccagacgatcaacaacgaaaatgttctgagcagccctgcccagcaagcgcccagtag

SEQ ID NO: 178878 - DNA, 5061 bp, Artificial Sequence
  derived and/or modified sequence
atgcccggcggccccagccccagaagccccgcccccctgctgagacccctgctgctgctgctgtgcgccctggcccccggcgcccccggccccgcccccggcagagccaccgagggcagagccgccctggacatcgtgcaccccgtgagagtggacgccggcggcagcttcctgagctacgagctgtggcccagagccctgagaaagagagacgtgagcgtgagaagagacgcccccgccttctacgagctgcagtacagaggcagagagctgagattcaacctgaccgccaaccagcacctgctggcccccggcttcgtgagcgagaccagaagaagaggcggcctgggcagagcccacatcagagcccacacccccgcctgccacctgctgggcgaggtgcaggaccccgagctggagggcggcctggccgccatcagcgcctgcgacggcctgaagggcgtgttccagctgagcaacgaggactacttcatcgagcccctggacagcgcccccgccagacccggccacgcccagccccacgtggtgtacaagagacaggcccccgagagactggcccagagaggcgacagcagcgcccccagcacctgcggcgtgcaggtgtaccccgagctggagagcagaagagagagatgggagcagagacagcagtggagaagacccagactgagaagactgcaccagagaagcgtgagcaaggagaagtgggtggagaccctggtggtggccgacgccaagatggtggagtaccacggccagccccaggtggagagctacgtgctgaccatcatgaacatggtggccggcctgttccacgaccccagcatcggcaaccccatccacatcaccatcgtgagactggtgctgctggaggacgaggaggaggacctgaagatcacccaccacgccgacaacaccctgaagagcttctgcaagtggcagaagagcatcaacatgaagggcgacgcccaccccctgcaccacgacaccgccatcctgctgaccagaaaggacctgtgcgccgccatgaacagaccctgcgagaccctgggcctgagccacgtggccggcatgtgccagccccacagaagctgcagcatcaacgaggacaccggcctgcccctggccttcaccgtggcccacgagctgggccacagcttcggcatccagcacgacggcagcggcaacgactgcgagcccgtgggcaagagacccttcatcatgagcccccagctgctgtacgacgccgcccccctgacctggagcagatgcagcagacagtacatcaccagattcctggacagaggctggggcctgtgcctggacgacccccccgccaaggacatcatcgacttccccagcgtgccccccggcgtgctgtacgacgtgagccaccagtgcagactgcagtacggcgcctacagcgccttctgcgaggacatggacaacgtgtgccacaccctgtggtgcagcgtgggcaccacctgccacagcaagctggacgccgccgtggacggcaccagatgcggcgagaacaagtggtgcctgagcggcgagtgcgtgcccgtgggcttcagacccgaggccgtggacggcggctggagcggctggagcgcctggagcatctgcagcagaagctgcggcatgggcgtgcagagcgccgagagacagtgcacccagcccacccccaagtacaagggcagatactgcgtgggcgagagaaagagattcagactgtgcaacctgcaggcctgccccgccggcagacccagcttcagacacgtgcagtgcagccacttcgacgccatgctgtacaagggccagctgcacacctgggtgcccgtggtgaacgacgtgaacccctgcgagctgcactgcagacccgccaacgagtacttcgccgagaagctgagagacgccgtggtggacggcaccccctgctaccaggtgagagccagcagagacctgtgcatcaacggcatctgcaagaacgtgggctgcgacttcgagatcgacagcggcgccatggaggacagatgcggcgtgtgccacggcaacggcagcacctgccacaccgtgagcggcaccttcgaggaggccgagggcctgggctacgtggacgtgggcctgatccccgccggcgccagagagatcagaatccaggaggtggccgaggccgccaacttcctggccctgagaagcgaggaccccgagaagtacttcctgaacggcggctggaccatccagtggaacggcgactaccaggtggccggcaccaccttcacctacgccagaagaggcaactgggagaacctgaccagccccggccccaccaaggagcccgtgtggatccagctgctgttccaggagagcaaccccggcgtgcactacgagtacaccatccacagagaggccggcggccacgacgaggtgcccccccccgtgttcagctggcactacggcccctggaccaagtgcaccgtgacctgcggcagaggcgtgcagagacagaacgtgtactgcctggagagacaggccggccccgtggacgaggagcactgcgaccccctgggcagacccgacgaccagcagagaaagtgcagcgagcagccctgccccgccagatggtgggccggcgagtggcagctgtgcagcagcagctgcggccccggcggcctgagcagaagagccgtgctgtgcatcagaagcgtgggcctggacgagcagagcgccctggagccccccgcctgcgagcacctgcccagaccccccaccgagaccccctgcaacagacacgtgccctgccccgccacctgggccgtgggcaactggagccagtgcagcgtgacctgcggcgagggcacccagagaagaaacgtgctgtgcaccaacgacaccggcgtgccctgcgacgaggcccagcagcccgccagcgaggtgacctgcagcctgcccctgtgcagatggcccctgggcaccctgggccccgagggcagcggcagcggcagcagcagccacgagctgttcaacgaggccgacttcatcccccaccacctggcccccagacccagccccgccagcagccccaagcccggcaccatgggcaacgccatcgaggaggaggcccccgagctggacctgcccggccccgtgttcgtggacgacttctactacgactacaacttcatcaacttccacgaggacctgagctacggccccagcgaggagcccgacctggacctggccggcaccggcgacagaaccccccccccccacagccaccccgccgcccccagcaccggcagccccgtgcccgccaccgagccccccgccgccaaggaggagggcgtgctgggcccctggagccccagcccctggcccagccaggccggcagaagcccccccccccccagcgagcagacccccggcaaccccctgatcaacttcctgcccgaggaggacacccccatcggcgcccccgacctgggcctgcccagcctgagctggcccagagtgagcaccgacggcctgcagacccccgccacccccgagagccagaacgacttccccgtgggcaaggacagccagagccagctgccccccccctggagagacagaaccaacgaggtgttcaaggacgacgaggagcccaagggcagaggcgccccccacctgccccccagacccagcagcaccctgccccccctgagccccgtgggcagcacccacagcagccccagccccgacgtggccgagctgtggaccggcggcaccgtggcctgggagcccgccctggagggcggcctgggccccgtggacagcgagctgtggcccaccgtgggcgtggccagcctgctgcccccccccatcgcccccctgcccgagatgaaggtgagagacagcagcctggagcccggcacccccagcttccccacccccggccccggcagctgggacctgcagaccgtggccgtgtggggcaccttcctgcccaccaccctgaccggcctgggccacatgcccgagcccgccctgaaccccggccccaagggccagcccgagagcctgagccccgaggtgcccctgagcagcagactgctgagcacccccgcctgggacagccccgccaacagccacagagtgcccgagacccagcccctggcccccagcctggccgaggccggcccccccgccgaccccctggtggtgagaaacgccggctggcaggccggcaactggagcgagtgcagcaccacctgcggcctgggcgccgtgtggagacccgtgagatgcagcagcggcagagacgaggactgcgcccccgccggcagaccccagcccgccagaagatgccacctgagaccctgcgccacctggcacagcggcaactggagcaagtgcagcagaagctgcggcggcggcagcagcgtgagagacgtgcagtgcgtggacaccagagacctgagacccctgagacccttccactgccagcccggccccgccaagccccccgcccacagaccctgcggcgcccagccctgcctgagctggtacaccagcagctggagagagtgcagcgaggcctgcggcggcggcgagcagcagagactggtgacctgccccgagcccggcctgtgcgaggaggccctgagacccaacaccaccagaccctgcaacacccacccctgcacccagtgggtggtgggcccctggggccagtgcagcggcccctgcggcggcggcgtgcagagaagactggtgaagtgcgtgaacacccagaccggcctgcccgaggaggacagcgaccagtgcggccacgaggcctggcccgagagcagcagaccctgcggcaccgaggactgcgagcccgtggagccccccagatgcgagagagacagactgagcttcggcttctgcgagaccctgagactgctgggcagatgccagctgcccaccatcagaacccagtgctgcagaagctgcagcccccccagccacggcgcccccagcagaggccaccagagagtggccagaagatag

SEQ ID NO: 178879 - DNA, 1383 bp, Artificial Sequence
  derived and/or modified sequence
atgcccggcggccccagccccagaagccccgcccccctgctgagacccctgctgctgctgctgtgcgccctggcccccggcgcccccggccccgcccccggcagagccaccgagggcagagccgccctggacatcgtgcaccccgtgagagtggacgccggcggcagcttcctgagctacgagctgtggcccagagccctgagaaagagagacgtgagcgtgagaagagacgcccccgccttctacgagctgcagtacagaggcagagagctgagattcaacctgaccgccaaccagcacctgctggcccccggcttcgtgagcgagaccagaagaagaggcggcctgggcagagcccacatcagagcccacacccccgcctgccacctgctgggcgaggtgcaggaccccgagctggagggcggcctggccgccatcagcgcctgcgacggcctgaagggcgtgttccagctgagcaacgaggactacttcatcgagcccctggacagcgcccccgccagacccggccacgcccagccccacgtggtgtacaagagacaggcccccgagagactggcccagagaggcgacagcagcgcccccagcacctgcggcgtgcaggtgtaccccgagctggagagcagaagagagagatgggagcagagacagcagtggagaagacccagactgagaagactgcaccagagaagcgtgagcaaggagaagtgggtggagaccctggtggtggccgacgccaagatggtggagtaccacggccagccccaggtggagagctacgtgctgaccatcatgaacatggtggccggcctgttccacgaccccagcatcggcaaccccatccacatcaccatcgtgagactggtgctgctggaggacgaggaggaggacctgaagatcacccaccacgccgacaacaccctgaagagcttctgcaagtggcagaagagcatcaacatgaagggcgacgcccaccccctgcaccacgacaccgccatcctgctgaccagaaaggacctgtgcgccgccatgaacagaccctgcgagaccctgggcctgagccacgtggccggcatgtgccagccccacagaagctgcagcatcaacgaggacaccggcctgcccctggccttcaccgtggcccacgagctgggccacagcagctgcaccacccccctgcccagccccggccccgccgccgccgccagcatcagccccggcagcctgagcgtgcagagacagaacgtgtactgcctggagagacaggccggccccgtggacgaggagcactgcgaccccctgggcagacccgacgaccagcagagaaagtgcagcgagcagccctgccccgccagcgcccagtag

SEQ ID NO: 178880 - protein, 548 aa, Artificial Sequence
  derived and/or modified sequence
MRLRNGTFLTLLLFCLCAFLSLSWYAALSGQKGDVVDVYQREFLALRDRLHAAEQESLKRSKELNLVLDEIKRAVSERQALRDGDGNRTWGRLTEDPRLKPWNGSHRHVLHLPTVFHHLPHLLAKESSLQPAVRVGQGRTGVSVVMGIPSVRREVHSYLTDTLHSLISELSPQEKEDSVIVVLIAETDSQYTSAVTENIKALFPTEIHSGLLEVISPSPHFYPDFSRLRESFGDPKERVRWRTKQNLDYCFLMMYAQSKGIYYVQLEDDIVAKPNYLSTMKNFALQQPSEDWMILEFSQLGFIGKMFKSLDLSLIVEFILMFYRDKPIDWLLDHILWVKVCNPEKDAKHCDRQKANLRIRFKPSLFQHVGTHSSLAGKIQKLKDKDFGKQALRKEHVNPPAEVSTSLKTYQHFTLEKAYLREDFFWAFTPAAGDFIRFRFFQPLRLERFFFRSGNIEHPEDKLFNTSVEVLPFDNPQSDKEALQEGRTATLRYPRSPDGYLQIGSFYKGVAEGEVDPAFGPLEALRLSIQTDSPVWVILSEIFLKKAD

SEQ ID NO: 178881 - DNA, 1647 bp, Artificial Sequence
  derived and/or modified sequence
atgcgtctgaggaacggaacgttccttactctgctgctcttctgcctgtgtgctttcctttcactttcatggtacgccgctttgtccggacaaaaaggtgacgttgtggatgtatatcagagggagttcctggcactgcgggacagactgcacgccgctgagcaggagtccttaaagcgatcaaaggagctgaatttggtcctggatgaaatcaagagagctgtgtctgagcgtcaggcactccgagatggggatggcaatcgcacctggggccgactgaccgaagatccccggctgaaaccctggaacgggtctcataggcacgtgcttcacctgcctactgtcttccatcatctgccccatcttttggccaaggagagttcactacagccagcagtgcgcgtaggtcaaggccggacaggggtgtccgtggtgatgggcatccctagtgtgcggagggaggttcactcttatctgaccgatacgctccacagcctcatctctgagctgtcaccacaagaaaaggaggactcagtgatcgttgtcttaatcgccgaaacagacagccagtacacgtctgcagtcaccgaaaatattaaagccttgtttccgacggaaattcattcaggtctactcgaggtcatcagtcctagtccacatttttatcctgacttcagcagactgagagaatcctttggggatcctaaggaaagggtccggtggcggacaaagcagaacttagactactgcttccttatgatgtatgcgcaatcgaaagggatttactatgtgcagctggaagacgacatcgtggcaaaaccaaactacctaagcaccatgaaaaacttcgcactgcagcaaccttcagaagattggatgatcctggagtttagtcagctcggattcataggcaagatgttcaagtctctggacctgagcctgattgtcgaattcattttaatgttctaccgcgataaaccgattgattggttgctggatcacatcctatgggtcaaagtgtgtaatcccgagaaggatgccaagcactgcgaccggcagaaggcaaacctgaggatcagattcaagcccagtctgttccagcacgtggggacccattcttctctggccgggaagatacaaaagttaaaagacaaagacttcggaaagcaggcgctgaggaaggaacatgtgaaccctcccgccgaggtgagtacgtcactcaaaacctatcagcactttaccctagagaaagcctatctgcgtgaagattttttctgggcctttacaccagccgcaggagacttcatcaggttccggttctttcagcctctgcgtctggagcgcttctttttccggagcggcaatattgagcatccggaggataaattgttcaacacgagtgttgaggtgctcccttttgataatccacagtcggacaaggaggccttgcaggagggacgaaccgcaaccctgcgctaccctcgctcccccgacggttatctacagatcggcagtttctataagggcgtggcagagggagaggtagacccggcatttggacctttagaagcccttcggctctccatacagaccgatagtccagtttgggttattctttctgagattttcttaaagaaagctgactag

SEQ ID NO: 178882 - DNA, 1647 bp, Artificial Sequence
  derived and/or modified sequence
atgaggctgagaaatggcaccttcctgaccctgctgctcttctgcctgtgtgccttcctgagcctgtcctggtacgccgccctgagcggccagaagggagatgtggtggatgtgtaccagcgggagttcctggccctgcgggaccggctgcacgccgctgagcaggagagcctgaagaggagcaaggagctgaacctggtgctggatgagatcaagagagctgtgtctgagcggcaggccctgagagatggagatggcaacagaacctggggccgcctgacagaggacccccggctgaagccctggaatggcagccaccgccacgtgctgcacctgcccaccgtcttccaccacctgccccacctgctggccaaggagagcagcctgcagcctgctgtgcgggtgggccagggccgcactggagtgtctgtggtgatgggcatccccagcgtgcggcgggaggtgcacagctacctgacagacaccctgcacagcctcatcagcgagctgagcccccaggagaaggaggacagcgtcatcgtggtgctgattgctgagacagacagccagtacaccagcgctgtgacagagaacatcaaggccctcttccccacagagatccacagcggcctgctggaggtgatcagccccagcccccacttctacccagacttcagccggctgcgggagagctttggagaccccaaggagcgggtgcgctggaggaccaagcagaacctggactactgcttcctgatgatgtatgcccagagcaagggcatctactacgtgcagctggaggatgacatcgtggccaagcccaactacctgagcaccatgaagaactttgccctgcagcagcccagcgaggactggatgatcctggagttcagccagctgggcttcatcggcaagatgttcaagagcctggacctgagcctgattgtggagttcatcctgatgttctacagagacaagcccatcgactggctgctggaccacatcctgtgggtgaaggtgtgcaaccctgagaaggatgccaagcactgtgaccggcagaaggccaacctgcgcatccgcttcaagcccagcctcttccagcacgtgggcacccacagcagcctggccggcaagatccagaagctgaaggacaaggactttgggaagcaggccctgaggaaggagcacgtgaaccccccagctgaggtgtccaccagcctgaagacctaccagcacttcaccctggagaaggcctacctgcgggaggacttcttctgggccttcaccccagctgctggggacttcatccgcttccgcttcttccagcccctgcggctggagcgcttcttcttccgcagcggcaacatcgagcaccctgaggacaagctgttcaacacctctgtggaggtgctgccctttgacaacccccagagcgacaaggaggccctgcaggagggccgcacagccaccctgcgctaccccaggagcccagatggctacctgcagatcggcagcttctacaagggcgtggccgagggggaggtggaccctgccttcggccccctggaggccctgcggctgagcatccagacagacagccctgtgtgggtgatcctgtctgagatcttcctgaagaaggctgactag

SEQ ID NO: 178883 - DNA, 2446 bp, Artificial Sequence
  derived and/or modified sequence
cgcggctctcgccgcccagcccagcccagcccggcccggcccggccctgccgcggaggcgaggccgccagtgtcccgcgcccctgatatctgcagtgagcctgatacctgcctctgcccttctgagcctgttcctcttccctgagtacagggcacaaagcttgcgccctgaggggcggccggcgcgctccctggcccggtccccgcccggccccgggccccccgcccctccccgacccggggccggggcccctgccgccgccgccgccgccttccgacccctgcgccccggccccggtcccccgggccatgcagcctcggccccgcgggcgcccgccgcgcacccgaggagatgaggctccgcaatggcaccttcctgacgctgctgctcttctgcctgtgcgccttcctctcgctgtcctggtacgcggcactcagcggccagaaaggcgacgttgtggacgtttaccagcgggagttcctggcgctgcgcgatcggttgcacgcagctgagcaggagagcctcaagcgctccaaggagctcaacctggtgctggacgagatcaagagggccgtgtcagaaaggcaggcgctgcgagacggagacggcaatcgcacctggggccgcctaacagaggacccccgattgaagccgtggaacggctcacaccggcacgtgctgcacctgcccaccgtcttccatcacctgccacacctgctggccaaggagagcagtctgcagcccgcggtgcgcgtgggccagggccgcaccggagtgtcggtggtgatgggcatcccgagcgtgcggcgcgaggtgcactcgtacctgactgacactctgcactcgctcatctccgagctgagcccgcaggagaaggaggactcggtcatcgtggtgctgatcgccgagactgactcacagtacacttcggcagtgacagagaacatcaaggccttgttccccacggagatccattctgggctcctggaggtcatctcaccctccccccacttctaccctgacttctcccgcctccgagagtcctttggggaccccaaggagagagtcaggtggaggaccaaacagaacctcgattactgcttcctcatgatgtacgcgcagtccaaaggcatctactacgtgcagctggaggatgacatcgtggccaagcccaactacctgagcaccatgaagaactttgcactgcagcagccttcagaggactggatgatcctggagttctcccagctgggcttcattggtaagatgttcaagtcgctggacctgagcctgattgtagagttcattctcatgttctaccgggacaagcccatcgactggctcctggaccatattctgtgggtgaaagtctgcaaccccgagaaggatgcgaagcactgtgaccggcagaaagccaacctgcggatccgcttcaaaccgtccctcttccagcacgtgggcactcactcctcgctggctggcaagatccagaaactgaaggacaaagactttggaaagcaggcgctgcggaaggagcatgtgaacccgccagcagaggtgagcacgagcctgaagacataccagcacttcaccctggagaaagcctacctgcgcgaggacttcttctgggccttcacccctgccgcgggggacttcatccgcttccgcttcttccaacctctaagactggagcggttcttcttccgcagtgggaacatcgagcacccggaggacaagctcttcaacacgtctgtggaggtgctgcccttcgacaaccctcagtcagacaaggaggccctgcaggagggccgcaccgccaccctccggtaccctcggagccccgacggctacctccagatcggctccttctacaagggagtggcagagggagaggtggacccagccttcggccctctggaagcactgcgcctctcgatccagacggactcccctgtgtgggtgattctgagcgagatcttcctgaaaaaggccgactaagctgcgggcttctgagggtaccctgtggccagccctgaagcccacatttctgggggtgtcgtcactgccgtccccggagggccagatacggccccgcccaaagggttctgcctggcgtcgggcttgggccggcctggggtccgccgctggcccggaggccctaggagctggtgctgcccccgcccgccgggccgcggaggaggcaggcggcccccacactgtgcctgaggcccggaaccgttcgcacccggcctgccccagtcaggccgttttagaagagcttttacttgggcgcccgccgtctctggcgcgaacactggaatgcatatactactttatgtgctgtgttttttattcttggatacatttgattttttcacgtaagtccacatatacttctataagagcgtgacttgtaataaagggttaatgaagtgtgtgcctcaaa

SEQ ID NO: 178884 - DNA, 1647 bp, Artificial Sequence
  derived and/or modified sequence
atgcggctgcggaacggcaccttcctgaccctgctgctgttctgcctgtgtgcctttctttccctgtcctggtatgctgcactgagcggacagaagggtgacgtggtggatgtttaccagagggaattcctggctctgagagacaggctgcacgccgctgagcaagaatcactcaagcggagtaaggagctcaatctggtgctagatgaaatcaaacgcgccgtttcagagcggcaggccctgagagacggcgacggaaacaggacctggggtcggctcacagaagatccacgacttaagccatggaatggtagtcaccgtcatgtacttcacctgccaacagtatttcaccacctgccccacctcttggccaaagaaagttcattgcagcctgccgtccgtgttggtcaaggtagaactggcgtcagcgtggtaatgggtattcccagtgtgaggcgagaggtgcactcctacctgacagatacattacattctttaatctccgaattatctccgcaagagaaggaggattctgttattgtggtgctaattgcagaaaccgattctcagtatacctcagcagttaccgagaatatcaaggcacttttccccacagaaatccattccggcctcctcgaagtgatcagcccttccccccacttttacccagactttagcaggctacgagagtcatttggggatcctaaggagcgcgtgagatggcggacgaaacaaaatcttgattattgctttctcatgatgtatgcacagagcaaaggcatctactatgttcagctggaggacgacatagtggctaagccgaactacctgtcaacgatgaaaaatttcgccctgcagcaaccatccgaagattggatgattttggagttttcacaactggggtttattggaaagatgtttaagtctctagacctcagcttgatcgttgaattcattctaatgttttaccgtgacaaacctattgattggctgctcgatcatattttatgggtgaaggtttgcaatcccgagaaagatgctaaacattgcgatcgccagaaagccaatctgcggatccgttttaagccctctttgttccaacacgtaggtacgcactcaagtcttgcaggcaagattcaaaaattgaaggacaaagatttcggcaagcaagccctgaggaaagaacatgtaaacccacccgccgaggtatcaacatccctgaagacctaccagcacttcacacttgagaaggcttatctgcgggaggattttttttgggctttcacccccgccgcaggggatttcattcgttttcgcttcttccagccactaagactggaaaggtttttctttcggagtgggaacatcgagcaccccgaggataagcttttcaacaccagtgtagaggtattgccctttgataatccacagagcgacaaggaggctctacaggaaggcagaactgccacccttagatatccacggtctcccgacgggtacttacagattggatctttttacaaaggcgtcgccgaaggggaggtggatccagcttttggacccctcgaggcattaagactcagtatccaaaccgacagtccagtgtgggtgatactgagcgagatcttcttgaagaaagccgactag

SEQ ID NO: 178885 - DNA, 1647 bp, Artificial Sequence
  derived and/or modified sequence
atgagactcagaaacgggaccttcttgacactactccttttttgcctgtgtgcatttctgtccctgtcgtggtacgccgctcttagcgggcagaaaggcgacgtggttgacgtttaccagcgtgagtttctagccctccgcgaccgactccatgcggctgaacaagagtcccttaaaaggagtaaagagctgaacctcgtgcttgacgagattaagcgagctgtctcagagcgccaggctctgagggatggggacggtaaccggacctggggcagactcactgaagatcctcggcttaaaccttggaatggttctcataggcacgttctacatctgccgaccgtttttcaccacctgccacaccttctggcaaaggaatcctctcttcagcctgcggtgagagttggccaaggccgtaccggagtgtccgtcgtaatgggaatcccgtccgtgagaagggaggtccattcctacctgactgatacgctccactccctgatttctgagttgagcccccaagaaaaagaggatagcgtgattgtggtgttgattgcggagaccgactcacaatatacatctgccgtaaccgagaacatcaaggctctctttcctacagaaatccactccggcctccttgaggtgatctctccatcacctcatttctacccagacttttctaggctgcgggagagcttcggagatcctaaagagagggtgcggtggcggacaaagcagaatctggattactgcttcctgatgatgtatgcacagagtaaagggatttactacgtacaattagaagacgacatagtagccaagcctaactacctcagtacgatgaagaactttgcactccaacagccatcggaggactggatgattcttgaattcagccagcttgggttcatcggcaagatgttcaagtcactggacttatcccttatagtagagtttatcctcatgttttatcgtgacaagcctatcgattggttgctagaccacattctttgggtcaaagtgtgcaatcctgagaaggatgctaagcactgcgaccggcagaaggctaacctaagaattcgatttaagccctccctcttccaacacgtgggaacacattcatccttggccggaaaaattcaaaagctgaaggacaaagatttcgggaagcaggctttacggaaggaacatgtgaatcctcccgctgaagtctcgacatctttgaaaacttaccagcactttactttggagaaagcttatctgcgtgaggacttcttttgggccttcactccggctgccggtgatttcatcagatttcgcttctttcagccccttcgcctggagagatttttcttcagatccgggaatatcgagcatccagaggataagctcttcaacaccagcgtcgaggtcctgccattcgacaaccctcagagcgataaggaggccctgcaggaggggagaactgctaccctccgctacccaaggtcccccgacgggtacctgcaaattggctctttttacaagggagtcgctgagggggaagtggacccggcttttggaccattagaggccttgaggttatccatacagacggactcacccgtgtgggtcatcttgagcgagatctttctcaagaaggcagactag

SEQ ID NO: 178886 - DNA, 1647 bp, Artificial Sequence
  derived and/or modified sequence
atgagactgagaaacggcaccttcctgaccctgctgctgttctgcctgtgcgccttcctgagcctgagctggtacgccgccctgagcggccagaagggcgacgtggtggacgtgtaccagagagagttcctggccctgagagacagactgcacgccgccgagcaggagagcctgaagagaagcaaggagctgaacctggtgctggacgagatcaagagagccgtgagcgagagacaggccctgagagacggcgacggcaacagaacctggggcagactgaccgaggaccccagactgaagccctggaacggcagccacagacacgtgctgcacctgcccaccgtgttccaccacctgccccacctgctggccaaggagagcagcctgcagcccgccgtgagagtgggccagggcagaaccggcgtgagcgtggtgatgggcatccccagcgtgagaagagaggtgcacagctacctgaccgacaccctgcacagcctgatcagcgagctgagcccccaggagaaggaggacagcgtgatcgtggtgctgatcgccgagaccgacagccagtacaccagcgccgtgaccgagaacatcaaggccctgttccccaccgagatccacagcggcctgctggaggtgatcagccccagcccccacttctaccccgacttcagcagactgagagagagcttcggcgaccccaaggagagagtgagatggagaaccaagcagaacctggactactgcttcctgatgatgtacgcccagagcaagggcatctactacgtgcagctggaggacgacatcgtggccaagcccaactacctgagcaccatgaagaacttcgccctgcagcagcccagcgaggactggatgatcctggagttcagccagctgggcttcatcggcaagatgttcaagagcctggacctgagcctgatcgtggagttcatcctgatgttctacagagacaagcccatcgactggctgctggaccacatcctgtgggtgaaggtgtgcaaccccgagaaggacgccaagcactgcgacagacagaaggccaacctgagaatcagattcaagcccagcctgttccagcacgtgggcacccacagcagcctggccggcaagatccagaagctgaaggacaaggacttcggcaagcaggccctgagaaaggagcacgtgaacccccccgccgaggtgagcaccagcctgaagacctaccagcacttcaccctggagaaggcctacctgagagaggacttcttctgggccttcacccccgccgccggcgacttcatcagattcagattcttccagcccctgagactggagagattcttcttcagaagcggcaacatcgagcaccccgaggacaagctgttcaacaccagcgtggaggtgctgcccttcgacaacccccagagcgacaaggaggccctgcaggagggcagaaccgccaccctgagataccccagaagccccgacggctacctgcagatcggcagcttctacaagggcgtggccgagggcgaggtggaccccgccttcggccccctggaggccctgagactgagcatccagaccgacagccccgtgtgggtgatcctgagcgagatcttcctgaagaaggccgactag

SEQ ID NO: 178887 - protein, 839 aa, Artificial Sequence
  derived and/or modified sequence
MSVVGIDLGFLNCYIAVARSGGIETIANEYSDRCTPACISLGSRTRAIGNAAKSQIVTNVRNTIHGFKKLHGRSFDDPIVQTERIRLPYELQKMPNGSAGVKVRYLEEERPFAIEQVTGMLLAKLKETSENALKKPVADCVISIPSFFTDAERRSVMAAAQVAGLNCLRLMNETTAVALAYGIYKQDLPPLDEKPRNVVFIDMGHSAYQVLVCAFNKGKLKVLATTFDPYLGGRNFDEALVDYFCDEFKTKYKINVKENSRALLRLYQECEKLKKLMSANASDLPLNIECFMNDLDVSSKMNRAQFEQLCASLLARVEPPLKAVMEQANLQREDISSIEIVGGATRIPAVKEQITKFFLKDISTTLNADEAVARGCALQCAILSPAFKVREFSITDLVPYSITLRWKTSFEDGSGECEVFCKNHPAPFSKVITFHKKEPFELEAFYTNLHEVPYPDARIGSFTIQNVFPQSDGDSSKVKVKVRVNIHGIFSVASASVIEKQNLEGDHSDAPMETETSFKNENKDNMDKMQVDQEEGHQKCHAEHTPEEEIDHTGAKTKSAVSDKQDRLNQTLKKGKVKSIDLPIQSSLCRQLGQDLLNSYIENEGKMIMQDKLEKERNDAKNAVEEYVYDFRDRLGTVYEKFITPEDLSKLSAVLEDTENWLYEDGEDQPKQVYVDKLQELKKYGQPIQMKYMEHEERPKALNDLGKKIQLVMKVIEAYRNKDERYDHLDPTEMEKVEKCISDAMSWLNSKMNAQNKLSLTQDPVVKVSEIVAKSKELDNFCNPIIYKPKPKAEVPEDKPKANSEHNGPMDGQSGTETKSDSTKDSSQHTKSSGEMEVD

SEQ ID NO: 178888 - protein, 467 aa, Artificial Sequence
  derived and/or modified sequence
MPGRWRWQRDMHPARKLLSLLFLILMGTELTQVLPTNPEESWQVYSSAQDSEGRCICTVVAPQQTMCSRDARTKQLRQLLEKVQNMSQSIEVLDRRTQRDLQYVEKMENQMKGLESKFKQVEESHKQHLARQFKAIKAKMDELRPLIPVLEEYKADAKLVLQFKEEVQNLTSVLNELQEEIGAYDYDELQSRVSNLEERLRACMQKLACGKLTGISDPVTVKTSGSRFGSWMTDPLAPEGDNRVWYMDGYHNNRFVREYKSMVDFMNTDNFTSHRLPHPWSGTGQVVYNGSIYFNKFQSHIIIRFDLKTETILKTRSLDYAGYNNMYHYAWGGHSDIDLMVDESGLWAVYATNQNAGNIVVSRLDPVSLQTLQTWNTSYPKRSAGEAFIICGTLYVTNGYSGGTKVHYAYQTNASTYEYIDIPFQNKYSHISMLDYNPKDRALYAWNNGHQILYNVTLFHVIRSDEL

SEQ ID NO: 178889 - protein, 135 aa, Artificial Sequence
  derived and/or modified sequence
MPGRWRWQRDMHPARKLLSLLFLILMGTELTQVLPTNPEESWQVYSSAQDSEGRCICTVVAPQQTMCSRDARTKQLRQLLEKVQNMSQSIEVLDRRTQRDLQYVEKMENQMKGLESKFKQVEESHKQHLARQFKG

SEQ ID NO: 178890 - DNA, 1404 bp, Artificial Sequence
  derived and/or modified sequence
atgccgggccgatggaggtggcaaagagacatgcatcccgcccgaaaactgctatctttgttatttctgattctgatgggaaccgaactcactcaagtattgccaacaaatcccgaggagtcttggcaggtttatagtagcgctcaagactctgagggcagatgcatttgcacagtggtagctccacagcagactatgtgcagtagagacgccagaaccaagcagcttcggcagctcttagaaaaggtccagaatatgtcccagtctattgaggtcctcgatagaagaactcagcgcgatctacagtacgtggaaaaaatggaaaaccagatgaaggggctggagagcaaattcaaacaggttgaggagagccacaagcagcacttggcaagacagtttaaggcgatcaaggctaaaatggatgagcttcgaccattaatccccgtgctcgaggagtacaaggcagacgctaaactcgtgctccagtttaaagaggaggtacaaaacctgactagcgtgctcaacgaactccaggaagagatcggggcgtatgactacgacgagctgcaaagccgagtgagcaatttagaggaaaggcttagagcttgcatgcaaaaactggcctgcggcaagcttactgggatatccgaccccgtgactgtcaagacctccggctccagatttgggtcatggatgaccgaccccctggcacccgaaggggataatcgcgtttggtatatggatggctatcacaataaccgctttgtgcgcgagtacaagagtatggtcgactttatgaacactgacaatttcacaagccacagactccctcacccctggtcagggacaggacaggtggtctacaacgggtccatctatttcaacaagttccagtcgcacatcataattcgctttgatctcaagacggagactatcctaaagacccgcagcttggactacgccgggtataacaatatgtatcattatgcctgggggggccattcggacattgatcttatggtggatgaaagtggcctttgggcagtttacgctacaaatcaaaacgccgggaatatcgtagtttctagattggaccctgtgtctctgcagaccttgcagacctggaataccagttatcccaaaagatccgcaggcgaagcgtttataatctgtggcaccctatacgtgacgaatggatattctggcggcacaaaagttcactatgcttaccagactaatgcgagtacctatgaatacatcgatattcccttccagaacaagtatagtcatataagcatgctcgactacaaccctaaggatagggctctctacgcctggaacaatgggcaccaaattttgtacaatgtaacacttttccatgtaatccggagcgacgagttatag

SEQ ID NO: 178891 - DNA, 1404 bp, Artificial Sequence
  derived and/or modified sequence
atgcctggccgctggcgctggcagagggacatgcacccagccaggaagctgctgagcctgctcttcctgatcctgatgggcacagagctgacccaggtgctgcccaccaaccctgaggagagctggcaggtgtacagcagcgcccaggacagcgagggccgctgcatctgcaccgtggtggccccccagcagaccatgtgcagcagagatgcccggaccaagcagctgcggcagctgctggagaaggtgcagaacatgagccagagcattgaggtgctggacaggaggacccagagggacctgcagtatgtggagaagatggagaaccagatgaagggcctggagagcaagttcaagcaggtggaggagagccacaagcagcacctggcccggcagttcaaggccatcaaggccaagatggatgagctgcggcccctcatccctgtgctggaggagtacaaggcagatgccaagctggtgctgcagttcaaggaggaggtgcagaacctgacctctgtgctgaatgagctgcaggaggagattggagcctatgactatgatgagctgcagagccgggtgagcaacctggaggagcggctgcgggcctgcatgcagaagctggcctgtgggaagctgaccggcatcagtgaccctgtgacagtgaagaccagcggcagccgcttcggctcctggatgacagaccccctggcccctgagggggacaacagagtgtggtacatggatggctaccacaacaacagatttgtgcgggagtacaagtccatggtggacttcatgaacacagacaacttcaccagccaccggctgccccacccctggagcggcaccggccaggtggtgtacaacggcagcatctacttcaacaagttccagagccacatcatcatccgctttgacctgaagacagagaccatcctgaagaccaggagcctggactatgccggctacaacaacatgtaccactacgcctggggcggccacagcgacatcgacctgatggtggatgagagcggcctgtgggccgtgtatgccaccaaccagaatgccggcaacatcgtggtgtcccggctggaccctgtgtccctgcagaccctgcagacctggaacaccagctaccccaagaggtctgctggggaggccttcatcatctgtggcaccctgtatgtgaccaacggctacagcggcggcaccaaggtgcactacgcctaccagaccaatgccagcacctatgagtacatcgacatccccttccagaacaagtacagccacatctccatgctggactacaaccccaaggaccgggccctgtatgcctggaacaacggccaccagatcctgtacaacgtgaccctcttccacgtgatccgcagtgatgagctgtag

SEQ ID NO: 178892 - DNA, 1404 bp, Artificial Sequence
  derived and/or modified sequence
atgcccggccggtggcggtggcagcgggacatgcaccccgcccggaaactgctgtctctgctgttccttatcctgatgggaaccgaactgacccaggtgttgcctacaaacccagaggagagctggcaggtgtattcatccgcccaagattccgaggggaggtgtatctgcactgtggtggctccccagcagacgatgtgtagtcgagacgctcgaacgaagcaactgcgacagctcctcgagaaggtgcaaaatatgtctcagtctatagaggtgctggatcgtcgaactcagcgtgacttgcagtatgtggaaaaaatggagaatcagatgaaagggcttgaaagtaagttcaagcaggtcgaagagagccataaacagcatctcgcacgacaattcaaggcaatcaaggcaaagatggatgaactgcggccactgatacctgtcctggaggagtataaggctgacgcaaagctcgtgctccaatttaaggaggaggttcagaacttgacctcagtcttgaatgagttgcaggaggaaatcggcgcttatgattatgacgagctgcaatcccgcgtatccaatctcgaggaacgtctccgggcatgtatgcagaaactcgcatgtggcaagttgacaggcattagtgatccggtgactgttaaaacatcaggaagcaggttcgggagctggatgacagaccctttggcccccgagggagacaaccgagtttggtacatggatggctaccacaacaaccggtttgtacgtgagtataaaagcatggttgatttcatgaacaccgacaattttacctcccaccgcctcccccatccctggtcaggcaccggccaggtggtctacaatggaagtatctatttcaacaagttccagtctcacattataatccgcttcgacctaaagactgagactattctgaaaacacgcagtctagactatgcaggctacaataatatgtatcattatgcctggggaggacatagcgacattgatcttatggtggacgagtcgggactctgggccgtttatgctactaatcagaatgcgggaaacatcgtggtcagccgattggacccagtttccctccagacattacagacctggaacacctcttacccaaagagaagtgccggagaggcattcatcatttgtggaacgctgtatgttacaaacgggtattcggggggtactaaggtccactatgcatatcagactaatgcttctacatatgaatacatcgatattccttttcagaacaagtatagccacatctccatgttagattataatcccaaagatagggcactgtatgcctggaacaatggacaccagatcctgtataatgtcacactcttccatgtaattcgatcagatgaattatag

SEQ ID NO: 178893 - DNA, 2591 bp, Artificial Sequence
  derived and/or modified sequence
gggacgcgataaatatgcagagcggaggcttcgcgcagcagagcccgcgcgccgcccgctccgggtgctgaatccaggcgtggggacacgagccaggcgccgccgccggagccagcggagccggggccagagccggagcgcgtccgcgtccacgcagccgccggccggccagcacccagggccctgcatgccaggtcgttggaggtggcagcgagacatgcacccggcccggaagctcctcagcctcctcttcctcatcctgatgggcactgaactcactcaagtgctgcccaccaaccctgaggagagctggcaggtgtacagctctgcccaggacagcgagggcaggtgtatctgcacagtggtcgctccacagcagaccatgtgttcacgggatgcccgcacaaaacagctgaggcagctactggagaaggtgcagaacatgtctcaatccatagaggtcttggacaggcggacccagagagacttgcagtacgtggagaagatggagaaccaaatgaaaggactggagtccaagttcaaacaggtggaggagagtcataagcaacacctggccaggcagtttaaggcgataaaagcgaaaatggatgaacttaggcctttgatacctgtgttggaagagtacaaggccgatgccaaattggtattgcagtttaaagaggaggtccagaatctgacgtcagtgcttaacgagctgcaagaggaaattggcgcctatgactacgatgaacttcagagcagagtgtccaatcttgaagaaaggctccgtgcatgcatgcaaaaactagcttgcgggaagttgacgggcatcagtgaccccgtgactgtcaagacctccggctcgaggttcggatcctggatgacagaccctctcgcccctgaaggcgataaccgggtgtggtacatggacggctatcacaacaaccgcttcgtacgtgagtacaagtccatggttgacttcatgaacacggacaatttcacctcccaccgtctcccccacccctggtcgggcacggggcaggtggtctacaacggttctatctacttcaacaagttccagagccacatcatcatcaggtttgacctgaagacagagaccatcctcaagacccgcagcctggactatgccggttacaacaacatgtaccactacgcctggggtggccactcggacatcgacctcatggtggacgagagcgggctgtgggccgtgtacgccaccaaccagaacgctggcaacatcgtggtcagtaggctggaccccgtgtccctgcagaccctgcagacctggaacacgagctaccccaagcgcagcgccggggaggccttcatcatctgcggcacgctgtacgtcaccaacggctactcagggggtaccaaggtccactatgcataccagaccaatgcctccacctatgaatacatcgacatcccattccagaacaaatactcccacatctccatgctggactacaaccccaaggaccgggccctgtatgcctggaacaacggccaccagatcctctacaacgtgaccctcttccacgtcatccgctccgacgagttgtagctccctcctcctggaagccaagggcccacgtcctcaccacaaagggactcctgtgaaactgctgccaaaaagataccaataacactaacaataccgatcttgaaaaatcatcagcagtgcggattctgacatcgagggatggcattacctccgtgtttctccctttcgagccggcgggccacagacgtcggaagaaactcccgtatttgcagctggaactgcagcccacggcgccccggttttcctccccgccctgtccctctctggtcaaacaacatactaaagaggcgaggcaatgactgttggccagttctcaccggggaaaaacccactgttaggatggcatgaacatttccttagatcgtggtcagctccgaggaatgtggcgtccaggctctttgagagccatgggctgcacccggccgtaggctagtgtaactcgcatcccattgcagtgccgtttcttgactgtgttgctgtctcttagattaaccgtgctgaggctccacatagctcctggacctgtgtctagtacatactgaagcgatggtcagagtgtgtagagtgaagttgctgtgcccacattgtttgaactcgcgtaccccgtagatacattgtgcaacgttcttctgttattcccttgaggtggtaacttcgtatgttcagtttatgcgatgattgttgtaaatgcaatgccgtagtttggattaataagtggatggtttttgtttctaaaaagaaaaaaaaaatcagtgttcacccttatagagacatagtcaagttcatgttgataataatcaaaggaattactctcttcttgttaaattagctaaatcatgtaaccgcagataggaagggctcgcctggggaaactctggtttccgatgggacaggaaagtcatacgggcaacagtatgcggaaagtacgttttttaagtaaaaaacaaaggcaaactttgtactatccagttatctaaggaacaataaaaacattaggaga

SEQ ID NO: 178894 - DNA, 1404 bp, Artificial Sequence
  derived and/or modified sequence
atgcctgggcgttggcgatggcagcgggatatgcatcctgcacgcaaattgctgagtttgctattcctcattctcatgggcactgaattaacccaggtattgcccacaaaccctgaagagtcctggcaagtatatagctccgctcaagacagtgaaggcagatgtatctgtacagttgttgcaccgcagcagactatgtgttcccgggacgccaggacaaagcagctgcgccaactcctggagaaggtgcagaatatgtcccagagtatagaagttctggaccgacgcacccagcgcgatcttcaatacgtggaaaagatggagaatcagatgaaggggcttgagtcaaaatttaagcaggtcgaagagtcgcacaagcagcacctcgctagacagtttaaagccatcaaagccaaaatggatgaactccgacccctaattcctgtgctggaagagtacaaagccgatgcgaaactggtcctgcagtttaaagaagaggttcagaatctgacctcggtactcaatgagcttcaggaagaaatcggcgcttacgactacgatgaactccagtcccgagtatctaaccttgaagaaagactccgggcttgtatgcagaagctggcctgcggaaagctgacgggtatttccgaccccgtcaccgtgaaaaccagcgggtctcggttcggaagttggatgacagatcccctggccccagagggtgacaacagggtatggtatatggatggataccataacaaccggtttgtgcgggagtacaagtccatggtcgactttatgaacaccgataatttcacatcccatcggttgccccatccatggtcaggcacaggacaggtagtgtacaatggtagcatctattttaataagtttcagtctcacataatcatccgatttgatttgaagactgagaccatcctcaaaacaaggagcctcgactatgccggatacaataacatgtaccactatgcctgggggggacattctgatattgatctgatggtggatgagtcagggctgtgggcagtttacgctacaaatcagaatgctggcaacatcgtagtatcccggttagatcctgtgtcccttcaaactctgcaaacctggaatactagttatccaaaacgatcagctggcgaagcattcatcatctgcgggactctgtacgttacgaatggttattctggcggtacaaaggtccactacgcataccaaactaacgcttcaacctacgagtacattgatatccccttccagaataagtattctcatatctctatgttggactacaaccccaaagacagggctctctatgcctggaataacggacatcagatcctgtacaatgtgacactgtttcacgtcatacgatctgacgaactgtag

SEQ ID NO: 178895 - DNA, 1404 bp, Artificial Sequence
  derived and/or modified sequence
atgcctggcaggtggcgttggcagagagacatgcatccagcacgcaaactactgtctctgctgtttctgatcctcatggggactgagttgacacaggtgcttccaacgaatccagaagaatcatggcaggtctacagcagtgcacaggactctgagggcaggtgcatctgcaccgtcgtggctcctcagcaaaccatgtgtagccgagatgcaaggactaaacagctgcgacagctgttggaaaaagtgcagaacatgtcccagtctattgaggttctggacaggcggactcagagagacctacagtatgttgagaagatggaaaatcagatgaaaggcttagagagcaaattcaaacaagttgaagaaagccacaaacagcatttggcccgtcagttcaaagccataaaagcgaagatggacgaacttcggcccctgattcccgttctcgaagagtataaggcagacgctaagctcgttctccagttcaaggaggaggtgcagaacctcacatccgtgctcaacgaattacaagaagaaattggcgcatacgattatgacgaactacagtctcgcgtcagtaacctcgaggagcgcctcagggcatgcatgcagaaactggcatgcgggaagctgacaggaatctcggaccctgtgactgtgaaaacaagcggttcaagattcggcagctggatgaccgatcccttggctccagagggcgataatagggtttggtacatggatggatatcacaacaaccgctttgtgagagagtacaagagcatggttgactttatgaacactgacaactttaccagccacagactgccacacccttggtcgggcacagggcaggttgtgtataatggctccatttatttcaacaagtttcaatctcacatcattatccgctttgacttgaaaaccgaaaccatcttaaagacgcgttcactggactacgcaggatacaacaatatgtaccactatgcttggggaggacatagtgacatcgatctcatggtggacgagagcgggctctgggcggtgtacgcaaccaaccagaatgccgggaatatagtagttagtaggctggatcccgttagcctgcagaccctgcagacctggaacacatcatatcctaaacgatctgccggcgaggcttttatcatctgcggaacgctgtacgtcacaaacggatacagtggcggcaccaaagtgcattacgcgtaccaaaccaacgcatcgacctacgaatacatagacattccctttcaaaataagtattcacacatcagcatgctagattataatccaaaggacagagccctgtacgcctggaataacggacaccagatactttacaatgtaacactctttcacgttatacggtctgatgaactctag

SEQ ID NO: 178896 - DNA, 1404 bp, Artificial Sequence
  derived and/or modified sequence
atgcctggacgctggaggtggcagcgggacatgcaccctgcccgtaagttactgtctctcctgtttctaatcttaatgggcaccgaactcacccaggtattacccaccaaccctgaggagtcttggcaagtctatagtagcgctcaagattcggaagggcgatgcatttgtaccgtcgttgcacctcagcaaaccatgtgctctcgggatgctagaacgaaacagctgcggcagctcctcgaaaaagtacagaacatgtcacaatccatcgaggttctggataggcgcacacagagggacttacagtacgtcgagaagatggagaatcagatgaagggcctggaaagtaagtttaaacaagtcgaggaatctcataagcaacaccttgcacgccagtttaaggctataaaagctaagatggacgagctgagaccactgatccctgtgttggaggagtacaaagctgacgccaagctcgtgctgcagtttaaagaggaagtgcagaacctgaccagcgtccttaacgagttgcaggaagaaatcggcgcttacgactacgatgagcttcagtcgagggtgtccaatctagaagagagacttcgcgcctgcatgcagaagctggcctgtgggaagttgaccggaatatctgacccagttaccgtaaagacatcagggtctcggttcggaagttggatgactgaccccctagcacccgagggcgacaaccgcgtatggtatatggatggatatcacaacaatcggtttgtgcgagaatataagagcatggtcgactttatgaacacagataactttacaagtcacagactgcctcatccatggagcgggaccggtcaggtggtttacaacggctccatttattttaacaagttccaatcccatataatcatccgcttcgatctaaaaaccgaaaccatcctgaaaactcgatccctggactacgcaggctataataatatgtaccattatgcctggggaggacacagtgacatagatctcatggttgatgaatctggactctgggccgtgtacgcaaccaatcagaatgccgggaacatagtcgtctctcgactggatcccgtgtccttacaaacccttcaaacgtggaacacatcctacccaaaacgatcagcaggtgaagccttcattatatgtgggacactctacgtgacaaacggctacagtgggggaactaaagttcactacgcataccagacaaacgccagtacatacgaatacattgacatcccattccagaataagtactcccacattagcatgcttgactataacccaaaggaccgcgcactgtacgcttggaacaacggccatcagatcctgtataatgtcactctgttccacgtcattagatccgacgaactctag

SEQ ID NO: 178897 - DNA, 1404 bp, Artificial Sequence
  derived and/or modified sequence
atgcccggcagatggagatggcagagagacatgcaccccgccagaaagctgctgagcctgctgttcctgatcctgatgggcaccgagctgacccaggtgctgcccaccaaccccgaggagagctggcaggtgtacagcagcgcccaggacagcgagggcagatgcatctgcaccgtggtggccccccagcagaccatgtgcagcagagacgccagaaccaagcagctgagacagctgctggagaaggtgcagaacatgagccagagcatcgaggtgctggacagaagaacccagagagacctgcagtacgtggagaagatggagaaccagatgaagggcctggagagcaagttcaagcaggtggaggagagccacaagcagcacctggccagacagttcaaggccatcaaggccaagatggacgagctgagacccctgatccccgtgctggaggagtacaaggccgacgccaagctggtgctgcagttcaaggaggaggtgcagaacctgaccagcgtgctgaacgagctgcaggaggagatcggcgcctacgactacgacgagctgcagagcagagtgagcaacctggaggagagactgagagcctgcatgcagaagctggcctgcggcaagctgaccggcatcagcgaccccgtgaccgtgaagaccagcggcagcagattcggcagctggatgaccgaccccctggcccccgagggcgacaacagagtgtggtacatggacggctaccacaacaacagattcgtgagagagtacaagagcatggtggacttcatgaacaccgacaacttcaccagccacagactgccccacccctggagcggcaccggccaggtggtgtacaacggcagcatctacttcaacaagttccagagccacatcatcatcagattcgacctgaagaccgagaccatcctgaagaccagaagcctggactacgccggctacaacaacatgtaccactacgcctggggcggccacagcgacatcgacctgatggtggacgagagcggcctgtgggccgtgtacgccaccaaccagaacgccggcaacatcgtggtgagcagactggaccccgtgagcctgcagaccctgcagacctggaacaccagctaccccaagagaagcgccggcgaggccttcatcatctgcggcaccctgtacgtgaccaacggctacagcggcggcaccaaggtgcactacgcctaccagaccaacgccagcacctacgagtacatcgacatccccttccagaacaagtacagccacatcagcatgctggactacaaccccaaggacagagccctgtacgcctggaacaacggccaccagatcctgtacaacgtgaccctgttccacgtgatcagaagcgacgagctgtag

SEQ ID NO: 178898 - protein, 542 aa, Artificial Sequence
  derived and/or modified sequence
MATATIALQVNGQQGGGSEPAAAAAVVAAGDKWKPPQGTDSIKMENGQSTAAKLGLPPLTPEQQEALQKAKKYAMEQSIKSVLVKQTIAHQQQQLTNLQMAAQRQRALAIMCRVYVGSIYYELGEDTIRQAFAPFGPIKSIDMSWDSVTMKHKGFAFVEYEVPEAAQLALEQMNSVMLGGRNIKVGRPSNIGQAQPIIDQLAEEARAFNRIYVASVHQDLSDDDIKSVFEAFGKIKSCTLARDPTTGKHKGYGFIEYEKAQSSQDAVSSMNLFDLGGQYLRVGKAVTPPMPLLTPATPGGLPPAAAVAAAAATAKITAQEAVAGAAVLGTLGTPGLVSPALTLAQPLGTLPQAVMAAQAPGVITGVTPARPPIPVTIPSVGVVNPILASPPTLGLLEPKKEKEEEELFPESERPEMLSEQEHMSISGSSARHMVMQKLLRKQESTVMVLRNMVDPKDIDDDLEGEVTEECGKFGAVNRVIIYQEKQGEEEDAEIIVKIFVEFSIASETHKAIQALNGRWFAGRKVVAEVYDQERFDNSDLSA

SEQ ID NO: 178899 - DNA, 1629 bp, Artificial Sequence
  derived and/or modified sequence
atggcgaccgcgaccatcgcgctgcaagtcaatggacagcagggaggcggatctgaacccgctgcagctgcggctgtcgtggcagctggcgacaaatggaaaccgccgcagggcacggattcaatcaaaatggagaatgggcaatcaaccgcagctaagcttggactgcctcccctgacccctgaacaacaggaagctttacagaaagccaaaaaatacgcgatggaacaatccatcaagagtgtcctggtcaagcagaccatcgctcaccaacagcagcagctcaccaacctgcagatggcagctcagagacagcgcgcccttgctattatgtgcagggtgtacgtgggaagcatatattatgaactgggggaagataccatacgccaggcttttgcaccattcgggcccatcaaatcgatagatatgagttgggatagtgtgaccatgaaacataaggggttcgcgtttgtcgagtatgaagtacccgaagccgctcagctggccctggaacagatgaatagtgtaatgttgggagggaggaacataaaagtgggccggccaagtaatatcggacaggcccagccaatcatagatcaactcgcggaagaggctcgcgcctttaaccggatatatgttgcctctgtgcaccaggacctgagcgatgacgacattaagagtgtttttgaagcctttggtaaaataaaaagctgcacactggcccgagaccccactacgggaaagcacaaaggctacggtttcatcgagtacgagaaagctcagagcagtcaagatgccgtcagcagtatgaacctcttcgatcttggcggccaatatttgagggttggaaaggctgtcacacccccgatgcccctcttgactcctgccacgcccgggggactgcccccagccgcagccgttgccgcggccgcagcaacagccaagatcaccgcgcaggaagcagtggccggtgctgccgttctgggaactctggggactcctggattggtcagccccgccctgaccctcgcacaaccactgggtactttgccccaggcggtaatggctgcccaagcccccggggtcataactggagtgacgcccgctaggcctcccatccccgtgaccattcctagcgtcggagtcgtcaatccgatcctagcctctcccccgaccctaggcttactcgaacctaagaaagaaaaggaggaagaagagctgttccctgaatccgaacggcccgagatgttgtcagagcaggagcatatgtccataagcggaagctcggcccggcatatggtcatgcagaaattgcttaggaagcaggaaagcacagtgatggtactgcggaacatggttgatcctaaggacattgatgacgatttagagggtgaggtgacagaagagtgtgggaaatttggggcggtaaaccgtgttatcatctatcaggagaagcaaggggaggaagaggacgccgaaatcatcgtgaagatttttgttgagtttagcatcgcgtccgagacccacaaggcaatacaggcattgaatggacgttggttcgccgggagaaaggtagtagcagaggtatatgaccaggagcggttcgataattctgacttaagtgcatag

SEQ ID NO: 178900 - DNA, 1629 bp, Artificial Sequence
  derived and/or modified sequence
atggccacagccaccatcgccctgcaggtgaatggccagcagggcggcggcagcgagcctgctgctgctgctgctgtggtggccgccggggacaagtggaagccaccccagggcacagacagcatcaagatggagaatggccagagcacagctgccaagctgggcctgccccccctgaccccagagcagcaggaggccctgcagaaggccaagaagtatgccatggagcagagcatcaagtctgtgctggtgaagcagaccatcgcccaccagcagcagcagctgaccaacctgcagatggccgcccagaggcagagggccctggccatcatgtgccgggtgtatgtgggcagcatctactatgagctgggggaggacaccatccggcaggcctttgcccccttcggccccatcaagagcattgacatgtcctgggacagcgtgaccatgaagcacaagggctttgcctttgtggagtatgaggtgcctgaggccgcccagctggccctggagcagatgaacagcgtgatgctgggcggcaggaacatcaaggtgggccggcccagcaacatcggccaggcccagcccatcatcgaccagctggccgaggaggcccgggccttcaaccgcatctacgtggcctctgtgcaccaggacctgagtgatgatgacatcaagtctgtgtttgaggccttcggcaagatcaagagctgcaccctggcccgggaccccaccaccgggaagcacaagggctacggcttcattgaatatgagaaggcccagagcagccaggatgctgtgtcctccatgaacctgtttgacctgggcggccagtacctgcgggtgggcaaggctgtgaccccacccatgcccctgctgaccccagccacccctgggggcctgcccccagctgctgctgtggccgctgctgctgccacagccaagatcacagcccaggaggccgtggccggggctgctgtgctgggcaccctgggcaccccaggcctggtgtccccagccctgaccctggcccagcccctgggcaccctgccccaggccgtgatggccgcccaggcccctggggtcatcaccggggtgaccccagcccggccccccatccctgtgaccatccccagcgtgggcgtggtgaaccccatcctggccagcccccccaccctgggcctgctggagcccaagaaggagaaggaggaggaggagctgtttcctgagagcgagaggcctgagatgctgtctgagcaggagcacatgagcatcagcggcagcagcgcccggcacatggtgatgcagaagctgctgaggaagcaggagagcacagtgatggtgctgaggaacatggtggaccccaaggacattgatgatgacctggagggggaggtgacagaagaatgtgggaagtttggagctgtgaacagagtcatcatctaccaggagaagcagggcgaggaggaggatgctgagatcatcgtgaagatctttgtggagttcagcatcgccagcgagacccacaaggccatccaggccctgaatggccgctggtttgctggcaggaaggtggtggccgaggtgtatgaccaggagagatttgacaacagcgacctgagcgcctag

SEQ ID NO: 178901 - DNA, 1821 bp, Artificial Sequence
  derived and/or modified sequence
ggaaggagcaagagtgggaggcgcgcgcggaggccgcgacggacgcaagatggcgacggcgaccatagctctccaggtcaatggccagcaaggaggggggtccgagccggcggcggcggcggcagtggtggcagcgggagacaaatggaaacctccacagggcacagactccatcaagatggagaacgggcagagcacagccgccaagctggggctgcctcccctgacgcccgagcagcaggaggcccttcagaaggccaagaagtacgccatggagcagagcatcaagagtgtgctggtgaagcagaccatcgcgcaccagcagcagcagctcaccaacctgcagatggcggctcagcggcagcgggcgctggccatcatgtgccgcgtctacgtgggctctatctactatgagctgggggaggacaccatccgccaggcctttgccccctttggccccatcaagagcatcgacatgtcctgggactccgtcaccatgaagcacaagggctttgccttcgtggagtatgaggtccccgaagctgcacagctggccttggagcagatgaactcggtgatgctggggggcaggaacatcaaggtgggcagacccagcaacatagggcaggcccagcccatcatagaccagttggctgaggaggcacgggccttcaaccgcatctacgtggcctctgtgcaccaggacctctcagacgatgacatcaagagcgtgtttgaggcctttggcaagatcaagtcctgcacactggcccgggaccccacaactggcaagcacaagggctacggcttcattgagtacgagaaggcccagtcgtcccaagatgctgtgtcttccatgaacctctttgacctgggtggccagtacttgcgggtgggcaaggctgtcacaccgcccatgcccctactcacaccagccacgcctggaggcctcccacctgccgctgctgtggcagctgctgcagccactgccaagatcacagctcaggaagcagtggccggagcagcggtgctgggtaccctgggcacacctggactggtgtccccagcactgaccctggcccagcccctgggcactttgccccaggctgtcatggctgcccaggcacctggagtcatcacaggtgtgaccccagcccgtcctcctatcccggtcaccatcccctcggtgggagtggtgaaccccatcctggccagccctccaacgctgggtctcctggagcccaagaaggagaaggaagaagaggagctgtttcccgagtcagagcggccagagatgctgagcgagcaggagcacatgagcatctcgggcagtagcgcccgacacatggtgatgcagaagctgctccgcaagcaggagtctacagtgatggttctgcgcaacatggtggaccccaaggacatcgatgatgacctggaaggggaggtgacagaggagtgtggcaagttcggggccgtgaaccgcgtcatcatctaccaagagaaacaaggcgaggaggaggatgcagaaatcattgtcaagatctttgtggagttttccatagcctctgagactcataaggccatccaggccctcaatggccgctggtttgctggccgcaaggtggtggctgaagtgtacgaccaggagcgttttgataacagtgacctctctgcgtgacagtggtccctctccccggacttgcacttgttccttgtttcctctgggttttatagtgatacagtggtgtccccggggccaggcgcgctctgcccagcccagcctacagtgcggataaaggtgcggatgctgctggccctgaa

SEQ ID NO: 178902 - DNA, 1629 bp, Artificial Sequence
  derived and/or modified sequence
atggccaccgccaccatcgccctgcaggtgaacggccagcagggcggcggcagcgagcctgctgcggccgccgcggtagtggccgccggagacaaatggaagcccccccaagggaccgattctataaagatggaaaatggccaatctaccgcagctaagttgggtctccctcctcttacccccgaacagcaggaggccctgcagaaggccaaaaagtatgcgatggagcaatccattaagtcggtcctcgtcaaacagactatcgcacaccaacagcagcagttgacgaacttgcagatggccgctcagcggcaacgcgctctagcgataatgtgccgagtatacgtggggtccatttattatgagctgggcgaggacaccatccggcaggcttttgctccgttcgggcccattaagagcatagatatgagctgggacagcgtgactatgaagcacaaaggattcgccttcgtggagtacgaagtccccgaagcggctcagctggcactggagcagatgaacagcgtcatgctcggcggccgcaatatcaaagtgggtaggccaagcaacataggccaggcccagcccattatagatcaactggctgaggaagctagagcattcaacaggatatacgtggcctctgtccatcaggatctctctgacgacgatatcaagtctgtgttcgaagcgtttggcaagatcaaaagttgcacccttgctagggaccctaccaccggtaagcataaaggctacggttttatcgaatatgaaaaggctcagtcaagccaagatgccgtctctagcatgaaccttttcgatctggggggtcagtatttacgcgtgggaaaggccgtcacccctcctatgccccttctaacacctgctacccctggagggctgcctcccgccgccgctgtcgcagccgctgccgcaactgctaaaattacagcccaggaggcagtggctggagcagccgtgctgggaactctgggtaccccaggtctggtgtctcctgccctgaccctggcacagccgctaggcaccctgcctcaagccgtgatggccgcacaagcccccggggtgatcacgggagtcacacctgctagacctcctattcccgtcactatcccctccgtgggcgtggtcaatccaatcttagcttccccacctaccttgggactgctcgaaccgaagaaagaaaaagaagaggaagaattattcccagagagtgagcgtccagagatgctgagtgagcaggaacatatgagcatatcaggctcctcagcacgccatatggtaatgcagaaactgctcagaaagcaggaaagcaccgtaatggtgctgagaaacatggtggacccgaaggacattgacgatgacctggagggggaggtgaccgaggagtgcgggaaatttggcgctgtcaatagagtgatcatctaccaggagaagcagggcgaagaagaagacgctgagatcatagtgaaaatctttgtcgaattctccatcgcatctgagacccataaggccatccaggccctgaatggtaggtggtttgccggcaggaaagtggtggctgaagtttatgaccaggagaggttcgataatagtgacttaagcgcttag

SEQ ID NO: 178903 - DNA, 1629 bp, Artificial Sequence
  derived and/or modified sequence
atggccaccgctaccattgccctgcaggtgaacggtcagcaaggaggtggaagcgagcccgctgccgcagcagccgtagtcgcggcaggcgacaagtggaagccaccacagggtacggattcaataaaaatggaaaacggccagagtacggccgctaagctcggtctgccaccattgacaccagaacagcaggaagcgctccagaaagccaagaagtacgccatggagcagagcattaagtctgtcttagtgaaacagacaatcgctcaccagcagcagcaattaactaaccttcaaatggcagcccagcggcagagggccctagcgattatgtgccgtgtctacgtaggctctatctactatgaacttggcgaagatactattaggcaggcttttgcccctttcggacccatcaagagtattgatatgtcgtgggactcggtaaccatgaaacacaagggttttgcctttgtcgaatatgaggtgcccgaggccgcacagctagctctggagcagatgaactctgtgatgctcggcggaaggaatataaaagtcggcagacccagcaatatcggccaggctcagccgattattgaccagctggctgaggaggcaagagcttttaataggatctatgtggccagcgtgcatcaggatttaagtgatgatgacatcaagagtgtgtttgaggcttttgggaagataaagtcatgcacactcgctcgggaccctacaacaggcaaacacaaaggctatggctttattgagtacgaaaaggcccagagctcacaagatgcggtctcgagcatgaatctctttgatttggggggacagtaccttagagtgggtaaagccgttactccgccaatgcctctcctgacccctgccacccccggagggctgccccctgccgctgctgtggcagctgccgcagccaccgcaaaaatcactgcccaggaagccgttgctggcgcagcagtgttaggcacgctgggtacgccgggtctcgtctcacctgccctgacccttgcacagcccctgggcacccttccccaggccgtgatggcggctcaggcaccaggggttatcactggcgtgacgcctgctcgaccacccatccctgtgacaattccaagcgtcggtgttgttaacccgatcttagcaagtcctcccacactgggtttgctggagcccaaaaaggaaaaggaagaagaggagctgttcccggagagcgagcgcccagagatgctcagtgaacaggagcacatgtccattagcggctccagcgctagacacatggttatgcagaaactcctccgaaaacaggagtccacagtcatggtgctccggaatatggtcgatcccaaagacatcgatgacgatttagagggagaggtaaccgaagagtgcgggaaattcggtgctgtcaatagggtcataatataccaggagaaacagggagaagaggaggatgccgagatcatcgtaaaaatttttgttgagttctccattgccagtgaaactcacaaggctatacaggcactcaacggcagatggttcgctggacggaaagtggtcgctgaagtctacgatcaggaacggttcgacaatagcgatctctcagcatag

SEQ ID NO: 178904 - DNA, 1629 bp, Artificial Sequence
  derived and/or modified sequence
atggccaccgccaccatcgccctgcaggtgaacggccagcagggcggcggcagcgagcccgccgccgccgccgccgtggtggccgccggcgacaagtggaagcccccccagggcaccgacagcatcaagatggagaacggccagagcaccgccgccaagctgggcctgccccccctgacccccgagcagcaggaggccctgcagaaggccaagaagtacgccatggagcagagcatcaagagcgtgctggtgaagcagaccatcgcccaccagcagcagcagctgaccaacctgcagatggccgcccagagacagagagccctggccatcatgtgcagagtgtacgtgggcagcatctactacgagctgggcgaggacaccatcagacaggccttcgcccccttcggccccatcaagagcatcgacatgagctgggacagcgtgaccatgaagcacaagggcttcgccttcgtggagtacgaggtgcccgaggccgcccagctggccctggagcagatgaacagcgtgatgctgggcggcagaaacatcaaggtgggcagacccagcaacatcggccaggcccagcccatcatcgaccagctggccgaggaggccagagccttcaacagaatctacgtggccagcgtgcaccaggacctgagcgacgacgacatcaagagcgtgttcgaggccttcggcaagatcaagagctgcaccctggccagagaccccaccaccggcaagcacaagggctacggcttcatcgagtacgagaaggcccagagcagccaggacgccgtgagcagcatgaacctgttcgacctgggcggccagtacctgagagtgggcaaggccgtgaccccccccatgcccctgctgacccccgccacccccggcggcctgccccccgccgccgccgtggccgccgccgccgccaccgccaagatcaccgcccaggaggccgtggccggcgccgccgtgctgggcaccctgggcacccccggcctggtgagccccgccctgaccctggcccagcccctgggcaccctgccccaggccgtgatggccgcccaggcccccggcgtgatcaccggcgtgacccccgccagaccccccatccccgtgaccatccccagcgtgggcgtggtgaaccccatcctggccagcccccccaccctgggcctgctggagcccaagaaggagaaggaggaggaggagctgttccccgagagcgagagacccgagatgctgagcgagcaggagcacatgagcatcagcggcagcagcgccagacacatggtgatgcagaagctgctgagaaagcaggagagcaccgtgatggtgctgagaaacatggtggaccccaaggacatcgacgacgacctggagggcgaggtgaccgaggagtgcggcaagttcggcgccgtgaacagagtgatcatctaccaggagaagcagggcgaggaggaggacgccgagatcatcgtgaagatcttcgtggagttcagcatcgccagcgagacccacaaggccatccaggccctgaacggcagatggttcgccggcagaaaggtggtggccgaggtgtacgaccaggagagattcgacaacagcgacctgagcgcctag

SEQ ID NO: 178905 - DNA, 1629 bp, Artificial Sequence
  derived and/or modified sequence
atggctaccgcaaccattgcccttcaagtgaatgggcagcaaggcggcggtagcgaaccggccgcagcagcagccgtggtcgccgcgggcgataaatggaagcccccccaggggactgactcaataaaaatggagaatggacagtcaacagcggccaaactgggactgcctccactcacccccgagcagcaggaagctctccagaaggcaaagaaatacgctatggagcagagcattaagagtgtgctggtgaaacagacgatcgcccaccagcagcaacagttgacaaatctacagatggccgcacagcgccagcgagcattggctattatgtgcagggtatatgtgggcagtatttactacgaacttggagaggacaccattcgacaggctttcgccccatttggtcccataaagagtatcgacatgtcatgggattctgtgaccatgaaacataaagggtttgcgttcgtggagtatgaagttcccgaagcagcacaactggcattagagcaaatgaatagcgtcatgctagggggaagaaacattaaagtaggaagaccctcgaacatcgggcaagcacaacctattatagaccagcttgcagaagaagctcgcgccttcaaccggatctacgttgcaagcgtgcatcaggatttgtctgatgacgacattaagtcagtgtttgaagcctttggcaaaattaaaagctgtacattggccagagaccctacgactggcaaacataaaggatatggctttattgagtatgaaaaggcgcaatcatctcaagatgcagtctcatctatgaacctctttgatttaggcggccagtatctccgcgtcggcaaggctgtgactccaccaatgcccctgcttactccagcgaccccaggggggctaccccccgccgcggccgtggctgcggctgctgctacagccaagattactgctcaggaggccgtggcaggcgcagccgttctgggaaccctggggacgccagggcttgttagtccagccttgactctagcccaacccctggggactctgccacaggcggtgatggccgcgcaggcgccgggagttattactggcgtaacaccggcccgaccacctattccagtcacaatccctagcgtgggggtggtcaatcccatcttagcctcgcccccaacacttggcctcctcgagcctaagaaggagaaagaagaagaagaattgtttcccgaatcagagaggcccgaaatgctgtctgagcaggagcatatgagcatctcaggttcttcagcacggcacatggtgatgcaaaagttgctgaggaagcaagagagcacggtcatggttctccgcaacatggtagaccccaaggatatcgacgatgacctggaaggtgaagtgaccgaagaatgcgggaaattcggcgcagtcaatcgggtcattatatatcaggagaagcagggggaggaagaggacgccgagattattgtaaaaattttcgtggaattttcaattgccagcgagactcacaaggctatacaggccctgaatggaagatggtttgccggaaggaaagtggtcgcagaagtgtatgatcaggagcgcttcgacaattcggaccttagtgcctag

SEQ ID NO: 178906 - DNA, 1629 bp, Artificial Sequence
  derived and/or modified sequence
atggccaccgccaccatcgccctgcaggtgaacggccagcagggcggaggatcggaaccggcggcagctgcggcggtcgtggccgctggcgataagtggaagcccccacagggcacagactcaatcaagatggaaaacggacaatcgacagcagccaaattgggtctacctccacttacgcctgagcagcaggaagctctccagaaagcgaaaaaatatgccatggagcagtccatcaagtccgtgttggtgaaacaaaccatagcgcatcaacaacaacagctgaccaacctccaaatggccgctcagcgtcaaagggctctagcaataatgtgcagagtctatgtaggctccatttattacgaactgggagaagatacaatcaggcaggcctttgctccttttggccccatcaagtccatcgacatgagttgggattctgtgacaatgaaacataagggattcgcatttgtagaatacgaggtgcctgaggctgctcaactggccttggaacagatgaacagtgttatgctggggggccgaaacatcaaagtcgggcgcccaagcaatattggacaggcgcagccaataattgatcagctggcggaagaggcaagggctttcaacagaatctatgtggctagtgtccatcaggatttaagcgatgacgatattaaatctgtattcgaagcttttggcaagatcaagtcttgtactctggcccgggaccctactaccggtaaacacaagggatatggctttatcgagtatgagaaggcccagagctcgcaggacgcagtgagcagcatgaatcttttcgacctcggcggccagtatctcagggttgggaaagcagtcacacctccgatgcccttgctgacccctgctactcccgggggtctacctcccgccgccgctgtagcagcggctgccgcgacagctaagattacggcccaggaggccgtggctggcgctgccgtactgggaacgctgggcaccccagggcttgtctcaccagcccttactctggcacagccactgggcaccctacctcaagcagtcatggccgctcaggcccccggagtgatcacgggcgtaacccccgcacggccacccatccccgtgacaatcccatccgttggcgttgttaatccaatcttggcgtcgccccctactctgggcctgttggaaccaaagaaggagaaggaagaggaggagctctttccggagtccgagcggccggagatgctgagtgagcaagagcacatgtccatcagcggtagtagtgccagacatatggttatgcagaagcttttgaggaaacaagaaagcactgtgatggtgctgcgaaacatggtcgatccaaaagatatcgatgatgatctggagggagaggtcaccgaagaatgtggtaaatttggcgccgtaaatagggtaattatctatcaggagaagcagggagaggaggaggacgctgagatcatcgttaaaatctttgtcgagttctcgattgcttcagaaacgcataaggctattcaggcccttaacggcaggtggtttgctggtcgcaaagtcgtggcagaggtgtacgatcaagaacggttcgataattcggatctaagtgcctag

SEQ ID NO: 178907 - DNA, 1629 bp, Artificial Sequence
  derived and/or modified sequence
atggctactgctaccatagccctgcaggtgaacggccagcagggtgggggatccgaacctgccgctgcagccgctgttgtggcggcaggggataagtggaagccccctcagggaaccgattcaattaaaatggagaacggacagtcaactgcagcaaaactggggctgcctcctttaactcccgagcaacaggaagccctccagaaagcaaagaaatacgccatggagcagagcatcaagtctgtgcttgtgaagcagacaatagctcaccaacagcagcagctcacaaatctccagatggccgcacaacgacagcgcgcacttgcgatcatgtgccgcgtatacgttgggagcatctactatgaactgggggaagataccatccgtcaggcatttgcaccgttcgggcctatcaagagcattgacatgagctgggactctgtaacgatgaaacataaaggattcgcattcgtcgaatacgaagtccccgaggcggcacagttggccctggagcagatgaattctgtcatgctgggaggtaggaacattaaggtcgggaggccctccaatattggtcaggcccagcccatcatcgatcagctggcggaagaggcgcgagcatttaacagaatctatgtagctagtgtgcaccaggacttgtcggacgacgatataaagtccgtatttgaggctttcggcaagattaaaagctgtactctggccagggatcctaccactggaaaacataaaggctacggtttcatcgagtacgagaaagcccagtcatcccaggatgccgtcagttcaatgaacttgttcgaccttggtggacagtatctgagggtcgggaaagcagtgaccccaccaatgcccttactcacccctgccactccgggaggactcccaccagcggcagcagtcgccgcagccgcagccaccgccaaaattacagctcaggaagctgtggccggagctgctgttctcgggaccctcgggaccccgggtcttgtgtcaccagctctcaccctggcccagcccctaggtaccctaccccaggccgtgatggccgcacaagcccctggggttataacgggcgttacgccggctcgaccccctataccggtcactattccatctgttggcgtggttaaccccatcctggcttcccctcctacacttggcctccttgaaccaaaaaaggagaaagaagaggaagaattattcccggagtcggagagacccgaaatgctgagcgaacaggaacacatgtccatcagtggctctagcgccagacatatggtgatgcagaagctgctcagaaagcaggagtctaccgtaatggtgctgcgaaatatggtcgacccaaaagatattgacgacgatttggagggggaagtcacagaagagtgcggaaagtttggggcagtgaaccgggtcatcatttatcaggagaagcagggcgaggaagaggacgcagaaattattgtgaagatctttgttgagttttctatcgccagtgaaacccacaaggccatccaggcactgaacgggagatggttcgctgggcgtaaggtggttgcagaggtatacgaccaagaacgctttgacaatagcgatttaagtgcctag

SEQ ID NO: 178908 - protein, 413 aa, Artificial Sequence
  derived and/or modified sequence
MKGALGSPVAAAGAAMQESFGCVVANRFHQLLDDESDPFDILREAERRRQQQLQRKRRDEAAAAAGAGPRGGRSPAGASGHRAGAGGRRESQKERKSLPAPVAQRPDSPGGGLQAPGQKRTPRRGEQQGWNDSRGPEGMLERAERRSYREYRPYETERQADFTAEKFPDEKPGDRFDRDRPLRGRGGPRGGMRGRGRGGPGNRVFDAFDQRGKREFERYGGNDKIAVRTEDNMGGCGVRTWGSGKDTSDVEPTAPMEEPTVVEESQGTPEEESPAKVPELEVEEETQVQEMTLDEWKNLQEQTRPKPEFNIRKPESTVPSKAVVIHKSKYRDDMVKDDYEDDSHVFRKPANDITSQLEINFGNLPRPGRGARGGTRGGRGRIRRAENYGPRAEVVMQDVAPNPDDPEDFPALS

SEQ ID NO: 178909 - protein, 308 aa, Artificial Sequence
  derived and/or modified sequence
MKGALGSPVAAAGAAMQESFGCVVANRFHQLLDDESDPFDILREAERRRQQQLQRKRRDEAAAAAGAGPRGGRSPAGASGHRAGAGGRRESQKERKSLPAPVAQRPDSPGGGLQAPGQKRTPRRGEQQGWNDSRGPEGMLERAERRSYREYRPYETERQADFTAEKFPDEKVPELEVEEETQVQEMTLDEWKNLQEQTRPKPEFNIRKPESTVPSKAVVIHKSKYRDDMVKDDYEDDSHVFRKPANDITSQLEINFGNLPRPGRGARGGTRGGRGRIRRAENYGPRAEVVMQDVAPNPDDPEDFPALS

SEQ ID NO: 178910 - DNA, 1242 bp, Artificial Sequence
  derived and/or modified sequence
atgaagggagccttaggctccccagtggcagccgctggggctgcaatgcaggaaagctttggctgcgtcgtggccaataggtttcatcagctcctggacgacgaatctgacccattcgacatcctccgcgaggctgaacggagaagacagcaacagctgcagcgaaaaagaagagacgaagccgctgccgcagctggggctgggcctcgaggaggcagatcccccgctggtgcgtccggccatagggcgggtgccggaggacggcgagagagccagaaggagcgaaagtccctgcccgctcctgtagcgcaaagacccgacagtcccggtggcggactgcaggcgcctgggcagaaacgtacgcccaggagaggagagcagcagggttggaacgactccaggggtccagagggaatgctggaaagagcagaacgccgatcttatcgagagtataggccatacgaaacggaacgccaggcagactttactgctgaaaagttccccgatgagaaacccggagaccgcttcgaccgcgaccggccattacgaggcagaggcggtcccagaggcggtatgagaggacggggtagagggggacctggcaaccgagtgttcgatgctttcgaccaacgtggcaaacgggagttcgaaaggtatggcggtaacgataagattgctgttcgcaccgaagataatatgggcggttgcggagtacggacttgggggtccggtaaggataccagcgatgtagaacccactgcgccaatggaggaacccactgtggtagaggaatcccagggcacaccggaggaggaatctccggctaaggttcctgagctcgaggtcgaagaagagactcaagttcaggagatgaccctggacgagtggaagaacctgcaggaacagacccgcccaaaaccagagtttaacatcaggaagccagagtcgacagtgccttccaaggcggtggttattcacaagtcaaagtatagagatgatatggttaaggatgattatgaagacgactcgcacgtgtttcgcaagccagctaatgacataacctctcaactcgaaatcaacttcggaaacttgccccgacccggacgcggtgctcgagggggaaccagaggcggacgcggtcggattagaagggctgaaaattatggcccacgcgcagaggtggtgatgcaagacgttgcacctaaccccgacgatccagaggacttcccagccctcagctag

SEQ ID NO: 178911 - DNA, 1242 bp, Artificial Sequence
  derived and/or modified sequence
atgaagggtgcactgggtagcccagttgcggcggcaggggcagcgatgcaggagtctttcggatgtgtggtagctaatcgtttccaccagctactggacgacgagagcgacccttttgacatcctccgtgaggcagaacgcagaaggcagcaacaacttcagagaaaacgacgggacgaagcagccgctgctgcaggagcaggtcccagaggtgggcgaagccccgccggagcctctggtcaccgggcgggggcagggggcaggagagagagtcagaaagaacgtaagtcgcttcctgcgccagttgctcaacggcccgactctcccggtggagggctacaggcaccgggacagaagagaactccccgcagaggagaacagcaggggtggaatgactcacggggccctgaagggatgttggagagggccgaacgcagatcctatagagaataccgcccctatgagactgaaaggcaggccgatttcacagcagaaaaattccccgacgaaaaacccggagacaggtttgatcgagacagaccactcagagggcgaggcgggccaagaggcggtatgagagggcggggccgaggtggcccaggcaacagagtctttgacgcttttgaccagcgggggaaaagagaattcgaaaggtacggcggtaatgataaaatagcggtgcggactgaggataatatgggtggatgcggagtgcggacttggggctcgggtaaggatacctctgatgtggaaccaaccgctcccatggaggagccgactgtggtggaggaatcacaagggacacccgaagaagagagccccgcgaaagttccagaactcgaagtcgaagaagaaacacaggtgcaagagatgactctggacgagtggaaaaacctccaagaacagactagaccgaaacccgagtttaatatcaggaagcctgagtctacagtaccatctaaagccgttgtgatccataaatcgaaatatcgcgacgacatggtgaaggacgattacgaggacgattcacatgtatttcggaaacctgctaatgatatcactagccaattggagatcaatttcggtaatttgcccaggccaggcaggggcgcaagaggtggcaccagaggaggccggggaagaatacgtcgagccgaaaattatggacctagagccgaagtcgtgatgcaggacgtggcgccaaacccggacgacccagaagatttcccagcgctgtcctag

SEQ ID NO: 178912 - DNA, 1242 bp, Artificial Sequence
  derived and/or modified sequence
atgaaaggagcgctgggctcacctgtcgcagcagcaggcgccgcaatgcaggagtccttcggctgtgttgtggctaatcgattccaccagctcttggatgatgagtcagacccattcgatattttgagagaagccgaaagacggagacagcagcagctgcagaggaaacggcgagatgaggctgcagccgcagcaggggctggaccacggggtggaagaagccccgcgggggcctctggacaccgggccggagcaggaggtagaagggaatcccagaaagaacggaaatcactgccagcccctgtagctcaaagacctgattcaccggggggaggattacaagctccaggtcagaagaggacaccacggcgaggcgaacaacagggctggaacgacagtaggggtccagagggtatgcttgaaagagcggagaggcgaagttatcgcgagtaccgcccctacgaaaccgagcgccaagcagacttcacggccgagaagttcccagacgagaaaccaggcgatagatttgatagggaccggccgttgcgtggccgaggaggacccaggggtgggatgagaggcagggggaggggggggcccgggaatagggtttttgatgcatttgaccagcgaggcaagagagagtttgaaagatatggaggtaatgataagatcgccgtgaggaccgaagataatatggggggctgcggggtccgtacttggggctctggaaaagacacatccgacgttgaacctactgcaccaatggaagagcctaccgtcgtggaagagagccagggcacccctgaagaagaaagcccagctaaggtaccagagcttgaagtcgaggaagagacgcaggtacaggagatgactttggatgaatggaagaatctgcaggaacagactagaccgaaacccgagtttaatatcaggaagcctgagtctacagtaccatctaaagccgttgtgatccataaatcgaaatatcgcgacgacatggtgaaggacgattacgaggacgattcacatgtatttcggaaacctgctaatgatatcactagccaattggagatcaatttcggtaatttgcccaggccaggcaggggcgcaagaggtggcaccagaggaggccggggaagaatacgtcgagccgaaaattatggacctagagccgaagtcgtgatgcaggacgtggcgcccaacccagatgaccccgaagatttccctgctctatcctag

SEQ ID NO: 178913 - DNA, 1242 bp, Artificial Sequence
  derived and/or modified sequence
atgaagggcgccctgggcagccccgtggccgccgccggcgccgccatgcaggagagcttcggctgcgtggtggccaacagattccaccagctgctggacgacgagagcgaccccttcgacatcctgagagaggccgagagaagaagacagcagcagctgcagagaaagagaagagacgaggccgccgccgccgccggcgccggccccagaggcggcagaagccccgccggcgccagcggccacagagccggcgccggcggcagaagagagagccagaaggagagaaagagcctgcccgcccccgtggcccagagacccgacagccccggcggcggcctgcaggcccccggccagaagagaacccccagaagaggcgagcagcagggctggaacgacagcagaggccccgagggcatgctggagagagccgagagaagaagctacagagagtacagaccctacgagaccgagagacaggccgacttcaccgccgagaagttccccgacgagaagcccggcgacagattcgacagagacagacccctgagaggcagaggcggccccagaggcggcatgagaggcagaggcagaggcggccccggcaacagagtgttcgacgccttcgaccagagaggcaagagagagttcgagagatacggcggcaacgacaagatcgccgtgagaaccgaggacaacatgggcggctgcggcgtgagaacctggggcagcggcaaggacaccagcgacgtggagcccaccgcccccatggaggagcccaccgtggtggaggagagccagggcacccccgaggaggagagccccgccaaggtgcccgagctggaggtggaggaggagacccaggtgcaggagatgaccctggacgagtggaagaacctgcaggagcagaccagacccaagcccgagttcaacatcagaaagcccgagagcaccgtgcccagcaaggccgtggtgatccacaagagcaagtacagagacgacatggtgaaggacgactacgaggacgacagccacgtgttcagaaagcccgccaacgacatcaccagccagctggagatcaacttcggcaacctgcccagacccggcagaggcgccagaggcggcaccagaggcggcagaggcagaatcagaagagccgagaactacggccccagagccgaggtggtgatgcaggacgtggcccccaaccccgacgaccccgaggacttccccgccctgagctag

SEQ ID NO: 178914 - DNA, 1242 bp, Artificial Sequence
  derived and/or modified sequence
atgaagggtgccctcggctcaccagtggcagcagccggggccgctatgcaggaaagttttggctgcgtggttgcgaaccggtttcaccagctgttggacgatgagagcgatccatttgatattttgagagaggcagagcgtagacgccagcagcagctgcagcgcaagcgtagagacgaagccgctgccgcagctggggcaggtccacggggcggcagatcacctgcaggcgcatctggtcaccgagccggcgctggaggcagacgagagtctcagaaggagaggaaatcattgccggcaccggtggcacaacgcccagatagtcctggggggggtttacaggctcccgggcaaaagcgcacgccgcgccgcggcgagcaacagggctggaatgatagtaggggtcctgaaggcatgctagagagggcagaaaggcgcagttacagagagtatcggccttacgaaacagaacggcaggcagatttcactgcagagaagtttcccgacgagaagcctggggacaggtttgatagggatcgtccattacgtggtcgggggggaccccgtggcggaatgagagggagaggccggggcggaccaggaaacagagtcttcgatgctttcgaccagcggggcaagcgcgagttcgagagatacgggggcaacgacaagattgcagttcggaccgaagacaacatgggcggatgcggcgtgcgcacttggggcagtggcaaagacacttccgatgtggaaccgacggccccgatggaggaaccgaccgttgtcgaggagagtcagggaactccagaggaagaatccccagccaaggtcccagagctcgaggttgaggaagagactcaggtacaggaaatgaccttggatgagtggaagaacctacaggaacagacgcgaccaaaaccggaattcaacattcggaaacccgaaagtaccgtcccaagcaaggccgtggttattcacaaatccaagtatcgagatgacatggtgaaagatgactacgaagatgactcacatgtctttcgaaagcctgctaacgacatcacctctcagctggaaattaactttggaaacttgccacgccctggacggggagccagaggtgggactagaggtgggcgaggcagaatcaggcgagctgagaactacggaccacgagctgaagttgtcatgcaggatgttgcccctaatcccgacgatccggaagatttccccgccctctcttag

SEQ ID NO: 178915 - DNA, 1242 bp, Artificial Sequence
  derived and/or modified sequence
atgaagggggccctgggcagccctgtggccgccgccggggccgccatgcaggagagctttggctgtgtggtggccaaccgcttccaccagctgctggatgatgaaagtgacccctttgacatcctgcgggaggccgagcggcggcggcagcagcagctgcagaggaagagaagagatgaagctgctgctgctgctggagctggcccccggggcggccgcagccctgctggggccagcggccacagagctggagctgggggccggcgggagagccagaaggagaggaagagcctgcctgcccctgtggcccagaggccagacagccctgggggcggcctgcaggcccctggccagaagaggaccccaagaagaggagagcagcagggctggaatgacagccggggccctgagggcatgctggagagagctgagaggaggagctaccgggagtaccggccctatgaaacagagcggcaggccgacttcaccgctgagaagttcccagatgagaagccaggggacagatttgaccgggaccggcccctgcggggccggggcggcccccggggcggcatgaggggccggggccggggcggccctggcaacagagtgtttgatgcctttgaccagaggggcaagcgggagtttgaaagatatggaggaaatgacaagattgctgtgaggacagaggacaacatgggcggctgcggcgtgaggacctggggcagcggcaaggacaccagtgatgtggagcccacagcccccatggaggagcccaccgtggtggaggagagccagggcaccccagaggaggagagccctgccaaggtgcctgagctggaggtggaggaggagacccaggtgcaggagatgaccctggatgagtggaagaacctgcaggagcagacccggcccaagccagagttcaacatcaggaagccagagagcacagtgcccagcaaggctgtggtgatccacaagagcaagtacagagatgacatggtgaaggatgattatgaagatgacagccacgtgttcaggaagccagccaatgacatcaccagccagctggagatcaactttggaaacctgcccaggcctggccgcggggcccggggcggcacccggggcggccggggccgcatcagaagagctgagaactacggccccagggctgaggtggtgatgcaggatgtggcccccaacccagatgatcctgaggacttccctgccctgtcctag

SEQ ID NO: 178916 - DNA, 2615 bp, Artificial Sequence
  derived and/or modified sequence
tgggtcctggccgccggcttcgctgagacgcgctcgcgtgggctgccctcccgggcccgcagtggtcgcggcggcatgaagggcgctctggggagtcccgtggctgccgctggcgccgcgatgcaggagagtttcggctgcgtggtggccaaccgcttccatcagctgctggacgacgagtcggacccgttcgacatcctgcgcgaggccgagcgccggcgccagcagcagctgcagcgcaagaggcgcgacgaggcggcggcggcggccggggccggtccccgcggcggcaggagcccagccggggcctcgggccacagagccggcgcgggcggccggagggagtcgcagaaggagcgcaagagcctcccggcgcccgtcgctcagcggcccgatagccccgggggcggcctgcaggcgccgggccagaagcggactcctagaagaggggagcagcaaggatggaatgacagccgtgggccggaggggatgctcgaaagagctgagcggagatcctacagggaataccgaccctatgagacagagaggcaggcagacttcacagctgagaagtttccagatgaaaaaccaggtgataggtttgatcgagacagaccgttgagaggacgtggaggcccgagagggggtatgcgcggcagaggcagaggtggccctgggaacagagtttttgacgcttttgaccagagaggaaagcgagaatttgaaagatatggtgggaatgacaaaatagcagtcagaactgaagacaacatgggtggatgtggagttcgaacctggggatcgggtaaagataccagtgatgtggagccaactgcaccgatggaggaacccacagtggtggaggagtcccagggcaccccggaagaggagtctccagccaaagttcctgagttggaggtagaagaagaaacccaagttcaagagatgactttagatgagtggaaaaatcttcaagaacagaccagaccaaagcctgagtttaacatccggaaaccagaatccactgttccttccaaagccgtggtgattcacaagtcaaaatacagagatgatatggtaaaagatgactatgaggacgattcccatgttttccggaaacccgccaatgacatcacatcccagctggagattaattttggtaacctccctcgtcctgggcgtggagccagaggaggcacccggggaggccggggaaggatcaggagggcagagaactatggacccagagcagaagtggtgatgcaagatgttgcccccaacccagatgacccggaagatttccctgcgctgtcttgaaagagccctgtttcccagcaccgcggagctgcactgcacacctgtggggagacttttccagctgggccaagggagtcagactctaagaacaatagatgttgcttttcccgtgtcatgtaaatttgttgcacttttttgggctgagctgttagaggggcttctccagaggctcgagagcaggccatttcccaagaagatgaagaatggtgactgtgtttttattgaaggaatttcaaatgaagaataatgtttaaaatgtgtatatagagatagtatagactcctccgcggaagcatggagggaaaggaggttgtaaaatagactccatggagactcttaggaagcagtagattcccgggggctgtgcctttagcgttagaggaaacacatagagctggaactgttaatggaaagcagtcacagctgagttttcggagaccaagaaattaaaatacaattgcacttactgtttacttgtaaatgttatcttctctcctggaatattttgagttctggttttcacttaaccaatcatttaaaaatcgctattgtgtagccactggccaccactctgtgacacagaatcagagaaagcgttgatttttaatggtgatttaaactacctcgtggtttctgtgtgtgtgcacacacacatctagtgtttgggtggtttttaggaagaatattaagtatgtgacttcaaaaaccatgttatttaacctgccaatcaaatggaaagggatcatggcaaaagcaaataccgcatccttttcttccgcagaactagagtcagagttcggcagctgcgtacaaaggcctctgccctcggcttgagcaaaagttgtaaataactagtatttattaagcacttataagcagtttttctcacttagtcctggctccagttctagagttcctctttattgcttttggtgaaagtttggggttgggggtacacctcagaggttcagtaattcacctggagtcccaccctgaacagagctggacccagagccacacacgcccgggaacacacactgtgctggggaggaagtgggcctaggagggcctgcaggtccaggcagctgtagagctgctagaagctggggtgttgctctccccgctttctcatagacacagaggtactgtctgcctgttgtcacacagttcatatgctcgcttgagatggaatctgaaccttggtcccaggatctgtgctttttcccactttgccacactgtctaaggtggctttgaactggaacccaagtgcaaataaaggttggtattcgctcctga

SEQ ID NO: 178917 - DNA, 1242 bp, Artificial Sequence
  derived and/or modified sequence
atgaagggcgccctgggcagccccgtggccgccgccggcgccgccatgcaagaatcttttgggtgcgtcgtcgctaacaggtttcatcagctgttagatgacgaatctgacccatttgacatcctgcgggaagccgaacgccgccgtcagcagcaattacagaggaagagacgggacgaggcagcagccgccgctggagctggaccacgggggggacgatcccctgcgggcgcgtctggccatcgcgctggtgctggcggacgccgcgaatctcaaaaggagcgcaaaagtctgccggcccctgtagcccagaggcctgacagcccgggcggcggtttacaggcccccgggcagaaacggaccccaagaagaggtgagcaacagggctggaatgattcccgcggaccagagggaatgcttgagcgggccgaaagaagaagctatcgagaatatagaccctacgagactgagagacaagcagatttcaccgcagagaaatttccggacgagaagccaggagatcgttttgatagagacagacccctaaggggtagaggcggcccccggggcggtatgcgtgggcggggtagaggcggcccaggaaatcgagttttcgacgcatttgatcagagaggcaagagggagttcgagcgatacggcgggaacgacaagatcgctgtgcgaacagaggacaacatgggagggtgcggcgtgcgcacatggggatctggtaaagacacaagtgacgtcgagccaactgctcccatggaagagcccaccgttgtggaggagtcccagggcaccccagaagaagaatcccccgctaaggttcctgagctcgaagtcgaggaggagacacaggtccaggagatgactcttgatgagtggaagaacctgcaagaacagactagacccaaacccgaattcaatattcgaaagccggaaagtactgttccgagtaaggccgtggtgatccacaagtcgaagtaccgagacgacatggtgaaggatgattacgaggacgacagccacgtttttaggaaacccgccaatgacataacaagccagctggaaattaactttggaaatctgcctaggccagggcgcggggcccggggcgggacacgaggtggacgtggtaggatccgcagggctgagaattatggccccagagccgaggtcgtaatgcaagatgtggcgcccaaccctgatgaccctgaagattttccagctctcagctag

SEQ ID NO: 178918 - RNA, 1242 nt, Artificial Sequence
  derived and/or modified sequence
augaagggugcacuggguagcccaguugcggcggcaggggcagcgaugcaggagucuuucggaugugugguagcuaaucguuuccaccagcuacuggacgacgagagcgacccuuuugacauccuccgugaggcagaacgcagaaggcagcaacaacuucagagaaaacgacgggacgaagcagccgcugcugcaggagcaggucccagaggugggcgaagccccgccggagccucuggucaccgggcgggggcagggggcaggagagagagucagaaagaacguaagucgcuuccugcgccaguugcucaacggcccgacucucccgguggagggcuacaggcaccgggacagaagagaacuccccgcagaggagaacagcagggguggaaugacucacggggcccugaagggauguuggagagggccgaacgcagauccuauagagaauaccgccccuaugagacugaaaggcaggccgauuucacagcagaaaaauuccccgacgaaaaacccggagacagguuugaucgagacagaccacucagagggcgaggcgggccaagaggcgguaugagagggcggggccgagguggcccaggcaacagagucuuugacgcuuuugaccagcgggggaaaagagaauucgaaagguacggcgguaaugauaaaauagcggugcggacugaggauaauauggguggaugcggagugcggacuuggggcucggguaaggauaccucugauguggaaccaaccgcucccauggaggagccgacugugguggaggaaucacaagggacacccgaagaagagagccccgcgaaaguuccagaacucgaagucgaagaagaaacacaggugcaagagaugacucuggacgaguggaaaaaccuccaagaacagacuagaccgaaacccgaguuuaauaucaggaagccugagucuacaguaccaucuaaagccguugugauccauaaaucgaaauaucgcgacgacauggugaaggacgauuacgaggacgauucacauguauuucggaaaccugcuaaugauaucacuagccaauuggagaucaauuucgguaauuugcccaggccaggcaggggcgcaagagguggcaccagaggaggccggggaagaauacgucgagccgaaaauuauggaccuagagccgaagucgugaugcaggacguggcgccaaacccggacgacccagaagauuucccagcgcuguccuag

SEQ ID NO: 178919 - RNA, 1242 nt, Artificial Sequence
  derived and/or modified sequence
augaaaggagcgcugggcucaccugucgcagcagcaggcgccgcaaugcaggaguccuucggcuguguuguggcuaaucgauuccaccagcucuuggaugaugagucagacccauucgauauuuugagagaagccgaaagacggagacagcagcagcugcagaggaaacggcgagaugaggcugcagccgcagcaggggcuggaccacgggguggaagaagccccgcgggggccucuggacaccgggccggagcaggagguagaagggaaucccagaaagaacggaaaucacugccagccccuguagcucaaagaccugauucaccggggggaggauuacaagcuccaggucagaagaggacaccacggcgaggcgaacaacagggcuggaacgacaguagggguccagaggguaugcuugaaagagcggagaggcgaaguuaucgcgaguaccgccccuacgaaaccgagcgccaagcagacuucacggccgagaaguucccagacgagaaaccaggcgauagauuugauagggaccggccguugcguggccgaggaggacccaggggugggaugagaggcagggggaggggggggcccgggaauaggguuuuugaugcauuugaccagcgaggcaagagagaguuugaaagauauggagguaaugauaagaucgccgugaggaccgaagauaauauggggggcugcgggguccguacuuggggcucuggaaaagacacauccgacguugaaccuacugcaccaauggaagagccuaccgucguggaagagagccagggcaccccugaagaagaaagcccagcuaagguaccagagcuugaagucgaggaagagacgcagguacaggagaugacuuuggaugaauggaagaaucugcaggaacagacuagaccgaaacccgaguuuaauaucaggaagccugagucuacaguaccaucuaaagccguugugauccauaaaucgaaauaucgcgacgacauggugaaggacgauuacgaggacgauucacauguauuucggaaaccugcuaaugauaucacuagccaauuggagaucaauuucgguaauuugcccaggccaggcaggggcgcaagagguggcaccagaggaggccggggaagaauacgucgagccgaaaauuauggaccuagagccgaagucgugaugcaggacguggcgcccaacccagaugaccccgaagauuucccugcucuauccuag

SEQ ID NO: 178920 - protein, 1254 aa, Artificial Sequence
  derived and/or modified sequence
MKKHRRALALVSCLFLCSLVWLPSWRVCCKESSSASASSYYSQDDNCALENEDVQFQKKDEREGPINAESLGKSGSNLPISPKEHKLKDDSIVDVQNTESKKLSPPVVETLPTVDLHEESSNAVVDSETVENISSSSTSEITPISKLDEIEKSGTIPIAKPSETEQSETDCDVGEALDASAPIEQPSFVSPPDSLVGQHIENVSSSHGKGKITKSEFESKVSASEQGGGDPKSALNASDNLKNESSDYTKPGDIDPTSVASPKDPEDIPTFDEWKKKVMEVEKEKSQSMHASSNGGSHATKKVQKNRNNYASVECGAKILAANPEAKSTSAILIENMDLYMLNPCSTKIWFVIELCEPIQVKQLDIANYELFSSTPKDFLVSISDRYPTNKWIKLGTFHGRDERNVQSFPLDEQMYAKYVKMFIKYIKVELLSHFGSEHFCPLSLIRVFGTSMVEEYEEIADSQYHSERQELFDEDYDYPLDYNTGEDKSSKNLLGSATNAILNMVNIAANILGAKTEDLTEGNKSISENATATAAPKMPESTPVSTPVPSPEYVTTEVHTHDMEPSTPDTPKESPIVQLVQEEEEEASPSTVTLLGSGEQEDESSPWFESETQIFCSELTTICCISSFSEYIYKWCSVRVALYRQRSRTALSKGKDYLVLAQPPLLLPAESVDVSVLQPLSGELENTNIEREAETVVLGDLSSSMHQDDLVNHTVDAVELEPSHSQTLSQSLLLDITPEINPLPKIEVSESVEYEAGHIPSPVIPQESSVEIDNETEQKSESFSSIEKPSITYETNKVNELMDNIIKEDVNSMQIFTKLSETIVPPINTATVPDNEDGEAKMNIADTAKQTLISVVDSSSLPEVKEEEQSPEDALLRGLQRTATDFYAELQNSTDLGYANGNLVHGSNQKESVFMRLNNRIKALEVNMSLSGRYLEELSQRYRKQMEEMQKAFNKTIVKLQNTSRIAEEQDQRQTEAIQLLQAQLTNMTQLVSNLSATVAELKREVSDRQSYLVISLVLCVVLGLMLCMQRCRNTSQFDGDYISKLPKSNQYPSPKRCFSSYDDMNLKRRTSFPLMRSKSLQLTGKEVDPNDLYIVEPLKFSPEKKKKRCKYKIEKIETIKPEEPLHPIANGDIKGRKPFTNQRDFSNMGEVYHSSYKGPPSEGSSETSSQSEESYFCGISACTSLCNGQSQKTKTEKRALKRRRSKVQDQGKLIKTLIQTKSGSLPSLHDIIKGNKEITVGTFGVTAVSGHI

SEQ ID NO: 178921 - DNA, 5556 bp, Artificial Sequence
  derived and/or modified sequence
ccggagtcctgtgaagcgcccctgtccgcgcctctgtggggccctcagagagggctgccaggacgcgagccactgaggagccgctcagccagcgccatagcccttaggactatcggtcacattctcgcgctcctgctccggctcctccatcttggcctcggcagtggcggctgccgggaggatgtgccgccttctggcagggggaagaaggaggagaagatgaagaagcaccggcgggccttggccctggtctcctgcctctttctgtgctctctggtctggcttcccagctggcgtgtatgttgtaaagagagttcttcagcttcagcgtcatcatattactctcaagatgacaactgcgcactagaaaatgaagatgtacaattccagaaaaaggatgaaagagagggacctatcaatgccgaatcattgggaaaatcaggttcaaatttacctatttctccaaaagaacataaattaaaagatgattctattgtggatgtacaaaatacagagtcaaaaaagttaagtccaccggtggtggagacactccctacagttgatttgcatgaagagtcttccaatgcagttgtggacagtgaaactgttgaaaatatttccagctcatctacctcagaaatcactccaatctcaaagcttgatgaaatagaaaaatctggtactattccgatagccaaaccaagtgaaactgagcagtctgaaactgattgtgatgttggtgaggcccttgatgctagtgctccaattgaacaaccttcctttgtcagtccacctgacagccttgttggccagcatatagaaaatgtatcatcttcacatggtaaaggaaagataacaaaatcagaatttgaatcaaaagtttcagcaagtgaacagggcggtggtgatccaaaatctgcattgaatgcttcagataatttaaaaaatgagagctctgattatacaaaaccaggagacattgaccctacatcagtagcaagtcccaaagatccagaagatataccaacatttgatgaatggaagaagaaagttatggaagtagaaaaagaaaaaagtcagtcgatgcatgcatcttctaatggaggttcacatgccaccaaaaaggtccagaaaaatcgaaataattatgcctcagtagaatgtggtgccaaaattctagcagctaatccagaagccaagagcacatctgctattcttatagaaaatatggatctttacatgttgaatccttgcagcactaaaatttggtttgttattgaactttgtgaaccaattcaagtaaaacagcttgatattgcaaattatgaattattttcttctactcctaaagattttctggtttctatcagtgacagatatccaacaaataagtggattaagctgggtacttttcatggtagagatgagcggaatgtacagagtttccctttagatgaacagatgtatgcaaaatatgtcaagatgttcatcaagtacataaaggttgagttgctatcacattttggatcagagcacttttgtccattaagccttataagggtatttggcactagcatggtggaagaatatgaagaaattgctgattcccagtatcactcagaacgccaggaactatttgatgaggactatgattatccactggattataatactggagaggataaatcctcaaaaaatcttcttggttctgctacaaatgccattctaaatatggtgaatattgctgctaatattctgggagcaaaaactgaagacctgacagaaggaaataaaagtatatctgagaatgccactgccacagctgcacctaaaatgcctgaatcaactcctgtttcaactcctgttccatctcctgagtatgtaaccactgaagtacacacacatgacatggagccgtcaacaccagatactccaaaagagagtcccattgtacagttagttcaagaggaggaagaggaggcaagtccatctacagtgacccttctgggcagcggtgaacaggaagatgaatcatcaccctggtttgagtcagagacacaaatattttgcagtgaactgaccacaatttgttgtatttctagtttttcagaatacatatataaatggtgttcagttagagttgctctttatcggcagcgcagccgaactgctttgagtaaaggaaaagattatcttgtgttagctcaaccacccttactacttcctgcggaatcagtagatgtttcagtattgcaacctctgagtggagaattggaaaatacgaatatagaaagggaagctgaaactgttgttctgggtgatttaagtagtagtatgcaccaggatgacttggtgaatcacactgtagatgcagttgaacttgaaccaagccattctcaaactctttctcagtctcttcttttagatattaccccagaaatcaatcccttgcctaaaatagaagtatctgagtctgttgaatatgaggcaggacatataccatcaccagtgattccccaagagagttctgttgagatcgataatgaaacagaacaaaagtctgagagctttagttctatagagaaaccatctattacctatgaaacaaataaagttaatgagttaatggataatattataaaagaagatgtgaactccatgcaaattttcacaaagctgtctgaaacaatagtgccaccaataaatacagccactgtacccgacaatgaagatggggaagccaaaatgaatatagctgacacagcaaagcaaactttgatttctgttgtggattcttcttcattacctgaagtaaaagaagaagaacagtctccagaagatgcccttttgagagggttacagaggacagctacagatttttatgctgaattgcaaaattctacagatctaggatatgctaatggaaatcttgtacatggatcaaaccaaaaggagtcagtatttatgagacttaataatcgtattaaagccttagaagttaacatgtctctcagtggtcgctatctggaggagcttagccaaaggtaccgaaaacaaatggaagaaatgcaaaaggctttcaataaaacaatcgtgaaacttcagaatacttcaagaatagcagaggagcaggatcagcggcaaactgaagccatccagttgctacaggcacagctgaccaacatgacacagcttgtttcaaatttatcagcaacagtagcagaattgaaacgggaggtttcagatcgacaaagctatcttgtcatatctttggttctttgtgttgtcttgggactgatgctttgtatgcagcgttgtcgaaatacttctcaatttgatggagattatatttcaaaacttcctaaaagtaatcagtatccaagccctaaaaggtgtttctcttcctatgatgatatgaatttgaaaagaagaacttcattcccactcatgagatccaagtctctacagttaactggcaaagaagtagacccaaatgatttgtacattgtagaacccctcaagttttctccagaaaagaagaagaagcgctgcaagtacaaaattgaaaaaattgagaccataaagcctgaagaaccattgcaccccatagccaatggcgacataaaaggaagaaagccctttacgaaccagagagatttttctaatatgggagaagtttatcactcttcttataaaggtcctccatctgaaggaagctcagaaacttcatcacagtcagaagagtcctatttttgtggcatttcagcttgcacaagtctgtgcaatggacagtctcaaaagacaaaaactgagaagagggctttaaaacgaagacgatctaaagtccaagaccaaggaaaattgataaaaactctaatacagactaagtcgggatcattgccgagcctgcatgacataatcaaaggaaacaaagagatcaccgtgggaacatttggtgttacagcagtctcgggacatatctaaaattaattgaacttttcatacagaagacttttttgttgttgttctttgaagaacagtctgtagtatttgaagggtttgggggagggagaaaatattaatgggaaaggcattcagaaattatggtttctacctttttaaaaagtagatgggattgtgtcaatcttggttaatgagctacagttttacaaagctgatcacttcctataaggacaatggtagacattttataaagatgttttttcacaagattaattactgggacaaaagtaatttggaagcccagttccttaggtgggataggaatgaaagcctaaacctcttcctttagctttgttcctatttcttgcaccttcccatatttatgtgccttttgtctatttataatgccactggaagaggagggataactttttctgttatttgatttcttttataactttgttaggtttttgaagctgcaaacactacaatgctttgagggggtctgtgcctgaagctcaggagtgtggatcagacagtctaaagatcctaaaaacttgccaactggatctttgtttagcaaactcactggaaatgaacacttaatggaatttttaagtctgttctgttaggtagatggtgatgctcttgttattttcacttattcagactggattacttcttacttagttactaactcaatgaggaaaaatccctacaggatctttttttgcaaacaactgatatatgcagacaaatttttgacaaattcaccttttaaacacacttaaccatttgtgaaggttttctttagcttacattttaaacatacacaataaacactaatcctccaaactttcactgtttttattagtatgaatataaaatttgaaggtttggccaattagtacaagtctcatgatataatcactgcctgcatacatatgcacagatccagttagtgagtttgtcaagcttaatctaattggttaagtctaaagagattattattccttgatgtttgctttgtattggctacaaatgtgcagaggtaatacatatgtgatgtcgatgtctctgtctttttttttgtctttaaaaaataattggcagcaactgtatttgaataaaatgatttcttagtatgattgtacagtaatgaatgaaagtggaacatgtttctttttgaaagggagagaattgaccatttattgttgtgatgtttaagttataacttattgagcacttttagtagtgataactgtttttaaacttgcctaatacctttcttgggtattgtttgtaatgtgacttatttaacgccttttttgtttgtttaagttgctgctttaggttaacagcgtgttttagaagatttaaatttctttcctgtctgcacaattagctattcagagcaagagggcctgattttatagaagccccttgaaaagaggtccagatgagagcagagatacagtgagaaattatgtgatctgtgtgttgtgggaagagaattttcaatatgtaactacggagctgtagtgccattagaaactgtgaatttccaaataaatctgaacacttgtctttatt

SEQ ID NO: 178922 - DNA, 3765 bp, Artificial Sequence
  derived and/or modified sequence
atgaagaagcacagaagagccctggccctggtgagctgcctgttcctgtgcagcctggtgtggctgcccagctggagagtgtgctgcaaggagagcagcagcgccagcgccagcagctactacagccaggacgacaactgcgccctggagaacgaggacgtgcagttccagaagaaggacgagagagagggccccatcaacgccgagagcctgggcaagagcggcagcaacctgcccatcagccccaaggagcacaagctgaaggacgacagcatcgtggacgtgcagaacaccgagagcaagaagctgagcccccccgtggtggagaccctgcccaccgtggacctgcacgaggagagcagcaacgccgtggtggacagcgagaccgtggagaacatcagcagcagcagcaccagcgagatcacccccatcagcaagctggacgagatcgagaagagcggcaccatccccatcgccaagcccagcgagaccgagcagagcgagaccgactgcgacgtgggcgaggccctggacgccagcgcccccatcgagcagcccagcttcgtgagcccccccgacagcctggtgggccagcacatcgagaacgtgagcagcagccacggcaagggcaagatcaccaagagcgagttcgagagcaaggtgagcgccagcgagcagggcggcggcgaccccaagagcgccctgaacgccagcgacaacctgaagaacgagagcagcgactacaccaagcccggcgacatcgaccccaccagcgtggccagccccaaggaccccgaggacatccccaccttcgacgagtggaagaagaaggtgatggaggtggagaaggagaagagccagagcatgcacgccagcagcaacggcggcagccacgccaccaagaaggtgcagaagaacagaaacaactacgccagcgtggagtgcggcgccaagatcctggccgccaaccccgaggccaagagcaccagcgccatcctgatcgagaacatggacctgtacatgctgaacccctgcagcaccaagatctggttcgtgatcgagctgtgcgagcccatccaggtgaagcagctggacatcgccaactacgagctgttcagcagcacccccaaggacttcctggtgagcatcagcgacagataccccaccaacaagtggatcaagctgggcaccttccacggcagagacgagagaaacgtgcagagcttccccctggacgagcagatgtacgccaagtacgtgaagatgttcatcaagtacatcaaggtggagctgctgagccacttcggcagcgagcacttctgccccctgagcctgatcagagtgttcggcaccagcatggtggaggagtacgaggagatcgccgacagccagtaccacagcgagagacaggagctgttcgacgaggactacgactaccccctggactacaacaccggcgaggacaagagcagcaagaacctgctgggcagcgccaccaacgccatcctgaacatggtgaacatcgccgccaacatcctgggcgccaagaccgaggacctgaccgagggcaacaagagcatcagcgagaacgccaccgccaccgccgcccccaagatgcccgagagcacccccgtgagcacccccgtgcccagccccgagtacgtgaccaccgaggtgcacacccacgacatggagcccagcacccccgacacccccaaggagagccccatcgtgcagctggtgcaggaggaggaggaggaggccagccccagcaccgtgaccctgctgggcagcggcgagcaggaggacgagagcagcccctggttcgagagcgagacccagatcttctgcagcgagctgaccaccatctgctgcatcagcagcttcagcgagtacatctacaagtggtgcagcgtgagagtggccctgtacagacagagaagcagaaccgccctgagcaagggcaaggactacctggtgctggcccagccccccctgctgctgcccgccgagagcgtggacgtgagcgtgctgcagcccctgagcggcgagctggagaacaccaacatcgagagagaggccgagaccgtggtgctgggcgacctgagcagcagcatgcaccaggacgacctggtgaaccacaccgtggacgccgtggagctggagcccagccacagccagaccctgagccagagcctgctgctggacatcacccccgagatcaaccccctgcccaagatcgaggtgagcgagagcgtggagtacgaggccggccacatccccagccccgtgatcccccaggagagcagcgtggagatcgacaacgagaccgagcagaagagcgagagcttcagcagcatcgagaagcccagcatcacctacgagaccaacaaggtgaacgagctgatggacaacatcatcaaggaggacgtgaacagcatgcagatcttcaccaagctgagcgagaccatcgtgccccccatcaacaccgccaccgtgcccgacaacgaggacggcgaggccaagatgaacatcgccgacaccgccaagcagaccctgatcagcgtggtggacagcagcagcctgcccgaggtgaaggaggaggagcagagccccgaggacgccctgctgagaggcctgcagagaaccgccaccgacttctacgccgagctgcagaacagcaccgacctgggctacgccaacggcaacctggtgcacggcagcaaccagaaggagagcgtgttcatgagactgaacaacagaatcaaggccctggaggtgaacatgagcctgagcggcagatacctggaggagctgagccagagatacagaaagcagatggaggagatgcagaaggccttcaacaagaccatcgtgaagctgcagaacaccagcagaatcgccgaggagcaggaccagagacagaccgaggccatccagctgctgcaggcccagctgaccaacatgacccagctggtgagcaacctgagcgccaccgtggccgagctgaagagagaggtgagcgacagacagagctacctggtgatcagcctggtgctgtgcgtggtgctgggcctgatgctgtgcatgcagagatgcagaaacaccagccagttcgacggcgactacatcagcaagctgcccaagagcaaccagtaccccagccccaagagatgcttcagcagctacgacgacatgaacctgaagagaagaaccagcttccccctgatgagaagcaagagcctgcagctgaccggcaaggaggtggaccccaacgacctgtacatcgtggagcccctgaagttcagccccgagaagaagaagaagagatgcaagtacaagatcgagaagatcgagaccatcaagcccgaggagcccctgcaccccatcgccaacggcgacatcaagggcagaaagcccttcaccaaccagagagacttcagcaacatgggcgaggtgtaccacagcagctacaagggcccccccagcgagggcagcagcgagaccagcagccagagcgaggagagctacttctgcggcatcagcgcctgcaccagcctgtgcaacggccagagccagaagaccaagaccgagaagagagccctgaagagaagaagaagcaaggtgcaggaccagggcaagctgatcaagaccctgatccagaccaagagcggcagcctgcccagcctgcacgacatcatcaagggcaacaaggagatcaccgtgggcaccttcggcgtgaccgccgtgagcggccacatctag

SEQ ID NO: 178923 - DNA, 3765 bp, Artificial Sequence
  derived and/or modified sequence
atgaagaaacatagaagagcattagcactcgtatcatgcttgtttctctgttctttagtgtggctgccttcttggcgagtctgctgtaaggagagcagttcagcatccgcctctagttattattctcaggatgacaactgtgccctagagaacgaagacgtgcaatttcagaagaaggatgagcgggaaggccccatcaatgccgagtcactggggaagtctggatctaatctgcccatttctcccaaggaacacaagctcaaggatgactcaatcgttgacgtccagaacactgagtccaagaagctctcccctccggtcgtcgagaccctgcctactgtggacctccacgaggagagcagcaacgctgtggtcgactctgaaactgtggaaaacatttcatcgtcttctacctccgagatcacccctatatccaagctggacgaaatagagaaaagcggtactattcctatcgccaagccatctgaaaccgagcagtccgagaccgactgcgatgttggcgaggcactggatgcgtctgctccaatcgaacaaccttcatttgtgtcacctccagattctctggtgggccagcatattgaaaacgtctcctcctcgcacggtaagggcaagattactaaaagtgaattcgagtctaaagtgagcgcgagtgagcagggtggtggcgacccaaagagtgcacttaatgctagcgacaatctgaagaatgaatcgtcagactatacaaagccaggggacattgaccctacgtctgtggcatcacctaaagatccggaggacatccccacatttgatgaatggaaaaagaaagtgatggaggtggagaaggaaaagagccagagtatgcacgcttctagcaatggcggctcacatgccaccaaaaaagtgcagaagaatcggaataattacgcctcggtcgagtgcggcgctaagatactcgccgcgaatccagaagccaagagcacctcagccatcctgatcgaaaacatggatttgtatatgctgaatccctgttcaaccaaaatctggtttgttatcgagctgtgtgagcccattcaggtgaaacagttagacattgccaattacgaactgtttagttccacccccaaggattttctggtgtcaatctccgacagatatccgacgaacaagtggattaaactcggcaccttccatggacgtgacgagcgcaacgtccagagctttcccttagatgagcagatgtatgccaaatacgtcaagatgtttattaagtatatcaaggtagagctacttagccactttgggtcagagcacttttgccccctaagcctcatcagagtgttcgggacttctatggtggaggaatatgaggagattgcagacagccaataccattccgagcggcaggagttgttcgatgaggattacgactatccactggactataatactggggaggacaagtccagtaagaatctactgggaagcgctactaacgccatactcaatatggtgaacatagccgccaacatacttggggctaaaaccgaggatctaaccgagggcaacaagagcatctctgagaatgcaacagcaactgccgcccccaagatgcccgaaagcacacccgtttccacaccggtcccttccccagaatacgtgaccactgaagtgcatactcatgacatggagccttccactcctgatacacctaaagagagccctatcgttcagctagtccaggaggaggaggaggaagcttcaccatccacagtcaccctgcttgggagcggcgaacaagaagacgaatcatcaccttggtttgaaagtgaaacccagatcttctgttcggaactgacaacgatctgctgtatctcttccttctccgaatatatctacaaatggtgctccgtccgggttgcgctgtatcggcagagaagcaggactgcactcagtaagggcaaagattaccttgtgttagcccagccccctcttctactgcccgccgaatcagtggacgtgagtgtgttacagcctctgtccggcgagttggagaataccaacatagagagggaggccgagacggtagtgttgggggacctaagcagttccatgcatcaggatgacctcgtcaatcacactgtcgacgctgtcgagctggaacccagtcacagccagaccctgagccaaagcttgctccttgacattacccctgagattaaccctctaccaaagattgaggtgtccgagtcagttgagtacgaggccgggcatattccctcccctgtcataccccaggaaagcagcgtagaaatcgacaatgaaacggaacagaagagcgagtcattctcgagtatagagaaacccagcattacttacgaaactaataaagtaaacgagctgatggataacattattaaggaagacgtgaatagcatgcagatatttaccaaactgtcggagactatagttcctcctatcaacactgccaccgtgcctgataacgaggacggtgaggctaaaatgaacatagccgacacagctaaacaaacactgatctctgtcgttgactctagtagcctgccagaggttaaggaagaggaacagagtccggaggatgccctcttgcgaggacttcagcggactgctactgatttctacgccgagcttcagaatagcactgacttgggatacgccaacggaaaccttgtgcacggaagcaaccaaaaggagtcagttttcatgcggctcaacaatcgaataaaagcgctggaggtcaacatgtccttgagcggaaggtatcttgaggagctttctcagcggtacaggaagcagatggaagagatgcagaaggcatttaacaagaccatcgtgaagttgcaaaatacgtcccgaattgcagaagaacaagaccagcgccagaccgaggcaattcagctgctccaggctcagctcacaaacatgacacaacttgtaagtaacctctctgcaacagtagccgagctgaagagggaagtttctgacagacagtcatatttggtcatcagtcttgtgctgtgtgtggtgctggggttgatgctatgcatgcagcggtgtcgaaatacttcgcaatttgatggggattatatcagcaagctgcctaagtccaaccaatatccctctccaaaacgatgctttagctcttacgacgatatgaacctcaagcgcagaacttcatttcccctgatgcgttctaaatctctccagctcaccggcaaagaagtcgatcccaacgatctgtatatcgtcgagcccctcaagttcagtcccgagaagaagaagaagagatgcaagtataagattgaaaagatcgaaacaattaagcctgaggagcccctccacccgatcgcgaacggtgacatcaagggaagaaagccttttacaaatcaacgggatttctctaatatgggcgaagtataccactcttcatataaaggtcctccaagcgagggttccagcgagacatcttctcagagtgaagagtcttatttctgcggaatatctgcctgcacaagtctgtgcaacggtcagagccagaagaccaaaaccgaaaagcgcgctctcaagaggcggcggtctaaagtccaggaccaaggcaagctgatcaagaccctcattcagaccaaatctggtagcctgccctctctccatgacataatcaagggtaacaaggagattaccgtcgggactttcggggttacagccgtcagcgggcacatctag

SEQ ID NO: 178924 - DNA, 3765 bp, Artificial Sequence
  derived and/or modified sequence
atgaagaagcacagaagagccctggccctggtgtcctgcctcttcctgtgcagcctggtgtggctgcccagctggagggtgtgctgcaaggagagcagcagcgccagcgccagcagctactacagccaggatgacaactgtgccctggagaatgaagatgtgcagttccagaagaaggatgagcgggagggccccatcaatgctgagagcctgggcaagagcggcagcaacctgcccatcagccccaaggagcacaagctgaaggatgacagcatcgtggatgtgcagaacacagagagcaagaagctgagcccccctgtggtggagaccctgcccaccgtggacctgcacgaggagagcagcaatgctgtggtggacagcgagaccgtggagaacatcagcagcagcagcaccagcgagatcacccccatcagcaagctggatgaaattgagaagagcggcaccatccccatcgccaagcccagcgagacagagcagagcgagacagactgtgatgtgggggaggccctggatgccagcgcccccatcgagcagcccagctttgtgtccccaccagacagcctggtgggccagcacattgaaaatgtgagcagcagccacggcaagggcaagatcaccaagtcagaatttgagagcaaggtgtctgccagcgagcagggcggcggggaccccaagagcgccctgaatgccagtgacaacctgaagaatgaaagcagtgactacaccaagccaggggacatcgaccccacctctgtggccagccccaaggaccctgaggacatccccacctttgatgagtggaagaagaaggtgatggaggtggagaaggagaagagccagagcatgcacgccagcagcaatggaggcagccacgccaccaagaaggtgcagaagaacagaaacaactatgcctctgtggagtgtggggccaagatcctggccgccaaccctgaggccaagagcaccagcgccatcctgattgagaacatggacctgtacatgctgaacccctgcagcaccaagatctggtttgtgattgagctgtgtgagcccatccaggtgaagcagctggacatcgccaactatgagctgttcagcagcacccccaaggacttcctggtgtccatcagtgaccgctaccccaccaacaagtggatcaagctgggcaccttccacggcagagatgaaagaaatgtgcagagcttccccctggatgagcagatgtatgccaagtatgtgaagatgttcatcaagtacatcaaggtggagctgctgagccactttggaagtgagcacttctgccccctgagcctcatccgggtgtttggcacctccatggtggaggagtatgaggagattgctgacagccagtaccacagcgagcggcaggagctgtttgatgaagattatgactaccccctggactacaacacaggagaggacaagagcagcaagaacctgctgggcagcgccaccaatgccatcctgaacatggtgaacattgctgccaacatcctgggcgccaagacagaggacctgacagagggcaacaagagcatcagtgaaaatgccacagccacagctgcccccaagatgcctgagagcacccctgtgtccacccctgtgcccagcccagaatatgtgaccacagaggtgcacacccatgacatggagcccagcaccccagacacccccaaggagagccccatcgtgcagctggtgcaggaggaggaggaggaggccagccccagcacagtgaccctgctgggcagcggggagcaggaggatgagagcagcccctggtttgaaagtgagacccagatcttctgcagcgagctgaccaccatctgctgcatcagcagcttcagcgagtacatctacaagtggtgcagcgtgcgggtggccctgtaccggcagaggagcaggacagccctgagcaagggcaaggactacctggtgctggcccagccccccctgctgctgcctgctgagagcgtggatgtgtctgtgctgcagcccctgagcggggagctggagaacaccaacatcgagcgggaggccgagaccgtggtgctgggggacctgagcagctccatgcaccaggatgacctggtgaaccacacagtggatgctgtggagctggagcccagccacagccagaccctgagccagagcctgctgctggacatcaccccagagatcaaccccctgcccaagattgaggtgtctgagagcgtggagtatgaagctggccacatccccagccctgtgatcccccaggagagctctgtggagattgacaatgaaacagagcagaagtctgagagcttcagcagcattgagaagcccagcatcacctatgagaccaacaaggtgaatgagctgatggacaacatcatcaaggaggatgtgaacagcatgcagatcttcaccaagctgtctgagaccatcgtgccccccatcaacacagccaccgtgcctgacaatgaagatggagaggccaagatgaacattgctgacacagccaagcagaccctcatctctgtggtggacagcagcagcctgcctgaggtgaaggaggaggagcagagcccagaagatgccctgctgcggggcctgcagaggacagccacagacttctatgcagagctgcagaacagcacagacctgggctacgccaatggaaacctggtgcacggcagcaaccagaaggagagcgtcttcatgaggctgaacaaccgcatcaaggccctggaggtgaacatgagcctgagcggccgctacctggaggagctgagccagcgctacaggaagcagatggaggagatgcagaaggccttcaacaagaccatcgtgaagctgcagaacaccagcagaattgctgaggagcaggaccagaggcagacagaggccatccagctgctgcaggcccagctgaccaacatgacccagctggtgagcaacctgagcgccaccgtggccgagctgaagcgggaggtgtctgaccggcagagctacctggtgatcagcctggtgctgtgtgtggtgctgggcctgatgctgtgcatgcagcgctgcaggaacaccagccagtttgatggagactacatcagcaagctgcccaagagcaaccagtaccccagccccaagcgctgcttcagcagctatgatgacatgaacctgaagaggaggaccagcttccccctgatgaggagcaagagcctgcagctgaccgggaaggaggtggaccccaatgacctgtacatcgtggagcccctgaagttcagccctgagaagaagaagaagcgctgcaagtacaagattgagaagattgagaccatcaagccagaggagcccctgcaccccatcgccaacggggacatcaagggcaggaagcccttcaccaaccagagggacttcagcaacatgggagaggtgtaccacagcagctacaagggccccccatctgagggcagcagcgagaccagcagccagagcgaggagagctacttctgtggcatcagcgcctgcaccagcctgtgcaatggccagagccagaagaccaagacagagaagagggccctgaagagaagaagaagcaaggtgcaggaccagggcaagctgatcaagaccctcatccagaccaagagcggcagcctgcccagcctgcatgacatcatcaagggcaacaaggagatcaccgtgggcacctttggagtgacagctgtgtctggccacatctag

SEQ ID NO: 178925 - DNA, 3765 bp, Artificial Sequence
  derived and/or modified sequence
atgaagaagcaccggcgggccctggccctggtgagctgcctgttcctgtgtagtcttgtgtggctgccatcttggagggtgtgctgtaaggaatcgagctctgccagcgccagttcttactatagccaggatgacaactgcgccttagagaatgaagacgtccagttccagaaaaaggatgaacgagagggacctattaatgcagagagtctcgggaaaagtggcagcaacctcccgatttctcctaaagagcataaactcaaggatgattcaattgtcgatgtccagaataccgagagcaagaagctgagtccccccgttgtagagaccttacctacagtggatctgcacgaagaatcaagcaacgcagtcgtcgacagcgagacagtcgagaacatctccagttcatcaacatccgaaattacccctatttccaaactggacgaaatcgagaaatcggggacaatcccaatagctaaaccgtcggagaccgagcagagcgagacggactgtgatgtcggtgaagcattggatgctagtgccccgatcgaacaaccaagcttcgtgagtccccctgacagcctcgtcggtcaacacatagaaaatgtgagttcttctcacggcaagggtaagatcacgaagagcgagttcgaaagcaaagtgagtgcctccgagcagggcgggggcgatcccaagagcgctctgaatgccagtgataatcttaagaacgagtcgtccgattacacgaagcccggcgatatcgacccaacctctgtggcctcgcctaaagaccccgaggacatacccactttcgatgaatggaagaaaaaagtgatggaggtagagaaggagaagtcacagtctatgcatgcgtcatcaaacggggggagtcacgccaccaagaaggttcagaaaaacagaaataactacgcctccgtggagtgcggggcaaaaatcctagcagctaaccctgaggctaaaagtacatctgccatcttaatcgaaaacatggacctatacatgctgaacccatgcagcaccaaaatatggtttgtcattgaactttgcgagcctatccaggtgaagcagctcgatattgcaaactacgaattgtttagcagcacccctaaggactttctcgtgagcatcagtgaccgctacccaacaaataagtggatcaagctgggcacctttcacggccgggacgagagaaacgttcagtcttttccattggatgagcagatgtatgccaagtatgtcaagatgtttatcaagtatatcaaagtggagctgctatctcacttcggtagcgaacatttctgcccgctcagccttattcgcgttttcgggaccagcatggtcgaggaatatgaggaaatcgccgatagtcagtatcactccgagaggcaggagttgttcgatgaggattacgactacccactagactacaatactggagaagacaagagctcaaagaatctgctgggcagtgccacaaatgcgatcctcaacatggtcaacatcgcagcgaatattctaggagccaagacggaggacctgacagaaggtaacaaaagcatctccgaaaacgccacagccaccgccgcaccgaagatgccagagagtacaccagtgagcacccctgttccgtcccctgaatacgtgacaactgaggtccatacacatgatatggaaccttcaacccccgacactcctaaagagagccccatcgtgcagctggtccaagaggaggaagaagaggccagcccttcaacagtaacattactgggatccggggaacaagaggatgaatcctcgccatggtttgagagtgagacacagatattttgttccgaactaacaacaatctgttgcatcagctctttcagtgaatacatctataaatggtgcagcgtgagggtagcactctatagacagagaagtcggacggcattgagcaaaggcaaggactaccttgttctggcccagccgccactcctcttaccagcagagtcggtggacgtctccgtgctccagcctctaagcggagaactcgagaataccaacatcgagagggaagcagagacagtggttttaggggacttgtctagtagcatgcaccaggatgatttagtcaaccacacagtagatgcggtcgagcttgaacctagccacagccagaccttgtcacagtccctgctgctggacattacccccgagatcaatcccctgcctaaaattgaggttagcgaaagcgtcgagtatgaagcaggccacattcctagccctgtaatcccccaggagagttccgtggagattgacaatgaaactgaacaaaagtctgagagcttctcttctattgagaagccttctataacttacgagaccaacaaggtgaacgaacttatggataatattataaaggaggatgtcaattcaatgcaaatttttacaaagttgtccgaaacaatcgtcccccctattaacaccgccaccgtaccagacaatgaggatggggaggcaaaaatgaacatcgcagacaccgccaaacagactctcatctctgtcgtggactcctcctcgctgccggaagttaaggaggaagaacagtccccggaagatgccttattacgcggtctgcagcgtaccgccactgacttttacgccgaactgcaaaattctacagacttggggtacgcaaatggcaatctggttcacgggtcaaatcagaaagaaagtgtgttcatgaggttaaacaaccgcataaaggcacttgaggtgaatatgagcctttcaggaaggtacctggaggagctgagtcagagatatcgaaagcagatggaagaaatgcagaaagcttttaataaaaccattgtgaagcttcaaaacacttccagaattgccgaagagcaggaccagcggcagaccgaggcaattcagctgttacaggcccagctgacgaatatgacacagcttgtgagtaatctgtctgcaacagtggcggaactgaaacgagaggtcagcgatcgacagtcatatcttgttattagcctagtgctgtgtgtagtgctgggcctgatgttatgtatgcagagatgccgaaatacaagccaatttgacggagattatatctcaaaactgcctaagtctaaccaatatccttcacctaaacggtgcttttctagctacgacgatatgaatctcaaacgccggacaagttttccattgatgcgaagtaagtccctgcagttgacaggcaaggaggtggatcccaatgatctctacatcgtagagcccctgaaatttagtccggagaagaaaaagaaacgatgcaaatacaaaatcgaaaagatcgagacgatcaagcccgaggaacctctgcaccctatcgccaatggggacatcaagggccgcaagccctttactaatcagagggacttctccaacatgggtgaggtataccattcatcatataagggacctcctagcgagggaagctccgaaaccagctctcagagcgaggagagctacttctgtggaatttccgcctgtaccagcctgtgcaatggtcaaagtcagaaaacgaaaactgaaaagagagccttgaaaagaaggaggagtaaggtacaggaccaggggaagttgataaaaaccttaattcagaccaaatccggtagtctgcccagcctgcatgacattattaaagggaacaaagagattaccgtcggcacatttggggtgactgcagtgtccggccacatttag

SEQ ID NO: 178926 - DNA, 3765 bp, Artificial Sequence
  derived and/or modified sequence
atgaaaaaacatagaagagcgcttgcgctggtttcttgcttatttctgtgttcactcgtgtggctgccctcttggcgcgtttgctgtaaagagtcctcctccgcaagcgcctcgtcctactattctcaggacgacaattgcgccttggagaatgaggacgtccagttccagaaaaaggacgagagagaaggacctattaacgctgagtctctgggaaagtcagggtccaatctacctatctcccccaaggaacacaagttgaaagatgactccatcgttgatgtgcagaacacagagagcaagaaactgtccccccctgttgtggaaaccttgcctactgtggacctgcacgaagagtcatcaaatgcagtagtggattcagagactgtggagaatattagcagctcttctacctctgaaattacacctatttctaagttggacgagatcgaaaagtcaggcactattcccatcgcaaaaccatctgaaaccgagcagtcagaaactgattgtgacgtgggggaagccctggatgcgtcagctccgatcgagcagccctcttttgtgagtcctcccgattctctcgtgggccaacacatcgaaaacgtctcatcttcccacggcaagggaaaaattaccaaaagcgagttcgagagtaaggtctcagcctcagagcagggagggggagacccgaaatccgccctgaatgccagcgataatctcaagaacgagtcatctgactacactaagccaggcgacatcgatcccacatccgtggcaagtcccaaggatcccgaagatatccccacattcgacgagtggaagaaaaaagttatggaagtagaaaaggaaaagagtcagagtatgcacgcctcctctaacgggggaagtcatgcaactaagaaagtgcagaagaatcgaaacaattacgccagcgttgagtgtggagcaaagatactggccgctaatccggaagccaagtctacaagcgccatattaatagagaacatggacctctacatgcttaacccctgttcgaccaaaatttggttcgtaattgagctttgtgagccaatccaagttaagcagttggacattgcaaattatgagctcttcagctctacccctaaagacttcctggtttcgatttctgacaggtatccaacaaacaagtggatcaaactgggaacttttcatggcagggacgagcgcaatgtgcaaagcttcccacttgacgaacagatgtatgccaagtatgtgaaaatgttcataaaatacattaaagtggagttgctgagccacttcggcagcgagcacttttgcccgctgtctctgatccgcgtgttcgggacctccatggtcgaagaatatgaagagatcgccgatagccagtatcacagcgagcgccaggaactcttcgacgaggactatgattaccccctggactacaacaccggtgaagataagtcttctaaaaatctcctaggaagcgccacaaacgcaatcctgaacatggtgaacatcgcagctaacatattgggagcaaagactgaagatcttaccgaaggtaataagtcgatctccgaaaacgccaccgccaccgcagccccaaagatgcccgaatccactcccgtatccacaccagtgccgtcacccgagtacgtcactacagaagtgcatactcacgacatggagccgtctacacccgatactccgaaggagtcaccaatcgtccagctggttcaggaagaggaagaggaggcgagcccgagcaccgtgaccctgctgggttccggagagcaagaggatgagtcaagcccatggttcgagtccgaaacacaaattttctgcagcgaactgaccacaatctgctgtatctcgagcttctctgaatatatttacaagtggtgcagcgttcgcgttgcactctatagacagaggagtcgtactgcactgagcaaaggaaaagactacctcgtcctcgcacagcctcctctcctgttgcctgccgaatcagtagatgtgagtgttctgcaacccctgtcaggcgagctcgaaaataccaacatcgagcgcgaggccgaaactgtcgtcctgggggatttgtcgtcatccatgcatcaggacgacctggtgaatcacacggtggacgccgtggaactcgagccaagccacagccagaccctttctcaatctctcttgctcgatataacacccgagattaaccccttacctaagatagaagtgagcgagagtgtagagtacgaagctggacatattccttctcctgtcattcctcaggagagtagtgtagaaatcgataacgaaaccgagcagaagagcgaatctttttcttccatagagaagcctagcatcacatatgagacaaataaggtgaatgaactcatggacaatatcattaaagaggacgtcaactctatgcaaatcttcactaaacttagtgagaccatagtcccccctataaatactgcaactgttcctgacaatgaggacggtgaagcgaaaatgaatattgctgatacagcaaaacagacgttgataagcgttgtggactcctcaagcttgccagaggtgaaagaggaagagcagagtccagaggatgccctgctccggggtcttcagaggacggccaccgatttctacgcggagctccagaattccacagacttaggttatgcaaatggaaacctggttcacggttccaaccaaaaggaaagcgtatttatgaggctgaacaatcgtattaaggcattggaggtgaatatgtcattaagtggcaggtatcttgaagaactgagccaaaggtatcgtaaacagatggaagaaatgcaaaaagcgtttaataagactattgttaaactgcagaacacctcaagaattgccgaagagcaggatcagcgccagaccgaagccatccaactgctacaggcccagcttacaaatatgacccagttggtttcaaacctttccgccaccgttgccgaactgaagagagaggtctccgatcggcagtcgtacttggttatcagcctcgtcttgtgcgttgtcttaggcctcatgctctgtatgcagcgatgccggaataccagccagttcgatggtgactatataagcaagctccccaagtcgaatcaataccccagcccgaagcggtgcttttcttcctacgacgacatgaatctcaagcgaagaacttctttccccctcatgcggtctaagtccttgcagttgacaggtaaggaggtagatccaaacgacctttacatcgtcgagcctctgaagtttagtcccgagaaaaaaaagaaacgctgcaagtacaaaatcgagaagattgaaactattaagcctgaggaaccacttcaccccattgcaaatggggacattaaagggaggaagccattcacaaaccagagggacttctctaacatgggggaggtttaccactcgtcctacaagggtcctccctctgaaggatcttctgaaacaagcagccagagcgaggaatcctacttctgtggcatcagtgcatgcacgtcactgtgtaatgggcagtcgcagaaaaccaaaactgagaagcgcgctctgaagcggagaagatcgaaagttcaagaccagggcaagctaattaaaaccctgatccagacgaaatcaggatctctgccctcacttcatgatatcatcaagggtaataaggagatcactgtgggtacctttggcgtaaccgcagtgagcggacatatctag

SEQ ID NO: 178927 - protein, 200 aa, Artificial Sequence
  derived and/or modified sequence
MAMEMRLPVARKPLSERLGRDTKKHLVVPGDTITTDTGFMRGHGTYMGEEKLIASVAGSVERVNKLICVKALKTRYIGEVGDIVVGRITEVQQKRWKVETNSRLDSVLLLSSMNLPGGELRRRSAEDELAMRGFLQEGDLISAEVQAVFSDGAVSLHTRSLKYGKTHFHDLPCGASVILGNNGFIWIYPTPEHKEEEAGG

SEQ ID NO: 178928 - protein, 285 aa, Artificial Sequence
  derived and/or modified sequence
MAMEMRLPVARKPLSERLGRDTKKHLVVPGDTITTDTGFMRGHGTYMGEEKLIASVAGSVERVNKLICVKALKTRYIGEVGDIVVGRITEVQQKRWKVETNSRLDSVLLLSSMNLPGGELRRRSAEDELAMRGFLQEGDLISAEVQAVFSDGAVSLHTRSLKYGKVSPSLVKRQKTHFHDLPCGASVILGNNGFIWIYPTPEHKEEEAGGFIANLEPVSLADREVISRLRNCIISLVTQRMMLYDTSILYCYEASLPHQIKDILKPEIMEEIVMETRQRLLEQEG

SEQ ID NO: 178929 - protein, 293 aa, Artificial Sequence
  derived and/or modified sequence
MAMEMRLPVARKPLSERLGRDTKKHLVVPGDTITTDTGFMRGHGTYMGEEKLIASVAGSVERVNKLICVKALKTRYIGEVGDIVVGRITEVQQKRWKVETNSRLDSVLLLSSMNLPGGELRRRSAEDELAMRGFLQEGDLISAEVQAVFSDGAVSLHTRSLKYGKLGQGVLVQVSPSLVKRQKTHFHDLPCGASVILGNNGFIWIYPTPEHKEEEAGGFIANLEPVSLADREVISRLRNCIISLVTQRMMLYDTSILYCYEASLPHQIKDILKPEIMEEIVMETRQRLLEQEG

SEQ ID NO: 178930 - DNA, 603 bp, Artificial Sequence
  derived and/or modified sequence
atggccatggagatgagactgcccgtggccagaaagcccctgagcgagagactgggcagagacaccaagaagcacctggtggtgcccggcgacaccatcaccaccgacaccggcttcatgagaggccacggcacctacatgggcgaggagaagctgatcgccagcgtggccggcagcgtggagagagtgaacaagctgatctgcgtgaaggccctgaagaccagatacatcggcgaggtgggcgacatcgtggtgggcagaatcaccgaggtgcagcagaagagatggaaggtggagaccaacagcagactggacagcgtgctgctgctgagcagcatgaacctgcccggcggcgagctgagaagaagaagcgccgaggacgagctggccatgagaggcttcctgcaggagggcgacctgatcagcgccgaggtgcaggccgtgttcagcgacggcgccgtgagcctgcacaccagaagcctgaagtacggcaagacccacttccacgacctgccctgcggcgccagcgtgatcctgggcaacaacggcttcatctggatctaccccacccccgagcacaaggaggaggaggccggcggctag

SEQ ID NO: 178931 - DNA, 858 bp, Artificial Sequence
  derived and/or modified sequence
atggccatggagatgagactgcccgtggccagaaagcccctgagcgagagactgggcagagacaccaagaagcacctggtggtgcccggcgacaccatcaccaccgacaccggcttcatgagaggccacggcacctacatgggcgaggagaagctgatcgccagcgtggccggcagcgtggagagagtgaacaagctgatctgcgtgaaggccctgaagaccagatacatcggcgaggtgggcgacatcgtggtgggcagaatcaccgaggtgcagcagaagagatggaaggtggagaccaacagcagactggacagcgtgctgctgctgagcagcatgaacctgcccggcggcgagctgagaagaagaagcgccgaggacgagctggccatgagaggcttcctgcaggagggcgacctgatcagcgccgaggtgcaggccgtgttcagcgacggcgccgtgagcctgcacaccagaagcctgaagtacggcaaggtgagccccagcctggtgaagagacagaagacccacttccacgacctgccctgcggcgccagcgtgatcctgggcaacaacggcttcatctggatctaccccacccccgagcacaaggaggaggaggccggcggcttcatcgccaacctggagcccgtgagcctggccgacagagaggtgatcagcagactgagaaactgcatcatcagcctggtgacccagagaatgatgctgtacgacaccagcatcctgtactgctacgaggccagcctgccccaccagatcaaggacatcctgaagcccgagatcatggaggagatcgtgatggagaccagacagagactgctggagcaggagggctag

SEQ ID NO: 178932 - DNA, 882 bp, Artificial Sequence
  derived and/or modified sequence
atggccatggagatgagactgcccgtggccagaaagcccctgagcgagagactgggcagagacaccaagaagcacctggtggtgcccggcgacaccatcaccaccgacaccggcttcatgagaggccacggcacctacatgggcgaggagaagctgatcgccagcgtggccggcagcgtggagagagtgaacaagctgatctgcgtgaaggccctgaagaccagatacatcggcgaggtgggcgacatcgtggtgggcagaatcaccgaggtgcagcagaagagatggaaggtggagaccaacagcagactggacagcgtgctgctgctgagcagcatgaacctgcccggcggcgagctgagaagaagaagcgccgaggacgagctggccatgagaggcttcctgcaggagggcgacctgatcagcgccgaggtgcaggccgtgttcagcgacggcgccgtgagcctgcacaccagaagcctgaagtacggcaagctgggccagggcgtgctggtgcaggtgagccccagcctggtgaagagacagaagacccacttccacgacctgccctgcggcgccagcgtgatcctgggcaacaacggcttcatctggatctaccccacccccgagcacaaggaggaggaggccggcggcttcatcgccaacctggagcccgtgagcctggccgacagagaggtgatcagcagactgagaaactgcatcatcagcctggtgacccagagaatgatgctgtacgacaccagcatcctgtactgctacgaggccagcctgccccaccagatcaaggacatcctgaagcccgagatcatggaggagatcgtgatggagaccagacagagactgctggagcaggagggctag

SEQ ID NO: 178933 - DNA, 603 bp, Artificial Sequence
  derived and/or modified sequence
atggcgatggagatgagactgccagtcgcacgcaaacccctgagtgaacggctgggaagggacaccaagaagcacttagtcgtccctggcgatacaattactaccgacactgggttcatgcgaggccacgggacttacatgggagaagagaaacttatcgctagcgtggccggatcggttgaacgtgtgaacaaactgatttgcgttaaggccctcaaaacccgatacataggtgaggtcggagatatcgtcgtgggccggataactgaagtacaacagaagagatggaaggtggaaaccaacagtcggttggatagtgtactgttgctgagtagcatgaatttacctggcggtgaactgcgccgccggtcagccgaggacgaactggctatgcgaggcttcctgcaggagggggatttgatcagtgcggaggtgcaggcagttttctctgacggtgctgtttctctacataccagaagtctgaagtacggtaagactcacttccatgaccttccatgtggcgccagcgtcatcttgggcaataatgggtttatttggatataccctactcccgaacataaagaggaagaggccgggggctag

SEQ ID NO: 178934 - DNA, 858 bp, Artificial Sequence
  derived and/or modified sequence
atggccatggagatgcgtctcccagtcgctagaaagccattatccgagcgattgggccgggacacaaagaagcatttagtcgtacccggtgacaccattaccacggacactgggttcatgcgcggccacggaacttatatgggcgaggaaaaactaattgcctctgtggccggctctgtggagagagttaacaaactgatctgtgttaaagcactcaagactcgttacataggcgaggtcggcgatatcgttgtgggtcgcatcacggaggtgcaacagaaacgttggaaggtggaaactaacagcaggcttgattcggtgcttctgctgagttctatgaatttgccaggtggggaattacgcaggcgcagtgcagaagatgaactggcaatgcgcggatttttacaagagggggatctaatttcagccgaagttcaggccgtattctctgatggcgcggtatctttacacacacgatctttgaaatacgggaaagtgagtccaagcctggtaaaaagacagaagactcacttccatgacctaccctgcggagctagcgtgattctcgggaataatggatttatctggatctatccaaccccggaacataaagaagaagaagctggcggtttcatcgccaacctggaacccgtgagcctggctgatcgggaagtgatttctaggctgaggaactgcattatttctcttgtcactcagcgcatgatgctttatgacacatctattctctactgttatgaagccagtcttcctcaccagataaaagacattctcaagccagagatcatggaagaaattgtcatggaaacaaggcaacgacttctcgagcaggaaggatag

SEQ ID NO: 178935 - DNA, 882 bp, Artificial Sequence
  derived and/or modified sequence
atggcaatggaaatgaggctgcccgtagctaggaaaccactcagtgaacggttgggccgcgacacaaaaaaacatctcgtggttcccggcgacaccatcacaacggacacaggttttatgagaggacacggcacgtatatgggggaggaaaagctgattgcctctgtggccggttcggtcgaaagagtgaacaagctgatatgcgtcaaggctctaaaaacaaggtatatcggagaggttggcgacatcgtggttggacgcattacagaggtgcagcagaagcgctggaaggtcgagactaattcgcgtctcgacagcgtgctcttgcttagctccatgaatctgccagggggggagctgcgtcgccgtagcgcagaagatgaactcgctatgaggggcttcctgcaggagggggacctgatctctgccgaagtgcaggccgttttctccgatggcgccgtttcgctgcatactagaagcctgaagtatggaaagcttggacagggcgttttggtgcaggtctcaccgtccctggtaaaacggcagaaaacgcatttccacgacctgccctgcggcgcttctgtgatcctcgggaacaacggcttcatctggatctaccctacccctgaacacaaggaggaggaagcaggggggtttatcgcaaatttggaaccagtttccttggcagacagggaagtgatctcccgtctccgtaactgtatcatctccctggtgacccagcgcatgatgctgtacgacacgtcaattctgtactgttatgaagcctcacttccgcatcagattaaagacatccttaagcccgaaataatggaagagatcgttatggaaactcgacaacgcttgcttgagcaggagggttag

SEQ ID NO: 178936 - DNA, 607 bp, Artificial Sequence
  derived and/or modified sequence
ccaagatggcgatggagatgaggcttccagtggctcgcaagcctcttagcgagagactgggccgcgacactaagaaacatctagtggtgccgggggatacaatcactacggacacaggattcatgcggggccatggaacgtatatgggagaagagaagctcattgcatctgttgctggctctgtggagagagtaaacaagttgatctgtgtgaaagctttgaaaaccagatacattggtgaagtaggagacatcgtagtgggacgaatcacagaggttcaacagaagaggtggaaggtggagaccaactccaggctggattcggtcttgctgctctcgtccatgaaccttcctggaggagagctgaggagaagatctgcagaagatgagcttgcaatgagaggtttcttacaggaaggggaccttatcagtgctgaggtccaggcagtgttctctgacggagctgtctctttgcacacgaggagcctgaaatatggaaaaacccactttcatgatttgccatgtggtgcctcagtgattctcggtaacaacggcttcatctggatttacccaacacctgagcacaaagaagaggaagcagggggctt

SEQ ID NO: 178937 - DNA, 1957 bp, Artificial Sequence
  derived and/or modified sequence
attggcgccaagatggcgatggagatgaggcttccagtggctcgcaagcctcttagcgagagactgggccgcgacactaagaaacatctagtggtgccgggggatacaatcactacggacacaggattcatgcggggccatggaacgtatatgggagaagagaagctcattgcatctgttgctggctctgtggagagagtaaacaagttgatctgtgtgaaagctttgaaaaccagatacattggtgaagtaggagacatcgtagtgggacgaatcacagaggttcaacagaagaggtggaaggtggagaccaactccaggctggattcggtcttgctgctctcgtccatgaaccttcctggaggagagctgaggagaagatctgcagaagatgagcttgcaatgagaggtttcttacaggaaggggaccttatcagtgctgaggtccaggcagtgttctctgacggagctgtctctttgcacacgaggagcctgaaatatggaaaagtttccccctccctggtgaaacggcagaagacccactttcatgatttgccatgtggtgcctcagtgattctcggtaacaacggcttcatctggatttacccaacacctgagcacaaagaagaggaagcagggggcttcattgcaaacctggagcctgtctctcttgctgatcgagaggtgatatcccggcttcggaactgcatcatctcgctggtaactcagaggatgatgctgtatgataccagcatcctgtactgctatgaagcatcccttccacatcagatcaaagacatcttaaagccagaaataatggaggagattgtgatggaaacacgccagaggcttttggaacaggagggataaggaggtgctccagaagcacgggactgtggaccttgcaggagtgaagactgtgatgtgtggtccccatatgtggctcagcaaagactcgagagatcatccctttgtctgcattgacggccctgtgacggcctccagcccacaggcctgctttctcctgtcctaacaccaagcctgggtggcagatgaacagtgcttccttgggttgccagctgagtcccggtattagggaatagtttcagctctttcaaagtgcacagtgttacagtcgaatgggctcccatcctggaataatatggagaatcctttgtcttccactcactgtcattcacaaggcacagtgccccatgaaattgccccaatagaaaacatggcatccctgacctccaaatggtctgttttggcctccattcctatatcctttaaatgactgagaatgcagctggtaaagttggaagaataaagttaaccaagcaggccaggcacggtggctcacgcctataatcccagcacttagggaggccaaggcgggcagatcacctgaggtcaatagttcgagaccagcctggccaacaaggtgaaaccccatctctactaaaaatacaaaaaattagccaggtgtggtggtgtgcacctgtagtcccagctatttgggaggctgaggtgggagaatcacttgaacctgggaggcggaggttgcagtgagctgaaatcgcgtaccacactccagcctgggtgacagagcgagactgtgtttcaaagaaaaaaaaaaacaagcagccttttgcttggttggaatctgattttctgttgcgtgttccttgtagccatagatgtgattatgtccacaccgggctgccttaatctgtcctgcttggagagtgacttgtaagatgctgaattattcatgataatacagtgaatgttctgggtccatgtactcagataaacatgaagaaaataagcaaagaaaaatggagactgggaaagcaaagctgttttcatcctataattgaagtagtgtggagcattaacttgtggatgattcagagttaaaagataaaaagacgccagagttctcgctgaagaa

SEQ ID NO: 178938 - DNA, 2040 bp, Artificial Sequence
  derived and/or modified sequence
ggcctggagttgtggagtcggatatcgcagctcccgactgagctgcgcctgcgcaactcattggcgccaagatggcgatggagatgaggcttccagtggctcgcaagcctcttagcgagagactgggccgcgacactaagaaacatctagtggtgccgggggatacaatcactacggacacaggattcatgcggggccatggaacgtatatgggagaagagaagctcattgcatctgttgctggctctgtggagagagtaaacaagttgatctgtgtgaaagctttgaaaaccagatacattggtgaagtaggagacatcgtagtgggacgaatcacagaggttcaacagaagaggtggaaggtggagaccaactccaggctggattcggtcttgctgctctcgtccatgaaccttcctggaggagagctgaggagaagatctgcagaagatgagcttgcaatgagaggtttcttacaggaaggggaccttatcagtgctgaggtccaggcagtgttctctgacggagctgtctctttgcacacgaggagcctgaaatatggaaaactaggtcagggggttttggtccaggtttccccctccctggtgaaacggcagaagacccactttcatgatttgccatgtggtgcctcagtgattctcggtaacaacggcttcatctggatttacccaacacctgagcacaaagaagaggaagcagggggcttcattgcaaacctggagcctgtctctcttgctgatcgagaggtgatatcccggcttcggaactgcatcatctcgctggtaactcagaggatgatgctgtatgataccagcatcctgtactgctatgaagcatcccttccacatcagatcaaagacatcttaaagccagaaataatggaggagattgtgatggaaacacgccagaggcttttggaacaggagggataaggaggtgctccagaagcacgggactgtggaccttgcaggagtgaagactgtgatgtgtggtccccatatgtggctcagcaaagactcgagagatcatccctttgtctgcattgacggccctgtgacggcctccagcccacaggcctgctttctcctgtcctaacaccaagcctgggtggcagatgaacagtgcttccttgggttgccagctgagtcccggtattagggaatagtttcagctctttcaaagtgcacagtgttacagtcgaatgggctcccatcctggaataatatggagaatcctttgtcttccactcactgtcattcacaaggcacagtgccccatgaaattgccccaatagaaaacatggcatccctgacctccaaatggtctgttttggcctccattcctatatcctttaaatgactgagaatgcagctggtaaagttggaagaataaagttaaccaagcaggccaggcacggtggctcacgcctataatcccagcacttagggaggccaaggcgggcagatcacctgaggtcaatagttcgagaccagcctggccaacaaggtgaaaccccatctctactaaaaatacaaaaaattagccaggtgtggtggtgtgcacctgtagtcccagctatttgggaggctgaggtgggagaatcacttgaacctgggaggcggaggttgcagtgagctgaaatcgcgtaccacactccagcctgggtgacagagcgagactgtgtttcaaagaaaaaaaaaaacaagcagccttttgcttggttggaatctgattttctgttgcgtgttccttgtagccatagatgtgattatgtccacaccgggctgccttaatctgtcctgcttggagagtgacttgtaagatgctgaattattcatgataatacagtgaatgttctgggtccatgtactcagataaacatgaagaaaataagcaaagaaaaatggagactgggaaagcaaagctgttttcatcctataattgaagtagtgtggagcattaacttgtggatgattcagagttaaaagataaaaagacgccagagttctcgctgaagaa

SEQ ID NO: 178939 - DNA, 603 bp, Artificial Sequence
  derived and/or modified sequence
atggccatggagatgaggctgcctgtggccaggaagcccctgtctgagcggctgggccgggacaccaagaagcacctggtggtgcctggggacaccatcaccacagacaccggcttcatgaggggccacggcacctacatgggagaggagaagctgattgcctctgtggccggctctgtggagcgggtgaacaagctgatctgtgtgaaggccctgaagacccgctacatcggggaggtgggggacatcgtggtgggccgcatcacagaggtgcagcagaagcgctggaaggtggagaccaacagccggctggacagcgtgctgctgctgagctccatgaacctgcccggcggggagctgcggcggcgctctgcagaagatgagctggccatgaggggcttcctgcaggagggggacctgatctctgctgaggtgcaggccgtgttcagtgatggagctgtgtccctgcacaccaggagcctgaagtatggcaagacccacttccatgacctgccctgtggggccagcgtcatcctgggcaacaacggcttcatctggatctaccccaccccagagcacaaggaggaggaggccggcggctag

SEQ ID NO: 178940 - DNA, 858 bp, Artificial Sequence
  derived and/or modified sequence
atggccatggagatgaggctgcctgtggccaggaagcccctgtctgagcggctgggccgggacaccaagaagcacctggtggtgcctggggacaccatcaccacagacaccggcttcatgaggggccacggcacctacatgggagaggagaagctgattgcctctgtggccggctctgtggagcgggtgaacaagctgatctgtgtgaaggccctgaagacccgctacatcggggaggtgggggacatcgtggtgggccgcatcacagaggtgcagcagaagcgctggaaggtggagaccaacagccggctggacagcgtgctgctgctgagctccatgaacctgcccggcggggagctgcggcggcgctctgcagaagatgagctggccatgaggggcttcctgcaggagggggacctgatctctgctgaggtgcaggccgtgttcagtgatggagctgtgtccctgcacaccaggagcctgaagtatggcaaggtgagccccagcctggtgaagaggcagaagacccacttccatgacctgccctgtggggccagcgtcatcctgggcaacaacggcttcatctggatctaccccaccccagagcacaaggaggaggaggccggcggcttcatcgccaacctggagcctgtgtccctggccgaccgggaggtgatcagccggctgaggaactgcatcatcagcctggtgacccagaggatgatgctgtatgacaccagcatcctgtactgctatgaggccagcctgccccaccagatcaaggacatcctgaagccagagatcatggaggagatcgtgatggagacccggcagaggctgctggagcaggagggctag

SEQ ID NO: 178941 - DNA, 882 bp, Artificial Sequence
  derived and/or modified sequence
atggccatggagatgaggctgcctgtggccaggaagcccctgtctgagcggctgggccgggacaccaagaagcacctggtggtgcctggggacaccatcaccacagacaccggcttcatgaggggccacggcacctacatgggagaggagaagctgattgcctctgtggccggctctgtggagcgggtgaacaagctgatctgtgtgaaggccctgaagacccgctacatcggggaggtgggggacatcgtggtgggccgcatcacagaggtgcagcagaagcgctggaaggtggagaccaacagccggctggacagcgtgctgctgctgagctccatgaacctgcccggcggggagctgcggcggcgctctgcagaagatgagctggccatgaggggcttcctgcaggagggggacctgatctctgctgaggtgcaggccgtgttcagtgatggagctgtgtccctgcacaccaggagcctgaagtatggcaagctgggccagggcgtgctggtgcaggtgagccccagcctggtgaagaggcagaagacccacttccatgacctgccctgtggggccagcgtcatcctgggcaacaacggcttcatctggatctaccccaccccagagcacaaggaggaggaggccggcggcttcatcgccaacctggagcctgtgtccctggccgaccgggaggtgatcagccggctgaggaactgcatcatcagcctggtgacccagaggatgatgctgtatgacaccagcatcctgtactgctatgaggccagcctgccccaccagatcaaggacatcctgaagccagagatcatggaggagatcgtgatggagacccggcagaggctgctggagcaggagggctag

SEQ ID NO: 178942 - DNA, 603 bp, Artificial Sequence
  derived and/or modified sequence
atggccatggagatgcggctgcccgtggcccggaagcccctgagcgaacgtctaggcagagatacgaagaagcacctggtcgtcccgggtgacacaatcacgaccgatactggctttatgaggggccacgggacttacatgggcgaagagaaactcatagctagtgtggctggctctgtggagagagttaataaactcatttgcgtgaaggcccttaagacccggtacatcggcgaggtgggggatattgttgtagggagaataaccgaagtgcaacagaagaggtggaaggtggaaactaattccaggctggattcagtcctcctcctaagctcaatgaacctgcctggcggggagttgagacgtagatccgccgaagatgagctggccatgcgaggattcttgcaggagggagacctcattagcgcagaagttcaggcagtcttcagtgatggtgccgtgagtctgcacacacgcagcctgaagtacggcaagacccatttccacgacttaccgtgcggggcgtcagtcattctcggcaataacggattcatctggatctaccccacacctgagcacaaggaggaagaggcgggaggatag

SEQ ID NO: 178943 - DNA, 858 bp, Artificial Sequence
  derived and/or modified sequence
atggccatggagatgcggctgcccgtggcccggaagcccctgagcgagaggttaggccgcgataccaaaaagcacttggtcgtgcctggagatacgatcaccactgataccgggttcatgcggggacacggaacttacatgggcgaggaaaaactcatcgccagtgtggctggaagcgtagaaagggtcaacaagctgatttgtgtgaaggcgctgaagaccagatatatcggtgaagtgggagatatagtggtgggcaggattaccgaggttcagcagaaacgatggaaggtcgaaactaattccagattagattctgttctcctgctgagcagcatgaatcttccaggtggtgagttgagaaggagatctgccgaggacgagctcgctatgcgtggattcctgcaggagggtgacttgatctctgccgaagtgcaagctgtgttctccgatggggcagtgagtcttcacaccaggtctctgaaatacgggaaggtgagcccatcccttgttaaacggcagaagacccatttccatgacttaccttgcggggcgtcagtgatattaggcaacaacggttttatttggatctaccccacacccgagcacaaagaggaggaggccgggggttttatcgctaacttggagcctgttagtctcgccgatagagaggtaattagtaggctccgcaattgcattatttctttggtcacacagaggatgatgctgtacgacaccagcatcctgtattgctatgaggcctcccttcctcaccagatcaaggacattctcaagcctgagattatggaggaaatcgtaatggagacccgccagcggctgttagaacaggagggatag

SEQ ID NO: 178944 - DNA, 882 bp, Artificial Sequence
  derived and/or modified sequence
atggccatggagatgcggctgcccgtggcccggaagcccctgagcgagagactggggcgagacaccaaaaagcatctagtggtcccaggagataccattacaaccgatactggtttcatgcgtggccatgggacatatatgggggaagaaaagctaattgcatcagttgcgggctccgtggagcgtgtgaacaagttgatctgtgtaaaagcactcaaaactcggtacatcggggaagtgggggatatcgtggtgggtcgcataactgaagttcagcagaagcggtggaaggtggaaacgaactctcggttagactccgtgttgttgctatccagcatgaacctacccggtggcgaactccggcgcaggtctgcggaagatgagctcgcaatgaggggcttcctccaagaaggcgacctaatcagcgcagaggttcaggcagttttcagtgatggcgccgtttccctgcataccaggtctctgaaatatggcaagctggggcagggtgtgctggtccaggtgtctccaagtctggtcaagagacagaagacacattttcatgacctgccgtgtggggcttcagtcatactgggaaataacgggtttatctggatctacccaacccctgagcataaggaagaggaggcagggggctttattgctaacctcgaaccagtgtctctcgccgatcgggaggtgatcagccggctgcgaaactgcatcattagtctcgtcactcagcgcatgatgctgtatgataccagcatactctattgctacgaagccagcttaccacatcagattaaggatatcttgaagcccgaaatcatggaggagattgttatggagacaagacagagactcctggaacaggaaggctag

SEQ ID NO: 178945 - DNA, 603 bp, Artificial Sequence
  derived and/or modified sequence
atggcaatggagatgcgcctacctgttgctagaaaacccctgagtgagagactcggtcgtgatacaaaaaagcacctggtcgtgcccggagatacaattacaactgacacaggctttatgcgaggacatggaacttacatgggtgaagaaaagctcatcgcgagcgtggccggtagcgtcgaacgggtgaacaaactcatctgcgtaaaagcgctgaagacaaggtatatcggcgaggtgggcgacatcgtggtcggcagaattactgaggtgcagcaaaagagatggaaggtcgagaccaatagtaggctcgatagtgtgctccttctatccagcatgaacctgccaggtggggaactgcgcaggcgttctgccgaggacgaactcgcgatgcgcggattcctgcaggaaggagatttgatcagcgcagaggtccaagctgtcttctctgatggggctgtgagtctgcatacacgaagcctcaagtatggtaaaactcacttccacgacctcccgtgcggagcgtcagtaatcctgggcaacaacgggtttatctggatttatccgacccctgagcacaaagaggaggaagcaggaggttag

SEQ ID NO: 178946 - DNA, 858 bp, Artificial Sequence
  derived and/or modified sequence
atggccatggaaatgcgcctccctgtggctagaaagcctctgtccgagagactcggacgcgatacaaaaaaacatctcgtcgtccctggtgatacgattaccacagacaccggctttatgaggggtcacggaacctatatgggggaagaaaagttaattgcatcagtggcaggcagtgtcgagagagtcaataaactgatttgcgtcaaagctctgaaaacacgttacatcggcgaagtcggtgacatcgtagtcgggaggataacagaggtccagcagaaacgatggaaggtggagaccaatagccggcttgattccgtgctgctcctgtcctcaatgaatctccctggcggagagctgcgacgacggtctgccgaggacgaattagccatgcggggatttctccaagagggtgatctgatctccgctgaggtgcaagcagtgttcagcgacggagccgtgtccctgcacaccagaagtctcaaatacggcaaggtgtctccatctttagtgaagaggcagaaaacacattttcatgacctaccatgcggcgcatctgtaatcctagggaataacgggttcatatggatttaccctacgcctgaacacaaggaagaagaagctggtggctttattgccaatctggagcccgtttccctggctgatagagaggtaatcagtagactgcgtaattgcatcatttccttggttactcagcgcatgatgctgtacgacacctcaatcctctactgttatgaggctagtctgccacaccaaatcaaagatattctcaagcctgagatcatggaggaaattgtcatggagacgcggcagaggctgctggagcaggaaggatag

SEQ ID NO: 178947 - DNA, 882 bp, Artificial Sequence
  derived and/or modified sequence
atggcaatggaaatgaggcttccagtggctcgaaaacctctgagtgaacgtcttggcagggataccaagaaacatctggtggttcccggagataccatcaccactgatacaggtttcatgcgaggtcacgggacttacatgggcgaagagaagctcatcgcaagcgtggcagggtctgttgaacgcgtaaataaacttatctgtgtcaaggctttgaaaacaaggtacatcggagaggtaggcgacatagtcgtaggcaggattactgaggtgcaacaaaaacgttggaaggtcgaaacaaacagtagactggattctgtgctgctcctcagctccatgaatctgccgggaggagagctgcgccgaaggagcgctgaggacgagctggccatgcggggtttcctccaggagggcgaccttatatctgcagaagtgcaggccgtgttttctgatggggcagtcagtctccacactcgatcccttaaatacggcaaactgggccagggagttcttgtacaggtttctccttcactcgtcaaaagacagaagactcacttccacgacctgccttgcggcgctagtgtgatcctgggaaacaacgggttcatatggatctacccgactcccgaacacaaggaggaggaggcaggcggattcatagcaaatctcgagccagtgtctttagcagatagagaggtcatatctcgcctgcggaattgcataatttccctagtcacacagaggatgatgctgtatgacacctccattctgtattgctacgaagcaagtctgccacatcagattaaagatatattaaaacctgagatcatggaggagatcgtcatggaaactaggcagagattgctagagcaagagggctag

SEQ ID NO: 178948 - protein, 190 aa, Artificial Sequence [sequence omitted]

SEQ ID NO: 178949 - DNA, 5009 bp, Artificial Sequence
  derived and/or modified sequence
ccggcccggcccgcccggcccagccgctcctgctgggcgccccaaccgggtccggcccgggggggcgggggccgcggccgccgaggatggggaaatccaacagcaagttgaagcccgaagttgtggaggagctgaccaggaagacctactttaccgagaaggaggtccagcagtggtacaaaggcttcatcaaggactgccccagtgggcagctggatgcggcaggcttccagaagatctacaagcaattcttcccgttcggagaccccaccaagtttgccacatttgttttcaacgtctttgatgaaaacaaggacgggcgaattgagttctccgagttcatccaggcgctgtcggtgacctcacggggaaccctggatgagaagctacggtgggccttcaagctctacgacttggacaatgatggctacatcaccaggaatgagatgctggacattgtggatgccatttaccagatggtggggaataccgtggagctcccagaggaggagaacactcctgagaagagggtggaccggatctttgccatgatggataagaatgccgacgggaagctgaccctgcaggagttccaggagggttccaaggcagacccgtccattgtgcaggcgctgtccctctacgacgggctggtatagtcccaggctggagctggatgcctgggaaccactcacctccttctgtgccatgaggccacctcagccctgacaccaaccccgtgcgtccacccagccttcttccgcatccacacacagccggctgcccttgacccgggaggccccggctctcctctcccctgtcctgcacccatcccccgcctgaagccaccggctccaattgccagcaacctctgcttgtccggaaaacgacaacacgaaatggaaaaggctacagccctctgcataaaccaaggacttggctgcctcgcaggcagcctccgttcctcccgctctcttgcgcgtgtgcttttgttttttattttgaacagacgttttaaaagaaaaaaaaacaactaccttctgtcctagaagacacagactgacagatggggtgaaggcctggggacctcagagaactctgccttgccctcgtccctcgtccttcggcagccggagaggctgtgggtgggccgagggtgtctaggggttctgcctggtcaacgttatttgtcgtcccatcttttggcagcaaaaccacctgcgtggctaggatgattaattatgaggatgatgattttttttgtgataacagtattgtgctttttgtggggaaagtgaggtttttttttatatacatatataattgatatctttaatttattggttgttaactgttgctgctgcctggtgtgtcctcagctcccagggctgcgggcccaccgtttacatgtgcacgccctgacccacctgcccacgccgacttgggaggatggtggcctgcagcggccaagaagccaaaaaaaattttttttttttcagatactgtgcttgatttttggagaggggagaggtggaaattcctaaatggctaatgcactgttccctccagcccgaatgcctcctgccaaaccccttttccctgctgcctctgtccccgcatccttgttctcccctgggtccgtaacattttttccgaggatgaacaggggacatctttaggtttctcaactcttgctttggtgtttgccgcagcatggaaaacagggcgcctaaggctgggagctggaagaaggggcattgggtacccaggcagagtcaggagaggtggtctttgaagtaagttagcagaaatcaaggggacccccgcctccttgggctggggaggggatttcaagatagttcatgactctctcccgctctgccttccctccttcctatctgctttttccagtaaactgcatggtgtccttccctggccttctcttggctcaaaggctgggagggagggaaggagagaagagttccaggcaatcccatcaatatagtccctacacctggggctgcggcccacatgtcttcacggaggcttccagcggtgcctgccactgaggcaggtgcggccccaggaccatcaccaggaatgcgaggccaccctggaccagaggtaggagcccaaggtccggcccttgctctttgattgtgggcagcctcctgccctctctgggtctcagttgccccatctgcagagcgaggaggcccgggctggttggtcttgaaggcccttttccatgccgacatcatgtcactctaggcctggggttcagtttcctgtggctggtgatgctgtggttaagtttgcttgaccccagcagcccgagggactgtctgagtcacagcacagcccctattgcgtggctgctggtgtgtggggtcagttccagcagatgaatgtgtcatgtggcacaccttgtcccttcccgcagcatttcctggttccccccagacccttgagcgctctttgggacccagaaggagtccttgcacagggaaggcttgaggtgagaagccgcttcccagactgtcagggccaggcctgggtctagaattcttgctgctgctttgcagagtcaacagcccatcagcccatgttttagaggggacactttggtcctcggttcccaccctcagcaagcaggcctccagcccgaggaaggcctctgccgtagtgacgttgccgtgtggggctgcgtggctgttccccttggctggagcattcagccaaccccagcgtcccccctgaggcgttcattggcagccccctaggactgcacgctggccccacggtaaccccccctcccccaccaacatcctgcagggatggggtcagtggttccaccttcacaggccactttgaagggtggattctttgaggcccctgccagtcggctccctgctcagctgctggcccgggcgacctgggactcagcaccaacggctgaagtttctcagctgggctctgacctggggtctggggcagggaacgaacatggtggctttgggctgagaggatgagggaggtctttcccaggtcaaattactttcctttggcctctgcctgaggctcgatttgcctctctggtccaatgggactgacactgttgtacaacctgacctgtggctgagggtgtctgggcttaagcatgtggaccccttcggtgtgtccggccttcctccatcgtcctgccctttggccttttggtttgaagccacaggtgtggcttctggccttagcagatggtatgcttgcggaccgcagcccagcatgccggtgggcccacagcccgagccagcccagagctgccggaagggccgcccttcccggccctggcggggtgctggacactggccattttcactagagtttgcctggcagggaccgatctctgccccctcctctccccaggcctctggctgcagtgatgccgcagaatcctgagccaggtgcctcctgagcagcccgtgcgcctctccacagcggcgtttgccacccaatgcggctcgcttcagatgctctgatgcagagggcacgcccatagtccctctgcagagcctcgcactggggccagggcaggcaccagccccaggcggccagtcggccacggcctgtcctcttcctcgtagcgtctgctcctcactttgtgttgatggtgacttaggagaatgttccgattttccatgatctaagcaggccacgtttaaaataacatcaaggcaagcgtacgtgtcaccctctgtactgacatctcttcccctgaaatgcttttcagtttgacagcccgtttcctagacaagtgcacctggggtttcaggaactttgtgttttttcggagggggttggtggggaggtcgggatgcctgggatcccttcctggagaggcaggctgtctctggaaaaagcctccattgcccacccgccaggcggaaagtcaccctgttcccagcgcggtttcagcatttaattttaagggagctaaggaagcgcggcgcgccccctggtggtggtaagccgccaacgcacctgggggctgcaaccccaccggacgggtggtccggagggaggctggagcggggaggcgaggagggggctgtgagtcctcagaggccctgggccaccacatttctggcagcgtttcccagacacccctctgctaggccatccctggatagcaagtgaattaacttaagggcactgtgatgggaagccttgcccccctcttttttttttttttttaatatctgcggaataaacccaatggttaatttttgaatgaataaaaggcttttgttgaataaacagctggtcccatcttctgtcttggcatcttagcatccaggctcaggctctgccccttctccaggatggggtagccccgagtcgccctccccagtctgcacattccctgttgtccctgttcctgcagtggctcccggccccagggaggcccacctcactcccagcctgactcggtggctggcttccttcaggactttgcgcaagtcagttctgctcattgggtctcaatttccccatcccttggatgggagcaagagtctctgctgggcctgcctcgcaggggcctggtgagacccaaatgtgagtgtcatcatcaaagcccctcacagaagtggaggacggtgcccaagagtagcggtttggactgctgctgcctcccacccggagcctgccacttgggggagaaattggtataatgcttgcaaaaacaaacaaacaaaaggcaatgtcttctggttgtggttatttcctttcctgcttgcctccccagccccctttgagtctctttttggggtgccgtcctgtctgaacctgccggtgtgtgtctctggggccagggtcagggcgaggcccaggggtggacaggggccgtgtagcatgccccagcctccccaagctcctgctgtatgtcgtccatgtcacgccaattaaacacgcttcctggacttgtcctcgccaaaaaaaaaaaaaaaaaa

SEQ ID NO: 178950 - DNA, 573 bp, Artificial Sequence
  derived and/or modified sequence
atgggcaaaagcaatagtaaacttaagccagaagtcgttgaggagctcactcgcaagacgtattttacggagaaagaggtgcagcaatggtataaaggctttatcaaggattgtcccagcggacagctggatgcggctggattccagaagatttataagcaatttttccccttcggcgatcccacgaagttcgcgacttttgtgtttaacgtgttcgatgaaaacaaggacggacgaatagagttcagtgaattcattcaggcacttagtgtcaccagccgaggaacgctcgatgaaaaactacgctgggcctttaagttgtacgatctggataacgacggttacatcacaaggaacgagatgctggatattgttgacgccatctatcagatggtaggcaacacagtggagcttcccgaggaggagaatactcccgagaaacgggtcgaccggatctttgccatgatggacaagaatgcagacggcaagctcacattacaagagttccaggaggggtccaaggctgatcctagcatcgttcaggctctgagtctgtacgacggcctcgtctag

SEQ ID NO: 178951 - DNA, 573 bp, Artificial Sequence
  derived and/or modified sequence
atgggcaagagcaacagcaagctgaagccagaggtggtggaggagctgaccaggaagacctacttcacagagaaggaggtgcagcagtggtacaagggcttcatcaaggactgccccagcggccagctggatgctgctggcttccagaagatctacaagcagttcttcccctttggagaccccaccaagtttgccacctttgtgttcaacgtgtttgatgagaacaaggatggccgcatcgagttcagcgagttcatccaggccctgtctgtgaccagccggggcaccctggatgagaagctgcgctgggccttcaagctgtatgacctggacaatgatggctacatcaccagaaatgagatgctggacatcgtggatgccatctaccagatggtgggcaacacagtggagctgcctgaggaggagaacaccccagagaagagggtggaccgcatctttgccatgatggacaagaatgctgatggcaagctgaccctgcaggagttccaggagggcagcaaggctgaccccagcatcgtgcaggccctgagcctgtatgatggcctggtgtag

SEQ ID NO: 178952 - DNA, 573 bp, Artificial Sequence
  derived and/or modified sequence
atgggcaagagcaacagcaagctgaagcccgaggtggtggaggagctcacccgcaagacctacttcaccgaaaaggaagtgcagcagtggtacaagggctttatcaaggactgcccaagcggccaactggacgctgcgggattccaaaagatttacaaacaattcttcccgttcggggaccccacaaagttcgccacattcgtgttcaatgtgttcgacgagaataaagacggtcgcatcgagttttccgagtttattcaggccctgtcagtgacctctagaggcacactggacgaaaaactccggtgggccttcaagctctacgatctcgacaatgacgggtatattaccagaaacgaaatgctggatatcgttgacgccatctatcagatggtcggtaacacagtggaactgcccgaagaagagaacactccagagaagagagttgaccggatcttcgccatgatggataaaaatgccgacggaaagctcacactgcaggagtttcaagagggcagtaaagcggacccgtcaattgtgcaagccctgagtttgtatgatgggctggtctag

SEQ ID NO: 178953 - DNA, 4991 bp, Artificial Sequence
  derived and/or modified sequence
ccggcccggcccgcccggcccagccgctcctgctgggcgccccaaccgggtccggcccgggggggcgggggccgcggccgccgaggatggggaaatccaacagcaagttgaagcccgaagttgtggaggagctgaccaggaagacctactttaccgagaaggaggtccagcagtggtacaaaggcttcatcaaggactgccccagtgggcagctggatgcggcaggcttccagaagatctacaagcaattcttcccgttcggagaccccaccaagtttgccacatttgttttcaacgtctttgatgaaaacaaggacgggcgaattgagttctccgagttcatccaggcgctgtcggtgacctcacggggaaccctggatgagaagctacggtgggccttcaagctctacgacttggacaatgatggctacatcaccaggaatgagatgctggacattgtggatgccatttaccagatggtggggaataccgtggagctcccagaggaggagaacactcctgagaagagggtggaccggatctttgccatgatggataagaatgccgacgggaagctgaccctgcaggagttccaggagggttccaaggcagacccgtccattgtgcaggcgctgtccctctacgacgggctggtatagtcccaggctggagctggatgcctgggaaccactcacctccttctgtgccatgaggccacctcagccctgacaccaaccccgtgcgtccacccagccttcttccgcatccacacacagccggctgcccttgacccgggaggccccggctctcctctcccctgtcctgcacccatcccccgcctgaagccaccggctccaattgccagcaacctctgcttgtccggaaaacgacaacacgaaatggaaaaggctacagccctctgcataaaccaaggacttggctgcctcgcaggcagcctccgttcctcccgctctcttgcgcgtgtgcttttgttttttattttgaacagacgttttaaaagaaaaaaaaacaactaccttctgtcctagaagacacagactgacagatggggtgaaggcctggggacctcagagaactctgccttgccctcgtccctcgtccttcggcagccggagaggctgtgggtgggccgagggtgtctaggggttctgcctggtcaacgttatttgtcgtcccatcttttggcagcaaaaccacctgcgtggctaggatgattaattatgaggatgatgattttttttgtgataacagtattgtgctttttgtggggaaagtgaggtttttttttatatacatatataattgatatctttaatttattggttgttaactgttgctgctgcctggtgtgtcctcagctcccagggctgcgggcccaccgtttacatgtgcacgccctgacccacctgcccacgccgacttgggaggatggtggcctgcagcggccaagaagccaaaaaaaattttttttttttcagatactgtgcttgatttttggagaggggagaggtggaaattcctaaatggctaatgcactgttccctccagcccgaatgcctcctgccaaaccccttttccctgctgcctctgtccccgcatccttgttctcccctgggtccgtaacattttttccgaggatgaacaggggacatctttaggtttctcaactcttgctttggtgtttgccgcagcatggaaaacagggcgcctaaggctgggagctggaagaaggggcattgggtacccaggcagagtcaggagaggtggtctttgaagtaagttagcagaaatcaaggggacccccgcctccttgggctggggaggggatttcaagatagttcatgactctctcccgctctgccttccctccttcctatctgctttttccagtaaactgcatggtgtccttccctggccttctcttggctcaaaggctgggagggagggaaggagagaagagttccaggcaatcccatcaatatagtccctacacctggggctgcggcccacatgtcttcacggaggcttccagcggtgcctgccactgaggcaggtgcggccccaggaccatcaccaggaatgcgaggccaccctggaccagaggtaggagcccaaggtccggcccttgctctttgattgtgggcagcctcctgccctctctgggtctcagttgccccatctgcagagcgaggaggcccgggctggttggtcttgaaggcccttttccatgccgacatcatgtcactctaggcctggggttcagtttcctgtggctggtgatgctgtggttaagtttgcttgaccccagcagcccgagggactgtctgagtcacagcacagcccctattgcgtggctgctggtgtgtggggtcagttccagcagatgaatgtgtcatgtggcacaccttgtcccttcccgcagcatttcctggttccccccagacccttgagcgctctttgggacccagaaggagtccttgcacagggaaggcttgaggtgagaagccgcttcccagactgtcagggccaggcctgggtctagaattcttgctgctgctttgcagagtcaacagcccatcagcccatgttttagaggggacactttggtcctcggttcccaccctcagcaagcaggcctccagcccgaggaaggcctctgccgtagtgacgttgccgtgtggggctgcgtggctgttccccttggctggagcattcagccaaccccagcgtcccccctgaggcgttcattggcagccccctaggactgcacgctggccccacggtaaccccccctcccccaccaacatcctgcagggatggggtcagtggttccaccttcacaggccactttgaagggtggattctttgaggcccctgccagtcggctccctgctcagctgctggcccgggcgacctgggactcagcaccaacggctgaagtttctcagctgggctctgacctggggtctggggcagggaacgaacatggtggctttgggctgagaggatgagggaggtctttcccaggtcaaattactttcctttggcctctgcctgaggctcgatttgcctctctggtccaatgggactgacactgttgtacaacctgacctgtggctgagggtgtctgggcttaagcatgtggaccccttcggtgtgtccggccttcctccatcgtcctgccctttggccttttggtttgaagccacaggtgtggcttctggccttagcagatggtatgcttgcggaccgcagcccagcatgccggtgggcccacagcccgagccagcccagagctgccggaagggccgcccttcccggccctggcggggtgctggacactggccattttcactagagtttgcctggcagggaccgatctctgccccctcctctccccaggcctctggctgcagtgatgccgcagaatcctgagccaggtgcctcctgagcagcccgtgcgcctctccacagcggcgtttgccacccaatgcggctcgcttcagatgctctgatgcagagggcacgcccatagtccctctgcagagcctcgcactggggccagggcaggcaccagccccaggcggccagtcggccacggcctgtcctcttcctcgtagcgtctgctcctcactttgtgttgatggtgacttaggagaatgttccgattttccatgatctaagcaggccacgtttaaaataacatcaaggcaagcgtacgtgtcaccctctgtactgacatctcttcccctgaaatgcttttcagtttgacagcccgtttcctagacaagtgcacctggggtttcaggaactttgtgttttttcggagggggttggtggggaggtcgggatgcctgggatcccttcctggagaggcaggctgtctctggaaaaagcctccattgcccacccgccaggcggaaagtcaccctgttcccagcgcggtttcagcatttaattttaagggagctaaggaagcgcggcgcgccccctggtggtggtaagccgccaacgcacctgggggctgcaaccccaccggacgggtggtccggagggaggctggagcggggaggcgaggagggggctgtgagtcctcagaggccctgggccaccacatttctggcagcgtttcccagacacccctctgctaggccatccctggatagcaagtgaattaacttaagggcactgtgatgggaagccttgcccccctcttttttttttttttttaatatctgcggaataaacccaatggttaatttttgaatgaataaaaggcttttgttgaataaacagctggtcccatcttctgtcttggcatcttagcatccaggctcaggctctgccccttctccaggatggggtagccccgagtcgccctccccagtctgcacattccctgttgtccctgttcctgcagtggctcccggccccagggaggcccacctcactcccagcctgactcggtggctggcttccttcaggactttgcgcaagtcagttctgctcattgggtctcaatttccccatcccttggatgggagcaagagtctctgctgggcctgcctcgcaggggcctggtgagacccaaatgtgagtgtcatcatcaaagcccctcacagaagtggaggacggtgcccaagagtagcggtttggactgctgctgcctcccacccggagcctgccacttgggggagaaattggtataatgcttgcaaaaacaaacaaacaaaaggcaatgtcttctggttgtggttatttcctttcctgcttgcctccccagccccctttgagtctctttttggggtgccgtcctgtctgaacctgccggtgtgtgtctctggggccagggtcagggcgaggcccaggggtggacaggggccgtgtagcatgccccagcctccccaagctcctgctgtatgtcgtccatgtcacgccaattaaacacgcttcctggacttgtcctcgcc

SEQ ID NO: 178954 - DNA, 573 bp, Artificial Sequence
  derived and/or modified sequence
atggggaagtcaaacagtaaactgaagccggaggtggttgaggagctgacaagaaagacatacttcaccgagaaggaggtccaacaatggtataaaggtttcatcaaagactgtccctccgggcaacttgacgccgcaggatttcaaaagatttataaacagttcttcccattcggcgatccgacaaaattcgcaacatttgtttttaacgttttcgacgagaacaaagatgggagaattgaattttctgagttcatacaggccctgtctgtcaccagcagaggcaccctggatgagaaactcagatgggcatttaaactttacgacctagataatgacggatatatcactcgaaatgaaatgctggacatagtggatgcgatctaccagatggtcggcaacactgtggagttacccgaggaagagaatactcctgaaaaacgggtcgaccgcatcttcgctatgatggacaaaaatgccgacggcaagctcacgttgcaggagtttcaggaggggagtaaggctgatccatctatcgtgcaggccttatctctttatgatggattagtttag

SEQ ID NO: 178955 - DNA, 573 bp, Artificial Sequence
  derived and/or modified sequence
atgggcaagagcaacagcaagctgaagcccgaggtggtggaggagctgaccagaaagacctacttcaccgagaaggaggtgcagcagtggtacaagggcttcatcaaggactgccccagcggccagctggacgccgccggcttccagaagatctacaagcagttcttccccttcggcgaccccaccaagttcgccaccttcgtgttcaacgtgttcgacgagaacaaggacggcagaatcgagttcagcgagttcatccaggccctgagcgtgaccagcagaggcaccctggacgagaagctgagatgggccttcaagctgtacgacctggacaacgacggctacatcaccagaaacgagatgctggacatcgtggacgccatctaccagatggtgggcaacaccgtggagctgcccgaggaggagaacacccccgagaagagagtggacagaatcttcgccatgatggacaagaacgccgacggcaagctgaccctgcaggagttccaggagggcagcaaggccgaccccagcatcgtgcaggccctgagcctgtacgacggcctggtgtag

SEQ ID NO: 178956 - protein, 1222 aa, Artificial Sequence
  derived and/or modified sequence
MLVGQGAGPLGPAVVTAAVVLLLSGVGPAHGSEDIVVGCGGFVKSDVEINYSLIEIKLYTKHGTLKYQTDCAPNNGYFMIPLYDKGDFILKIEPPLGWSFEPTTVELHVDGVSDICTKGGDINFVFTGFSVNGKVLSKGQPLGPAGVQVSLRNTGTEAKIQSTVTQPGGKFAFFKVLPGDYEILATHPTWALKEASTTVRVTNSNANAASPLIVAGYNVSGSVRSDGEPMKGVKFLLFSSLVTKEDVLGCNVSPVPGFQPQDESLVYLCYTVSREDGSFSFYSLPSGGYTVIPFYRGERITFDVAPSRLDFTVEHDSLKIEPVFHVMGFSVTGRVLNGPEGDGVPEAVVTLNNQIKVKTKADGSFRLENITTGTYTIHAQKEHLYFETVTIKIAPNTPQLADIIATGFSVCGQISIIRFPDTVKQMNKYKVVLSSQDKDKSLVTVETDAHGSFCFKAKPGTYKVQVMVPEAETRAGLTLKPQTFPLTVTNRPMMDVAFVQFLASVSGKVSCLDTCGDLLVTLQSLSRQGEKRSLQLSGKVNAMTFTFDNVLPGKYKISIMHEDWCWKNKSLEVEVLEDDMSAVEFRQTGYMLRCSLSHAITLEFYQDGNGRENVGIYNLSKGVNRFCLSKPGVYKVTPRSCHRFEQAFYTYDTSSPSILTLTAIRHHVLGTITTDKMMDVTVTIKSSIDSEPALVLGPLKSVQELRREQQLAEIEARRQEREKNGNEEGEERMTKPPVQEMVDELQGPFSYDFSYWARSGEKITVTPSSKELLFYPPSMEAVVSGESCPGKLIEIHGKAGLFLEGQIHPELEGVEIVISEKGASSPLITVFTDDKGAYSVGPLHSDLEYTVTSQKEGYVLTAVEGTIGDFKAYALAGVSFEIKAEDDQPLPGVLLSLSGGLFRSNLLTQDNGILTFSNLSPGQYYFKPMMKEFRFEPSSQMIEVQEGQNLKITITGYRTAYSCYGTVSSLNGEPEQGVAMEAVGQNDCSIYGEDTVTDEEGKFRLRGLLPGCVYHVQLKAEGNDHIERALPHHRVIEVGNNDIDDVNIIVFRQINQFDLSGNVITSSEYLPTLWVKLYKSENLDNPIQTVSLGQSLFFHFPPLLRDGENYVVLLDSTLPRSQYDYILPQVSFTAVGYHKHITLIFNPTRKLPEQDIAQGSYIALPLTLLVLLAGYNHDKLIPLLLQLTSRLQGVRALGQAASDNSGPEDAKRQAKKQKTRRT

SEQ ID NO: 178957 - DNA, 3669 bp, Artificial Sequence
  derived and/or modified sequence
atgctggtgggccagggcgccggccccctgggccccgccgtggtgaccgccgccgtggtgctgctgctgagcggcgtgggccccgcccacggcagcgaggacatcgtggtgggctgcggcggcttcgtgaagagcgacgtggagatcaactacagcctgatcgagatcaagctgtacaccaagcacggcaccctgaagtaccagaccgactgcgcccccaacaacggctacttcatgatccccctgtacgacaagggcgacttcatcctgaagatcgagccccccctgggctggagcttcgagcccaccaccgtggagctgcacgtggacggcgtgagcgacatctgcaccaagggcggcgacatcaacttcgtgttcaccggcttcagcgtgaacggcaaggtgctgagcaagggccagcccctgggccccgccggcgtgcaggtgagcctgagaaacaccggcaccgaggccaagatccagagcaccgtgacccagcccggcggcaagttcgccttcttcaaggtgctgcccggcgactacgagatcctggccacccaccccacctgggccctgaaggaggccagcaccaccgtgagagtgaccaacagcaacgccaacgccgccagccccctgatcgtggccggctacaacgtgagcggcagcgtgagaagcgacggcgagcccatgaagggcgtgaagttcctgctgttcagcagcctggtgaccaaggaggacgtgctgggctgcaacgtgagccccgtgcccggcttccagccccaggacgagagcctggtgtacctgtgctacaccgtgagcagagaggacggcagcttcagcttctacagcctgcccagcggcggctacaccgtgatccccttctacagaggcgagagaatcaccttcgacgtggcccccagcagactggacttcaccgtggagcacgacagcctgaagatcgagcccgtgttccacgtgatgggcttcagcgtgaccggcagagtgctgaacggccccgagggcgacggcgtgcccgaggccgtggtgaccctgaacaaccagatcaaggtgaagaccaaggccgacggcagcttcagactggagaacatcaccaccggcacctacaccatccacgcccagaaggagcacctgtacttcgagaccgtgaccatcaagatcgcccccaacaccccccagctggccgacatcatcgccaccggcttcagcgtgtgcggccagatcagcatcatcagattccccgacaccgtgaagcagatgaacaagtacaaggtggtgctgagcagccaggacaaggacaagagcctggtgaccgtggagaccgacgcccacggcagcttctgcttcaaggccaagcccggcacctacaaggtgcaggtgatggtgcccgaggccgagaccagagccggcctgaccctgaagccccagaccttccccctgaccgtgaccaacagacccatgatggacgtggccttcgtgcagttcctggccagcgtgagcggcaaggtgagctgcctggacacctgcggcgacctgctggtgaccctgcagagcctgagcagacagggcgagaagagaagcctgcagctgagcggcaaggtgaacgccatgaccttcaccttcgacaacgtgctgcccggcaagtacaagatcagcatcatgcacgaggactggtgctggaagaacaagagcctggaggtggaggtgctggaggacgacatgagcgccgtggagttcagacagaccggctacatgctgagatgcagcctgagccacgccatcaccctggagttctaccaggacggcaacggcagagagaacgtgggcatctacaacctgagcaagggcgtgaacagattctgcctgagcaagcccggcgtgtacaaggtgacccccagaagctgccacagattcgagcaggccttctacacctacgacaccagcagccccagcatcctgaccctgaccgccatcagacaccacgtgctgggcaccatcaccaccgacaagatgatggacgtgaccgtgaccatcaagagcagcatcgacagcgagcccgccctggtgctgggccccctgaagagcgtgcaggagctgagaagagagcagcagctggccgagatcgaggccagaagacaggagagagagaagaacggcaacgaggagggcgaggagagaatgaccaagccccccgtgcaggagatggtggacgagctgcagggccccttcagctacgacttcagctactgggccagaagcggcgagaagatcaccgtgacccccagcagcaaggagctgctgttctacccccccagcatggaggccgtggtgagcggcgagagctgccccggcaagctgatcgagatccacggcaaggccggcctgttcctggagggccagatccaccccgagctggagggcgtggagatcgtgatcagcgagaagggcgccagcagccccctgatcaccgtgttcaccgacgacaagggcgcctacagcgtgggccccctgcacagcgacctggagtacaccgtgaccagccagaaggagggctacgtgctgaccgccgtggagggcaccatcggcgacttcaaggcctacgccctggccggcgtgagcttcgagatcaaggccgaggacgaccagcccctgcccggcgtgctgctgagcctgagcggcggcctgttcagaagcaacctgctgacccaggacaacggcatcctgaccttcagcaacctgagccccggccagtactacttcaagcccatgatgaaggagttcagattcgagcccagcagccagatgatcgaggtgcaggagggccagaacctgaagatcaccatcaccggctacagaaccgcctacagctgctacggcaccgtgagcagcctgaacggcgagcccgagcagggcgtggccatggaggccgtgggccagaacgactgcagcatctacggcgaggacaccgtgaccgacgaggagggcaagttcagactgagaggcctgctgcccggctgcgtgtaccacgtgcagctgaaggccgagggcaacgaccacatcgagagagccctgccccaccacagagtgatcgaggtgggcaacaacgacatcgacgacgtgaacatcatcgtgttcagacagatcaaccagttcgacctgagcggcaacgtgatcaccagcagcgagtacctgcccaccctgtgggtgaagctgtacaagagcgagaacctggacaaccccatccagaccgtgagcctgggccagagcctgttcttccacttcccccccctgctgagagacggcgagaactacgtggtgctgctggacagcaccctgcccagaagccagtacgactacatcctgccccaggtgagcttcaccgccgtgggctaccacaagcacatcaccctgatcttcaaccccaccagaaagctgcccgagcaggacatcgcccagggcagctacatcgccctgcccctgaccctgctggtgctgctggccggctacaaccacgacaagctgatccccctgctgctgcagctgaccagcagactgcagggcgtgagagccctgggccaggccgccagcgacaacagcggccccgaggacgccaagagacaggccaagaagcagaagaccagaagaacctag

SEQ ID NO: 178958 - DNA, 3669 bp, Artificial Sequence
  derived and/or modified sequence
atgctcgtaggacagggagctggccctctcggccctgccgtggttacggcagccgtggtgctgttactttccggcgtcggcccggcccacgggtccgaggacatcgtagtgggctgcggcgggttcgtgaaatctgatgtggagattaactattcgctgatagaaatcaagctgtacaccaaacatgggaccttgaaataccagaccgactgcgctccaaataatggatactttatgattccactatatgacaagggagattttattcttaaaatagagcccccacttggttggagttttgagccaaccacagtcgaactgcacgttgatggggtgtctgacatctgcactaagggaggcgacatcaatttcgtgttcactggcttctccgtgaatggtaaagttctgagtaagggccagccgctggggcctgccggcgtacaagtatccttacgtaacacaggtaccgaagccaagattcagtccactgtcacccagcctggcggtaagtttgcgttcttcaaggttctgcccggtgactacgagattctcgcaactcatcccacttgggcgttgaaggaggcgtcaactacggtgagagtgactaactccaatgccaacgcggcaagtcccctgattgttgctggctacaacgtgtcagggtctgttcggtctgatggggagccaatgaagggcgtaaaattcctgcttttttcgagcttagttaccaaggaagatgtgttagggtgcaacgtcagcccagtccccggattccaacctcaggacgagtccctggtctatctctgttatacagtttctcgcgaagatggttcattcagtttctatagcctgccttccgggggctatacagtcatacctttctatagaggtgaacggatcacctttgacgtggccccttcccgactggacttcacagtcgagcacgattcattaaagatagagccagtattccacgtgatgggattctcggtaacaggacgcgtactgaacggccccgagggagacggtgttcctgaggccgttgtcacactgaataaccagatcaaagtgaagaccaaagcggatggtagcttccgtcttgaaaatattacaaccggcacctacactattcacgcccaaaaagaacatctatacttcgaaacagtcactattaagatagcacctaacacacctcagcttgctgatattatcgccaccggctttagcgtctgcgggcagattagtattattagatttccagacacagtcaagcagatgaacaaatataaggttgtgctctctagccaggacaaggataagagcctcgtgacagtggagacggacgcccacggcagcttttgttttaaggcgaagcctggaacgtataaagtccaggtcatggtccctgaagccgagaccagggccgggctgacgctaaagccacagaccttccccttaaccgttaccaacaggcccatgatggatgtggcttttgtacagtttcttgcctcagtgtcagggaaggtgagctgtctggacacatgcggggaccttttggtcacattgcagtccctgtccagacagggagaaaaacgtagcttgcagctgtcgggaaaggtcaatgcaatgacctttaccttcgataatgttctgccgggcaaatataagatcagcattatgcatgaagattggtgttggaagaataaaagcctcgaagttgaagtcctggaagacgatatgtccgcagtggagttccgacagactggctatatgctaagatgttctctgtctcacgccatcactttggaattctatcaagacgggaacggcagagagaacgttggcatttataatctttcaaagggggtgaacagattttgtctgtctaaacccggagtttataaagttactcctcggtcatgccatagattcgagcaggccttctacacctatgacacctcctcaccttccatccttacactcaccgcaattaggcaccacgtcctcggcactatcacaactgataagatgatggatgtgactgttacaatcaaaagcagcatagattctgaaccggccctggtgttaggcccactcaagagcgtccaggaactccgccgagagcaacagctcgccgaaattgaagccaggagacaggagagagagaagaacggaaatgaggagggggaggagaggatgacaaagcctcccgtccaagaaatggttgacgaactgcaggggcctttttcgtacgattttagctactgggcacgctctggggaaaaaatcaccgttactccttcttcaaaggaattgcttttttacccaccttccatggaggcagtagttagcggcgagagttgtcccggcaagctgatcgagattcacgggaaagccgggttgtttctggagggtcagatccaccctgaacttgagggcgtggagattgtcatttccgagaagggcgcctcgtcacctctgatcaccgtctttaccgacgacaagggagcatacagtgttggacccctccactccgaccttgaatacactgttactagccagaaagaagggtacgtgttaaccgccgttgagggcaccataggcgacttcaaagcctacgctcttgctggtgtgtcattcgaaatcaaggcagaggatgaccagccccttcccggagtgctgctctctctttctgggggtctctttcgctcaaatcttttgactcaggataatggaattctgaccttctcaaacctcagccccgggcaatattatttcaaaccaatgatgaaagagttcaggtttgagccgtcaagtcagatgattgaggttcaggagggacagaacctgaaaattacaattacaggatatcggactgcgtactcttgttacgggaccgtttcatctctcaacggagaacccgagcagggagtagctatggaggcagtggggcagaatgattgctcaatatacggtgaggataccgtgacggacgaggagggaaaattcagactgcgagggctcctgcccgggtgcgtgtatcacgtacaactgaaggcagaaggcaacgaccacatcgagcgagctctaccgcatcaccgggttattgaggtggggaacaatgatatagacgacgtcaatataatcgtcttcagacagatcaaccaattcgatctcagcggtaatgttattacctccagcgaatatctccctaccctctgggtgaaactctacaagagcgagaatcttgataatcctatacagacggtcagcttggggcaaagtctgttctttcattttccccccctgctccgagacggcgagaactatgttgtcctcctcgacagcaccctcccacggtcgcagtatgactacattcttccccaggtgtcctttacagcagtcggctatcacaaacacatcactttaatttttaatccaacccgaaagctgcccgaacaggacatcgcccaggggtcttacatcgcactgccactgacactgctcgtgttgctggcaggatacaatcatgacaaactgatccctctgcttttacagcttacttcgcgcttgcagggagtgcgcgccctgggccaggctgccagcgacaatagcggacccgaggacgcaaagcggcaggctaagaagcagaagacaaggagaacttag

SEQ ID NO: 178959 - DNA, 3669 bp, Artificial Sequence
  derived and/or modified sequence
atgctggtgggccagggcgccggccccctgggccctgctgtggtgacagctgctgtggtgctgctgctgagcggcgtgggccctgcccacggctctgaagatattgtggtgggctgcggcggctttgtgaagagtgatgtggagatcaactacagcctcatcgagatcaagctgtacaccaagcacggcaccctgaagtaccagacagactgtgcccccaacaacggctacttcatgatccccctgtatgacaagggggacttcatcctgaagattgagccccccctgggctggagctttgagcccaccaccgtggagctgcacgtggatggagtgtctgacatctgcaccaagggcggggacatcaactttgtgttcaccggcttctctgtgaatggcaaggtgctgagcaagggccagcccctgggccctgctggggtgcaggtgtccctgaggaacacaggaacagaggccaagatccagagcacagtgacccagcccggcggcaagtttgccttcttcaaggtgctgcccggggactatgagatcctggccacccaccccacctgggccctgaaggaggccagcaccaccgtgcgggtgaccaacagcaatgccaatgctgccagccccctgattgtggccggctacaacgtgtctggctctgtgcggagtgatggagagcccatgaagggcgtgaagttcctgctcttcagcagcctggtgaccaaggaggatgtgctgggctgcaatgtgtcccctgtgcccggcttccagccccaggatgagagcctggtgtacctgtgctacacagtgtccagagaagatggcagcttctccttctacagcctgcccagcggcggctacaccgtcatccccttctacagaggagagcgcatcacctttgatgtggcccccagccggctggacttcaccgtggagcatgacagcctgaagattgagcccgtcttccacgtgatgggcttctctgtgacaggccgggtgctgaatggaccagaaggagatggagtgcctgaggccgtggtgaccctgaacaaccagatcaaggtgaagaccaaggcagatggcagcttccggctggagaacatcaccaccggcacctacaccatccacgcccagaaggagcacctgtactttgagaccgtgaccatcaagatcgcccccaacaccccccagctggccgacatcatcgccaccggcttctctgtgtgtggccagatcagcatcatccgcttcccagacacagtgaagcagatgaacaagtacaaggtggtgctgagcagccaggacaaggacaagagcctggtgacagtggagacagatgcccacggcagcttctgcttcaaggccaagccaggcacctacaaggtgcaggtgatggtgcctgaggccgagaccagggctggcctgaccctgaagccccagaccttccccctgactgtgaccaaccggcccatgatggatgtggcctttgtgcagttcctggcctctgtgtctgggaaggtgtcctgcctggacacctgtggggacctgctggtgaccctgcagagcctgagccggcagggcgagaagaggagcctgcagctgagcggcaaggtgaatgccatgaccttcacctttgacaacgtgctgcccgggaagtacaagatcagcatcatgcatgaggactggtgctggaagaacaagagcctggaggtggaggtgctggaggatgacatgtctgctgtggagttccggcagacaggctacatgctgcgctgcagcctgagccacgccatcaccctggagttctaccaggatggaaatggccgggagaatgtgggcatctacaacctgagcaaaggagtgaaccgcttctgcctgagcaagccaggagtgtacaaggtgacccccaggagctgccacagatttgagcaggccttctacacctatgacaccagcagccccagcatcctgaccctgacagccatccgccaccacgtgctgggcaccatcaccacagacaagatgatggatgtgacagtgaccatcaagagcagcattgacagcgagcccgccctggtgctgggccccctgaagtctgtgcaggagctgcggcgggagcagcagctggccgagattgaggcccggcggcaggagcgggagaagaatggaaatgaggagggggaggagaggatgaccaagccccctgtgcaggagatggtggatgagctgcagggccccttctcctatgacttctcctactgggcccggtctggagagaagatcaccgtgacccccagcagcaaggagctgctcttctacccacccagcatggaggccgtggtgtctggagagagctgccctgggaagctgattgagatccacggcaaggccggcctcttcctggagggccagatccaccctgagctggagggcgtggagatcgtcatcagcgagaagggggccagcagccccctcatcaccgtcttcacagatgacaagggggcctacagcgtgggccccctgcacagcgacctggagtacacagtgaccagccagaaggagggctacgtgctgacagctgtggagggcaccatcggggacttcaaggcctatgccctggccggcgtgtcctttgagatcaaggcagaagatgaccagcccctgcccggggtgctgctgagcctgagcggcggcctcttccgcagcaacctgctgacccaggacaatggcatcctgaccttcagcaacctgagccctggccagtactacttcaagcccatgatgaaggagttccgctttgagcccagcagccagatgattgaggtgcaggagggccagaacctgaagatcaccatcaccggctacagaacagcctacagctgctacggcaccgtgagcagcctgaatggagagcctgagcagggcgtggccatggaggccgtgggccagaatgactgcagcatctatggagaagatactgtgacagatgaggagggcaagttccggctgcggggcctgctgcccggctgtgtgtaccacgtgcagctgaaggccgagggcaatgaccacatcgagcgggccctgccccaccacagggtcatcgaggtgggcaacaatgacattgatgatgtgaacatcatcgtgttccggcagatcaaccagtttgacctgtctggaaatgtcatcaccagcagcgagtacctgcccaccctgtgggtgaagctgtacaagtctgagaacctggacaaccccatccagacagtgtccctgggccagagcctcttcttccacttcccccccctgctgagagatggagagaactacgtggtgctgctggacagcaccctgcccaggagccagtatgactacatcctgccccaggtgtccttcaccgctgtgggctaccacaagcacatcaccctcatcttcaaccccaccaggaagctgcctgagcaggacatcgcccagggcagctacatcgccctgcccctgaccctgctggtgctgctggccggctacaaccacgacaagctgatccccctgctgctgcagctgaccagccggctgcagggcgtgcgggccctgggccaggccgccagtgacaacagcggcccagaagatgccaagaggcaggccaagaagcagaagaccaggagaacatag

SEQ ID NO: 178960 - DNA, 4355 bp, Artificial Sequence
  derived and/or modified sequence
ctggggctgtgaacgtggggtcgaagcgcgcgtgcgcggcggctctggcggcggcggtggggcggggcctgggctgtcagccggcctaggaggaggaaggagcctgcggcgtgcagtgtgaggggcgggacccggctgccggcggtgggtctagctgggggaggtcgggccatgctggtgggccagggcgcggggccgctggggcccgcggtggtcaccgccgcggtggtgctgctgctgagcggcgtggggccggcgcacggctcggaggacatcgtggtgggctgcggtggcttcgtcaagtcggacgtggagatcaactactctctcatcgagataaagctgtacaccaagcatgggactttgaaataccagacagactgtgcccctaataatggttactttatgatccctttgtatgataagggggatttcattctgaagattgagcctcccctagggtggagttttgagccgacgaccgtggagctccatgtggatggagtcagtgacatctgcacaaagggtggggacatcaactttgtcttcactgggttctctgtgaatggcaaggtcctcagcaaagggcagcccctgggtcctgcgggagttcaggtgtctctgagaaacactgggaccgaagcaaagatccagtccacagttacacagcctggcggaaagtttgcattttttaaagttctgcctggagattatgaaatcctcgcaactcatccaacctgggcgttgaaagaggcaagcaccacagtgcgtgtaaccaactccaatgccaatgcggccagtcccctcatagttgctggctacaatgtgtctggctctgtccgaagtgatggggagcccatgaaaggcgtgaagtttcttctcttttcttctttagtaactaaagaggatgtcctgggctgcaatgtctcaccagtgcctgggttccagccccaagacgagagtctggtgtatttgtgctacacggtctccagagaagatggctcgttctctttctattccttgccaagtgggggctacactgtgattccgttctatcgaggggagaggattacctttgatgtggcgccttccagacttgacttcacagtggagcatgacagcttgaaaatcgagcccgtgttccacgtcatgggattctccgtcaccgggagggtcttgaacggacccgaaggagatggtgttccagaagcagtagtcaccctgaataaccaaatcaaagttaaaacaaaagctgatggctcattccgccttgagaacataaccacagggacatacaccatccatgctcagaaagagcacctctactttgaaacggtcaccatcaaaattgcaccgaacacacctcagctggctgacattattgcaacagggttcagtgtctgtggtcagatatcaatcattcgcttccccgacaccgtcaagcagatgaataaatacaaagttgtcctgtcatctcaagacaaggacaagtctttggtcaccgtggagacagatgctcatggatcattttgttttaaagcaaaaccagggacttacaaagtgcaggtgatggttcctgaggcagaaaccagagcagggctgacgttgaaaccccagacatttcctcttactgtgaccaacaggcccatgatggatgtggcctttgtacagttcttggcatcagtttctgggaaagtctcttgtttggacacctgtggtgacttgctggtgactctacagtccctgagccgccagggtgagaagcggagcctccagctctccggcaaggtcaacgccatgactttcacctttgacaacgtgctccctggaaaatacaaaataagcatcatgcatgaggattggtgctggaagaacaagagcctggaggtggaagtgctggaggatgacatgtctgcagttgagttcaggcagacgggctacatgctgagatgttccctgtctcacgccatcactctggaattttatcaggatggaaatgggcgtgagaatgtggggatttataacctctccaaaggagtcaaccgattctgcctgtccaagcctggtgtgtacaaagtgacccctcgctcctgccaccggtttgagcaagcgttctacacctatgacacgtcttcacctagtatcttgacattgacagccattcgccaccatgtccttggaactatcaccaccgacaaaatgatggatgtcactgtgactatcaagtcttccatcgacagtgaacccgccttggtcttaggccctctgaagtctgtgcaggagctgcggagggagcagcagctggctgagatcgaggcccgcaggcaggagagggagaaaaacggcaatgaggaaggcgaagaaagaatgaccaagcctcccgtgcaggagatggtagatgagttacaaggccccttctcgtatgatttctcttactgggcgcggtctggagagaaaatcactgttacaccgtcatctaaagagctgctcttttatcccccttcaatggaagccgttgtcagtggagaaagctgcccagggaagctgatcgagatccatgggaaggcaggcctgtttttagaaggccagatccaccccgagttggaaggagtcgagattgtcatcagtgaaaagggggcaagttcaccgctgatcacagtctttactgatgacaaaggtgcctacagtgttggccccctgcacagtgacctggagtacacggtgacctcacagaaggagggctatgttctgactgcggtggaaggaaccatcggagacttcaaggcctatgccctggcaggcgtaagctttgagataaaagctgaggatgaccagcccctcccgggagtcctcttatccctgagcggtggcctgtttcgttccaacctcttgacccaggacaacggcattctgacattctcaaacctgagccctggccagtattacttcaaacccatgatgaaggagttccggtttgagccatcctcacagatgatcgaggtgcaggaaggccagaacctgaagatcaccatcacggggtaccgaaccgcttacagttgctatggcacagtgtcttccttaaacggagagcccgaacaaggggttgccatggaagcggtgggccagaacgactgcagcatttacggagaagacaccgtgacagacgaagagggcaagttcagattacgtggattgctgccgggatgtgtgtaccacgttcagctcaaggcagaaggcaacgaccacattgagcgggcgctcccccaccatagggtgattgaggttgggaataatgacatcgatgatgtaaacatcatagttttccggcagattaatcaatttgatttaagtggaaatgtgatcacttcctctgaataccttcctacattatgggtcaagctttacaaaagcgaaaacctcgacaatccaatccagacagtttcccttggccagtccctgttcttccatttccccccactgctcagagacggcgagaactatgttgtgcttctggactccacactccccagatcccagtatgactacatcttgcctcaagtttctttcaccgcagtgggctaccataaacacatcaccttgatttttaatcccacgaggaagctgcctgaacaggacatcgcacaaggatcctacattgccctgccattgacgctgctggttctgctggccggttacaaccatgacaagctcattcctttgctgctgcagttgacaagccggctacagggagtccgcgcgctcggccaggcagcctctgacaatagcggcccagaagatgcaaagagacaagccaagaaacagaagacaaggcggacttgaggaggaaggggacagttgcagtctcacttgggacaggccacagccaggggtccggccactacccgcccgtgggataaaagccaaaagcatgcgtcagctaacttcagcctgtgctgctgggcccgcaccccatgtcccttgtcactgtggcatcctgcacccatcctcacccctccgtagagcccctcgtgcaatgcaatgaatggaccctcctgtcactctgctgaacagaatttattttctgagtcaaatataatttattattatttttgtcaaagaagtatttaagctgtgctgtggtgtgagaatgtcattcttgatcttcagccttcgtttgcaaggagagttccagttgacgtggtgtttggttccatggcggggtaccctagggattcatctgttttcttcacttccctttgcatctgagatcctgctggaaaccacagcaacctgtatccactattaggaggtaaaaatcaataaaatggcccattcatttgtgttgtagctcatca

SEQ ID NO: 178961 - DNA, 3669 bp, Artificial Sequence
  derived and/or modified sequence
atgctggtgggccagggcgccggccccctgggccccgccgtggtgacagccgccgtggttttgctgctgtccggggtcggtcctgctcacggctccgaagacatcgtagtgggttgcggtgggtttgtcaaatccgatgtggaaattaactactctctgattgagatcaagctgtatacaaagcatggaactctgaagtatcagacagactgcgcccccaataatggctacttcatgatcccactgtatgataaaggagattttatcctgaaaatcgaacccccattaggctggtcgtttgaaccaaccaccgtggaactacatgtggatggggtaagcgatatctgcactaagggcggggacattaatttcgtgttcaccggattcagtgttaacgggaaagtcctgtccaagggacagccattagggcccgcaggcgtccaggtgagcctgcgcaataccgggaccgaagcgaagatacagtccacagtcacacaaccggggggaaaattcgcttttttcaaggtgctacctggagactacgaaatactggccacgcaccctacgtgggccctgaaggaagcctccaccacagtccgtgtgacgaattcaaatgccaatgctgccagtccattaatcgtggctggctacaacgtctcaggatctgtcaggagcgatggggagccaatgaaaggagtaaaattcctcctctttagcagcttggtgacaaaggaggacgtattgggctgtaacgtgtctcctgtgccagggttccaacctcaggatgagtccttggtgtacctatgttacaccgtttcccgcgaggatggttctttctccttttattcacttccatcaggcggctataccgtaatccctttttaccggggggagaggataacattcgacgttgctccatcaaggctggattttaccgtcgagcacgactctttgaagatagaacccgtttttcatgttatggggtttagtgtgaccgggagagtgctcaatggcccagaaggagacggcgttccggaggctgttgtcaccttaaacaaccaaattaaggtgaagacgaaggcggacggatctttcaggttggaaaacattacaacaggcacctataccattcatgctcagaaagaacacctgtatttcgagactgtaaccatcaagatcgctcctaatactccccaacttgctgacatcatagcaaccggcttttctgtgtgcggtcaaatctcgatcatcaggttccccgacactgttaaacaaatgaacaagtataaggtagtgttgagctcccaagacaaggacaagtcacttgtcactgtggagactgatgcccatgggtcattctgtttcaaggctaagcccggcacctataaggtgcaagtgatggtgccagaggcagagactagggctggcttgaccctcaagcctcagacattccccctgaccgtgacaaatcgccccatgatggacgtggcattcgtgcaattcctggcatcagtatcaggcaaggtcagctgtcttgatacatgcggtgatctgcttgtgaccctgcagtcgctgtcccggcagggagaaaagcgttctctccagctctctggcaaggtgaacgccatgacgttcacattcgacaatgttctgccagggaagtacaagatctcaatcatgcacgaagattggtgctggaagaacaagtctttggaagtggaagtgctggaagatgacatgtctgccgttgagttccggcaaaccggctatatgcttcgttgctctttgtctcacgcaattactctggagttctaccaagatggcaatggacgggagaatgtggggatctacaacctgagcaagggagtgaaccgattctgcctttctaagcccggagtatacaaagtcacccctaggtcttgtcaccgctttgagcaggcattttatacctacgacacgtcctcgccttcaatacttactctcaccgccattagacatcatgttctgggcacaataacaactgacaaaatgatggacgttaccgttactatcaaaagcagtatcgatagtgaacccgctctggtgctcggcccactcaaaagtgtgcaggagttgagaagagagcagcagctcgccgaaattgaggcccgccggcaggaacgtgagaaaaacgggaacgaggagggagaagagagaatgacaaaaccaccagtgcaagagatggtcgacgaactgcaaggaccattctcttatgacttctcttattgggcccgctccggcgagaagatcactgtgactccctcctcaaaggagctgctgttctacccccctagcatggaagccgtcgtgagtggagaatcttgcccagggaaacttattgagattcacggcaaggccggcctgttcctggagggacagatccaccctgaactggagggggtagagattgtgatctcggagaaaggagcctcgtcgcccctgataactgtctttacagatgataaaggcgcatactctgtgggtcctctgcactctgacctggagtacaccgtgacctcgcagaaagaaggatatgtgctgaccgcagtagagggcaccatcggagacttcaaagcgtacgccctggcaggcgtgtcattcgagatcaaagccgaagacgatcagcccctgcccggcgtcctgctctcgctgtccggtggtctgtttaggtcaaacttactgactcaggacaacggcatcttgacgtttagcaacctctctcctgggcagtattattttaaacctatgatgaaagaattccgctttgaaccgtcctcccaaatgatcgaggtgcaggagggacaaaacctaaagattacaatcacgggctaccgtaccgcttacagctgctatggaacagtaagcagtttgaatggcgagcctgagcagggagtggcgatggaagctgttggtcagaacgactgctccatctatggggaggatactgttacagacgaggaaggcaagtttagactgcgtggtttgctccccggctgcgtttatcatgtccagctgaaggctgagggaaacgatcacatcgaaagggcccttccccaccacagggtgatcgaggttgggaacaatgacattgatgatgtgaatatcattgtgtttaggcaaatcaatcagtttgacctgagcggaaacgttattacttcgtcggaatatctccccacgttgtgggtcaaactgtacaagtcggagaatcttgacaaccctattcagactgtcagtttggggcagtccctgtttttccactttcctccgttattgcgcgacggagaaaactatgtggttctgctggatagcacactgcctaggagccagtatgactatatcctgccccaggttagctttaccgcagtaggctatcacaagcacatcacattgatctttaaccctacccgcaaactgccggagcaggacatcgcacaaggttcatacattgctttgcccctaacactcctggtgctgttagccgggtacaatcacgataagctcattcccttgctcctgcagctcacttcccgcctacaaggcgtgcgcgccctggggcaggccgcgtccgacaatagcgggcccgaggatgccaaaagacaggctaagaaacagaaaacacgacggacctag

SEQ ID NO: 178962 - DNA, 3669 bp, Artificial Sequence
  derived and/or modified sequence
atgctagtgggccaaggcgcagggccattgggccctgccgtcgttactgccgcagtggttctcctgttgagtggcgtgggcccagctcacggatcagaggatatcgttgtcggctgtggcggatttgtcaaatctgacgtcgaaatcaactactcacttatcgagatcaaactgtacacaaaacatggaactctgaaataccagaccgactgtgctcccaataacgggtacttcatgatccctctgtacgataagggagactttattctgaagatcgagcccccactagggtggtcattcgagccaaccacagtcgagctccatgtagacggtgtttcagatatttgtaccaaggggggagacattaacttcgtctttacaggcttctccgttaacgggaaagtgctgagcaaagggcaacctctggggccagccggagtgcaagtctccctcaggaacactggaaccgaagcaaagatccagtccacggtcacccaaccaggaggcaaattcgccttcttcaaagtcctgcctggtgattacgaaattctggccacccatccgacctgggcgttaaaggaggcaagcactacagtacgcgtgacaaatagtaatgcaaacgcagcctccccgttaatcgttgctggatataatgtttcaggctctgtccggtcggatggggagccgatgaaaggagttaaatttttgctgttctcttcgttggtaaccaaagaggatgttcttggctgtaatgttagtcctgtgccaggtttccaacctcaggacgagtccctcgtttatctgtgttacaccgtaagtagggaggacgggtcattcagcttctattcattaccttccgggggttacactgtgataccattctaccgcggtgaaagaatcacttttgatgtcgccccttcacggctggactttactgtcgagcacgactccctcaaaatcgaaccagtgttccacgtgatgggcttttccgtaactggtcgagtcttgaatgggccagagggagacggagtgccagaggcagtcgtaaccttaaacaaccagataaaagtcaagactaaggctgacgggtccttcaggctggagaatatcaccactggaacttacaccatccacgcacagaaagagcacctttactttgagaccgttaccatcaaaatagccccaaacacgcctcagcttgccgatataatcgctaccgggttctccgtttgcggccagatctccataattaggttccccgacaccgtgaagcaaatgaacaagtacaaggtggtgttgagttcacaggataaggacaaaagtctcgtgacagtagagactgatgctcacggatctttctgcttcaaggctaagccagggacttacaaggtccaggtgatggttcccgaagctgagactcgcgctggtttgacgctgaaacctcagaccttcccgctgactgtcactaacagaccaatgatggacgttgccttcgtccagttcctggccagcgtgagcggcaaggttagttgcctagacacctgcggcgacctccttgtgacattacagagccttagcaggcagggcgagaagcgctctctccaactgtccggtaaggtgaatgctatgacctttacattcgataatgtcctgccaggtaagtataagatcagcataatgcatgaggactggtgctggaagaataagagcctcgaggtcgaagtcctggaggatgatatgagcgcagtggagttccgccagactgggtatatgcttaggtgcagcttgagtcacgcaatcactctggagttttatcaagatggcaacggcagggagaacgtgggaatttataacctgtccaagggagttaacaggttttgcctgagcaagcctggtgtgtacaaggttaccccacgcagctgtcatagattcgaacaagccttttacacgtatgatacgtctagcccctccattttgacactgacggccatcagacatcatgttctgggcacaattactactgacaaaatgatggacgtgactgtaactattaaatcctccattgattcagagcccgcactagttctggggccactgaagtcagtccaggaactgcgacgcgagcagcagctggctgaaattgaagcccgaagacaggagagggagaaaaacgggaatgaggaaggggaggagcgaatgaccaaacctccggtgcaggagatggtagatgagttacagggaccctttagttacgactttagttactgggctcgtagtggcgagaaaattaccgtcaccccctctagtaaggagctgttgttttatcccccatccatggaggccgtggtgtcaggtgaaagctgtcccggtaagttgatcgaaatccacggaaaagctgggttgtttttagagggccagatccacccagagctcgagggggtggaaatcgttatcagcgaaaaaggggcatctagtccactcataaccgtcttcaccgacgataagggggcatattctgtggggcctctgcacagtgaccttgaatataccgttacaagtcagaaagaaggatatgttctgaccgccgtggaagggaccatcggagatttcaaggcttacgcattggctggtgttagttttgaaatcaaagcagaagacgatcaacccctccccggagtgctgctgtcactgtctggcggtttatttcgcagtaatctgcttacacaagataatggcattctgactttttccaatctgtcaccgggacagtactactttaagcccatgatgaaggagtttaggtttgaaccgagtagccagatgattgaggtgcaggaagggcagaatctcaaaataacaatcaccggctacagaactgcttactcttgctatgggacagtatcctctctcaacggtgaaccagaacagggagtcgccatggaagctgtcgggcagaatgactgtagcatttacggggaagacaccgtcacagacgaagaaggcaaattccgccttcgaggattactccccggatgcgtgtaccatgtgcaactgaaggcagaaggcaacgaccacatagaaagagcccttccacatcacagagtgattgaagttgggaacaatgatatagacgatgttaacataatagtttttcggcagatcaaccaatttgatctctcaggaaatgtcatcacctcctccgaatatctgcctaccctatgggtaaagctctacaagtctgagaatctggataatcctattcagaccgttagcctcgggcagagtttgttttttcacttcccgcctctgctgagggacggtgagaattatgtggttttactggacagcacgctccccagaagtcagtacgattatattctcccccaggtatcgtttacagccgtcggttatcacaaacacattaccctgatttttaatccaaccaggaagctgcctgagcaggacattgcccaggggtcatacatagcactgcctttgactctgctggtcctcctagccggttataaccatgataagctcatacctttactcttgcagctgacatccagactgcagggagtacgcgctctggggcaggccgcttccgataattccggccctgaggatgcgaagcggcaggccaagaaacagaaaactcgcagaacatag

SEQ ID NO: 178963 - protein, 641 aa, Artificial Sequence
  derived and/or modified sequence
MGPPLKLFKNQKYQELKQECIKDSRLFCDPTFLPENDSLFYNRLLPGKVVWKRPQDICDDPHLIVGNISNHQLTQGRLGHKPMVSAFSCLAVQESHWTKTIPNHKEQEWDPQKTEKYAGIFHFRFWHFGEWTEVVIDDLLPTINGDLVFSFSTSMNEFWNALLEKAYAKLLGCYEALDGLTITDIIVDFTGTLAETVDMQKGRYTELVEEKYKLFGELYKTFTKGGLICCSIESPNQEEQEVETDWGLLKGHTYTMTDIRKIRLGERLVEVFSAEKVYMVRLRNPLGRQEWSGPWSEISEEWQQLTASDRKNLGLVMSDDGEFWMSLEDFCRNFHKLNVCRNVNNPIFGRKELESVLGCWTVDDDPLMNRSGGCYNNRDTFLQNPQYIFTVPEDGHKVIMSLQQKDLRTYRRMGRPDNYIIGFELFKVEMNRKFRLHHLYIQERAGTSTYIDTRTVFLSKYLKKGNYVLVPTMFQHGRTSEFLLRIFSEVPVQLRELTLDMPKMSCWNLARGYPKVVTQITVHSAEDLEKKYANETVNPYLVIKCGKEEVRSPVQKNTVHAIFDTQAIFYRRTTDIPIIVQVWNSRKFCDQFLGQVTLDADPSDCRDLKSLYLRKKGGPTAKVKQGHISFKVISSDDLTEL

SEQ ID NO: 178964 - protein, 386 aa, Artificial Sequence
  derived and/or modified sequence
MTDIRKIRLGERLVEVFSAEKVYMVRLRNPLGRQEWSGPWSEISEEWQQLTASDRKNLGLVMSDDGEFWMSLEDFCRNFHKLNVCRNVNNPIFGRKELESVLGCWTVDDDPLMNRSGGCYNNRDTFLQNPQYIFTVPEDGHKVIMSLQQKDLRTYRRMGRPDNYIIGFELFKVEMNRKFRLHHLYIQERAGTSTYIDTRTVFLSKYLKKGNYVLVPTMFQHGRTSEFLLRIFSEVPVQLRELTLDMPKMSCWNLARGYPKVVTQITVHSAEDLEKKYANETVNPYLVIKCGKEEVRSPVQKNTVHAIFDTQAIFYRRTTDIPIIVQVWNSRKFCDQFLGQVTLDADPSDCRDLKSLYLRKKGGPTAKVKQGHISFKVISSDDLTEL

SEQ ID NO: 178965 - DNA, 1161 bp, Artificial Sequence
  derived and/or modified sequence
atgaccgacatcagaaagatcagactgggcgagagactggtggaggtgttcagcgccgagaaggtgtacatggtgagactgagaaaccccctgggcagacaggagtggagcggcccctggagcgagatcagcgaggagtggcagcagctgaccgccagcgacagaaagaacctgggcctggtgatgagcgacgacggcgagttctggatgagcctggaggacttctgcagaaacttccacaagctgaacgtgtgcagaaacgtgaacaaccccatcttcggcagaaaggagctggagagcgtgctgggctgctggaccgtggacgacgaccccctgatgaacagaagcggcggctgctacaacaacagagacaccttcctgcagaacccccagtacatcttcaccgtgcccgaggacggccacaaggtgatcatgagcctgcagcagaaggacctgagaacctacagaagaatgggcagacccgacaactacatcatcggcttcgagctgttcaaggtggagatgaacagaaagttcagactgcaccacctgtacatccaggagagagccggcaccagcacctacatcgacaccagaaccgtgttcctgagcaagtacctgaagaagggcaactacgtgctggtgcccaccatgttccagcacggcagaaccagcgagttcctgctgagaatcttcagcgaggtgcccgtgcagctgagagagctgaccctggacatgcccaagatgagctgctggaacctggccagaggctaccccaaggtggtgacccagatcaccgtgcacagcgccgaggacctggagaagaagtacgccaacgagaccgtgaacccctacctggtgatcaagtgcggcaaggaggaggtgagaagccccgtgcagaagaacaccgtgcacgccatcttcgacacccaggccatcttctacagaagaaccaccgacatccccatcatcgtgcaggtgtggaacagcagaaagttctgcgaccagttcctgggccaggtgaccctggacgccgaccccagcgactgcagagacctgaagagcctgtacctgagaaagaagggcggccccaccgccaaggtgaagcagggccacatcagcttcaaggtgatcagcagcgacgacctgaccgagctgtag

SEQ ID NO: 178966 - DNA, 1926 bp, Artificial Sequence
  derived and/or modified sequence
atgggaccccccctgaaactgttcaagaatcagaaataccaggaactaaagcaggagtgtatcaaggactctaggcttttttgtgatccgacctttctaccagagaacgactcattattttataaccgtctgttgccaggtaaggtggtctggaagcgaccccaggatatctgcgacgacccgcacctgatcgttggcaatataagcaaccatcagcttacgcaaggacgactggggcataagccaatggtgtctgccttttcttgtctcgccgtccaggagagccactggacgaaaaccattccgaatcataaagagcaggaatgggatccacagaaaacagagaaatatgccggaattttccattttcgattctggcattttggggagtggactgaagtggtcatcgatgatttactccctactatcaacggcgatcttgtgttcagcttttctacaagcatgaatgagttctggaatgctctgctggagaaagcctatgcaaagctgctgggatgctacgaagcccttgacggcctcactattacagacattatcgtcgattttacggggaccctggctgaaacagtggacatgcaaaaaggccgctataccgaactagtggaagagaagtataagctattcggggagctgtacaaaactttcaccaagggaggccttatttgctgtagtattgagtctcctaatcaagaagagcaggaggtggagacagattggggactcctgaaaggtcacacctacactatgaccgatatcaggaaaattcgtctcggcgagcggctggtagaggtctttagcgccgagaaggtgtatatggtgcggctcaggaatccactgggccgccaggagtggagtggaccatggtcggaaatttccgaagagtggcagcaactgactgcctctgacaggaaaaatctgggactggtaatgtctgatgacggcgaattctggatgtccttagaagacttttgtcgaaacttccacaaactaaacgtgtgcagaaacgtgaacaaccctatcttcggcagaaaagagcttgaaagcgtgttgggctgttggaccgtggatgacgacccattaatgaacagatccggcggttgctacaacaacagagatacgttccttcaaaacccgcagtacatttttaccgttcccgaagatgggcacaaggttatcatgtctctccagcagaaagacctgcggacctacaggagaatggggcgccccgacaattacataatagggtttgagctgtttaaagtggaaatgaataggaagttccgtctgcaccacctttacatacaggaacgagccgggacatctacctacatcgatacgcgaacagtgtttctgtccaagtacctgaaaaaagggaactacgtactggttcccaccatgttccagcacggacggacctctgagttcttgctgcgaatcttttctgaagtgcccgtgcagctgcgggaactcacccttgacatgcctaagatgtcttgttggaacctcgccaggggctatcccaaggtggtgacacagattaccgtccactccgcagaggatctagagaagaaatacgctaatgaaaccgtcaatccatatctggttatcaaatgcggaaaggaggaagtgaggagcccggtgcagaagaacaccgtacacgctattttcgacacgcaggcgatattctatagaaggacaaccgacattcctattatcgttcaggtctggaactccagaaaattctgtgatcagttcctaggccaggtcactctggatgccgacccgtctgactgtcgggatcttaaaagcctctatctgaggaagaagggcggccccacggccaaggtcaaacaaggacacatcagttttaaagtcatctcttctgatgatttaacagaactctag

SEQ ID NO: 178967 - DNA, 1161 bp, Artificial Sequence
  derived and/or modified sequence
atgaccgatatccggaaaattaggttgggggagcggttggtagaggtattctcagcggagaaggtctatatggttagactcagaaacccactgggcaggcaggaatggtccgggccatggagcgaaatctccgaggagtggcagcaacttactgcttcggacagaaaaaatcttggcctcgtgatgtctgatgacggcgaattctggatgtctctggaagacttctgcagaaactttcacaaactaaacgtctgccggaacgtgaataaccccatctttggacggaaagagcttgaatccgtgctgggatgttggactgtggacgacgatccattgatgaatcggtctggcggatgctacaataatagggacacatttctgcaaaacccccaatacattttcacggttccagaagatggacacaaagtaattatgagtctccagcaaaaggatctgcggacttaccgtcggatggggcgaccggataactacattataggctttgaactgttcaaagttgaaatgaacaggaagtttaggcttcaccatctgtatatccaggaacgggcaggaacatcgacctacatcgatacaagaacggtgttcttgagcaagtaccttaagaagggtaactatgtactcgttccgaccatgtttcagcatgggaggacatctgagttcctcctgcgcatcttcagtgaagtgccagtgcagctgagggaacttactctcgatatgccaaagatgtcctgctggaacctggcccggggctacccgaaagtggttacccagatcactgttcacagcgctgaggatttagagaaaaaatacgctaacgaaaccgttaatccctatttagtgataaagtgcggcaaggaagaggtgcgctcacctgtgcagaaaaacaccgtgcatgcaatctttgatactcaggccattttttatcgtcgaaccaccgacatcccgattattgtgcaggtgtggaacagtcggaagttctgtgaccagttcctggggcaagtcacactcgatgcagatcccagcgattgtagagatctcaagtccctatatttgcgcaagaaggggggacccacagcgaaagtcaagcagggccacatcagtttcaaggtaatctcctcagatgacctgacggaattgtag

SEQ ID NO: 178968 - DNA, 1926 bp, Artificial Sequence
  derived and/or modified sequence
atgggcccccccctgaagctgttcaagaaccagaagtaccaggagctgaagcaggagtgcatcaaggacagccgcctcttctgtgaccccaccttcctgcctgaaaatgacagcctcttctacaaccggctgctgcccgggaaggtggtgtggaagaggccccaggacatctgtgatgacccccacctgattgtgggcaacatcagcaaccaccagctgacccagggccgcctgggccacaagcccatggtgtctgccttcagctgcctggccgtgcaggagagccactggaccaagaccatccccaaccacaaggagcaggagtgggacccccagaagacagagaagtatgccggcatcttccacttccgcttctggcactttggagagtggacagaggtggtgattgatgacctgctgcccaccatcaacggggacctggtgttctccttcagcacctccatgaatgagttctggaatgccctgctggagaaggcctatgccaagctgctgggctgctatgaggccctggatggcctgaccatcacagacatcatcgtggacttcaccggcaccctggccgagaccgtggacatgcagaagggccgctacacagagctggtggaggagaagtacaagctgtttggagagctgtacaagaccttcaccaagggcggcctcatctgctgcagcattgagagccccaaccaggaggagcaggaggtggagacagactggggcctgctgaagggccacacctacaccatgacagacatcaggaagatccggctgggggagcggctggtggaggtgttttctgctgagaaggtgtacatggtgcggctgaggaaccccctgggccggcaggagtggagcggcccctggagcgagatcagcgaggagtggcagcagctgacagccagtgacaggaagaacctgggcctggtgatgtctgatgatggagagttctggatgagcctggaggacttctgcaggaacttccacaagctgaatgtgtgcagaaatgtgaacaaccccatcttcggcaggaaggagctggagagcgtgctgggctgctggacagtggatgatgaccccctgatgaacagaagtggcggctgctacaacaacagagacaccttcctgcagaacccccagtacatcttcaccgtgcctgaagatggccacaaggtgatcatgagcctgcagcagaaggacctgcggacctacagaaggatgggccgcccagacaactacatcattggatttgagctgttcaaggtggagatgaacaggaagttccggctgcaccacctgtacatccaggagagagctggcaccagcacctacatcgacaccaggacagtgttcctgagcaagtacctgaagaagggcaactacgtgctggtgcccaccatgttccagcacggccgcaccagcgagttcctgctgcgcatcttcagcgaggtgcctgtgcagctgcgggagctgaccctggacatgcccaagatgagctgctggaacctggcccggggctaccccaaggtggtgacccagatcaccgtgcacagcgctgaggacctggagaagaagtatgccaatgagaccgtgaacccctacctggtgatcaagtgtgggaaggaggaggtgcgcagccctgtgcagaagaacacagtgcacgccatctttgacacccaggccatcttctacagaaggaccacagacatccccatcatcgtgcaggtgtggaacagcaggaagttctgtgaccagttcctgggccaggtgaccctggatgctgaccccagcgactgccgggacctgaagagcctgtacctgaggaagaagggcggccccacagccaaggtgaagcagggccacatctccttcaaggtgatcagcagtgatgacctgacagagctgtag

SEQ ID NO: 178969 - DNA, 1161 bp, Artificial Sequence
  derived and/or modified sequence
atgacagacatcaggaagatccggctgggggagcggctggtggaggtgttttctgctgagaaggtgtacatggtgcggctgaggaaccccctgggccggcaggagtggagcggcccctggagcgagatcagcgaggagtggcagcagctgacagccagtgacaggaagaacctgggcctggtgatgtctgatgatggagagttctggatgagcctggaggacttctgcaggaacttccacaagctgaatgtgtgcagaaatgtgaacaaccccatctttggaaggaaggagctggagagcgtgctgggctgctggacagtggatgatgaccccctgatgaacagaagtggcggctgctacaacaacagagacaccttcctgcagaacccccagtacatcttcaccgtgcctgaagatggccacaaggtgatcatgagcctgcagcagaaggacctgcggacctacagaaggatgggccgcccagacaactacatcatcggctttgagctgttcaaggtggagatgaacaggaagttccggctgcaccacctgtacatccaggagcgggccggcaccagcacctacatcgacaccaggacagtgttcctgagcaagtacctgaagaagggcaactacgtgctggtgcccaccatgttccagcacggccgcaccagcgagttcctgctgcgcatcttcagcgaggtgcctgtgcagctgcgggagctgaccctggacatgcccaagatgagctgctggaacctggcccggggctaccccaaggtggtgacccagatcaccgtgcacagcgctgaggacctggagaagaagtatgccaatgaaacagtgaacccctacctggtgatcaagtgtgggaaggaggaggtgcgcagccctgtgcagaagaacacagtgcacgccatctttgacacccaggccatcttctacagaaggaccacagacatccccatcatcgtgcaggtgtggaacagcaggaagttctgtgaccagttcctgggccaggtgaccctggatgctgaccccagcgactgccgggacctgaagagcctgtacctgaggaagaagggcggccccacagccaaggtgaagcagggccacatctccttcaaggtgatcagcagtgatgacctgacagagctgtag

SEQ ID NO: 178970 - DNA, 1926 bp, Artificial Sequence
  derived and/or modified sequence
atgggcccccccctgaagctgttcaagaaccagaagtaccaggagcttaaacaggaatgtattaaggattctcgactgttttgtgatcctaccttcttgcccgagaacgatagcctattttataatcgattactccccgggaaagtggtttggaagaggccacaggatatttgtgacgacccacatttaatcgtcggaaatatcagcaaccaccaacttacccaaggcagattagggcataagcctatggttagcgctttcagctgtctcgccgttcaggagtctcactggacaaaaaccatccctaatcataaggaacaagaatgggatccccagaagacagaaaaatacgccggtatattccacttcagattctggcacttcggcgagtggacagaagtggtcatcgatgatctcctgcccacaataaatggagacttagtttttagttttagtacctccatgaatgaattctggaacgcactgttagagaaggcttacgctaagctgcttgggtgttacgaggcattagacgggttaacgattactgatattattgtggactttacaggcactttggcggagacagttgatatgcagaagggacgctacaccgaactggttgaagaaaaatataagttatttggcgagctgtacaagacatttaccaaaggagggctgatttgctgttccattgaatccccgaaccaggaggaacaagaagttgagactgactggggcctgctcaaaggtcacacgtacactatgacagacatacgcaaaatccggttgggagagcgattagtcgaggtattcagcgccgagaaggtttacatggtgcgcctgaggaaccccctaggtaggcaggaatggtccggaccttggagcgaaataagcgaagaatggcagcagcttaccgcttctgatagaaagaatctgggtttggtaatgtctgacgatggtgaattctggatgagtctagaagacttctgtcggaacttccataaactgaacgtctgcagaaatgtcaacaaccccatcttcggccggaaggagctcgaatctgtcctgggttgctggaccgttgacgacgaccctctgatgaatagaagtgggggctgttataacaatcgcgacacctttctgcagaatccacagtacatattcaccgtgcccgaggatggccacaaggtcatcatgagtttgcagcaaaaggatctgaggacataccgtcggatggggcgtccagacaattacattatcggattcgagctattcaaggttgagatgaatcgtaaatttcgtcttcaccatctgtatattcaggagcgcgcagggacatcgacctacattgatacccgcaccgtgtttcttagcaaatacctgaaaaaggggaattacgtcctggttccaaccatgtttcagcatggacgcacgtctgaattcttacttagaatcttctcagaagtgcctgtgcaacttcgggaactgaccctagatatgccaaagatgtcttgctggaatctagccagaggataccccaaggtcgtgactcagatcacagttcactcagcagaggatctcgagaaaaagtatgccaacgagaccgtgaacccctacctggttataaaatgtgggaaggaagaggtgcgttcgccagtgcaaaagaataccgtgcatgcgatctttgatacccaggcgatcttttatcgaaggacgacagatattcctatcatcgtgcaagtctggaacagccgtaaattttgtgaccaattccttgggcaggttacccttgacgctgatccttcggactgccgggatctgaagtctctgtatctgcgaaaaaaagggggccctacagctaaagtgaaacagggacacataagtttcaaagttatcagttcagatgatctgacagaactgtag

SEQ ID NO: 178971 - DNA, 1161 bp, Artificial Sequence
  derived and/or modified sequence
atgaccgacatccggaagatccggctgggcgagcggctggtggaggtttttagtgccgagaaagtgtacatggtgaggctcagaaatcccctcgggaggcaggagtggtcaggaccttggtccgaaatcagcgaggagtggcagcagctaacagcatctgacaggaagaatctgggccttgtgatgagcgatgatggcgaattttggatgtctctggaagacttttgtagaaactttcacaaactcaacgtgtgcaggaacgtcaacaaccccatttttggtcgtaaagagctggagtcagtgctggggtgctggacagtcgacgacgatcctttaatgaacagatccgggggatgttataataatagagatacctttctgcagaatccacagtacattttcacagtaccagaagatggacataaggtcataatgtcgctgcaacagaaggatctcagaacatataggcgaatgggccgtcctgataactacatcatcggtttcgagctttttaaagtggaaatgaatcgcaaattcaggctccatcacctctatattcaggaaagggcaggcacttcaacctatatagataccagaacggtgttcctcagcaagtacctgaagaagggtaactacgtgttagttccgaccatgttccagcacggtagaacatcagagtttctgctccggatcttctctgaggtgcccgttcagctaagagaactgacactggatatgcctaaaatgtcctgttggaatctggcacgggggtatcccaaagtggtgactcagatcactgtgcactctgcagaagatctcgagaaaaagtatgccaacgagaccgttaatccatacctggtgattaagtgtggcaaggaagaagtgagaagtcccgtgcagaagaatacagtgcacgcaatctttgatacccaggcaattttctacaggagaactacggacattcctataatcgtgcaggtgtggaactctaggaagttttgcgatcagtttttgggtcaggtgacgttagacgccgacccatccgattgtagagacctgaagtccctctacttacgaaagaagggcggtcctacagctaaggtgaagcagggccacattagctttaaagttatctcaagcgatgatctgacggagctatag

SEQ ID NO: 178972 - DNA, 1926 bp, Artificial Sequence
  derived and/or modified sequence
atgggtccgcctttaaagttgtttaaaaaccaaaagtatcaggaacttaaacaagagtgcatcaaggacagtagacttttttgtgaccccacttttttgcctgagaatgatagtctattttacaataggcttttgccagggaaggtggtatggaagagaccccaagacatctgcgatgatcctcaccttatcgtcgggaatatctccaatcatcagcttactcaggggaggctcggccataaaccaatggtgtccgccttctcctgtctcgcagtccaggagagtcattggactaaaactataccaaatcataaggagcaggagtgggaccctcagaaaaccgagaaatacgctggcatctttcactttcgattctggcactttggggaatggaccgaagtcgtgatagatgatctgttaccaactattaatggtgatcttgtgtttagtttttcgacaagcatgaatgagttttggaatgcgttgctcgaaaaagcatacgccaagctgctgggatgttacgaggcactcgatggactaacgatcactgatatcatcgtcgattttacagggactctcgctgaaaccgtggatatgcagaaggggagatatactgaacttgtcgaggagaagtacaaactcttcggggagttgtataagacgttcacgaaggggggtctcatatgctgctcaatcgaatccccgaatcaggaagaacaggaggtggaaacagactgggggctattaaagggccacacatataccatgacagatatccgcaaaatcaggctgggcgaacggctcgtggaggtattctccgcagaaaaggtttacatggtgcggttacgcaaccccctgggcagacaggagtggtccgggccttggtccgagattagtgaagaatggcagcagctgacagcatccgatcggaaaaatctgggcttggtgatgagtgacgatggagaattttggatgtccttagaggacttctgcaggaattttcacaaattgaacgtctgccgtaatgtcaacaatcctatctttgggaggaaggagcttgaatctgtgttaggctgctggacagttgacgatgatcctttgatgaatcggtctgggggttgctataataatagggacaccttcctccaaaatccccaatacatcttcactgtccccgaagatggccacaaagttatcatgtccctccagcagaaagatctgagaacctaccggagaatgggcagacccgataattacattatcggatttgagctttttaaggtcgagatgaatagaaagttccgcctacaccacctgtatattcaagagcgggctgggacgtccacctatattgacactcgaaccgtctttctaagcaagtatctgaaaaaggggaactacgtgctagtgccaacaatgtttcaacacgggcgtacctccgagttcctgctccggatcttctccgaggtccctgtgcaacttagagagctgacactggacatgccaaagatgtcatgctggaatctcgccagaggatatcccaaagttgttacccagatcaccgtccacagcgctgaggatttggagaaaaaatacgctaatgagactgtgaacccatacctggtaattaagtgtgggaaggaggaggtcaggtcacctgtgcagaagaatacggtacatgctatctttgacactcaggccattttttaccgtaggactacggacattccaattattgtccaggtgtggaatagccggaagttctgcgatcagttcctggggcaagttactctcgatgccgatccttccgactgtagggacctgaaaagcctttatttaaggaagaaaggtggcccaactgccaaggtaaagcagggccacatttcgttcaaagtgatttctagtgacgacctgacagaactgtag

SEQ ID NO: 178973 - DNA, 1161 bp, Artificial Sequence
  derived and/or modified sequence
atgactgacatacgtaagattaggttgggagagcgcttggtggaagtattttccgccgagaaagtgtacatggtacgcttgagaaacccgctcggacgccaggagtggagtgggccttggtccgagatttccgaggagtggcaacagctcacggcctctgatcggaagaatctggggttggtaatgtcagacgacggagaattttggatgagtttagaagacttttgtcggaacttccacaagctgaatgtttgtcgaaacgtcaacaatcccatctttggtcgaaaggagctggaatccgttctggggtgttggactgtcgatgacgatcctttaatgaatcggtcagggggatgttacaataatagagacacattcctgcagaatccacagtacatattcactgtccctgaagatggccataaggttattatgagtctccagcagaaagatctgcgcacatataggaggatggggcgacctgataactatataatcggattcgagctgttcaaggtggagatgaatcgtaagttccgactgcaccatttgtacatacaagaacgagccggaaccagtacgtacattgacacccgcacagtgttcttgtctaagtatctgaagaagggaaattacgtacttgtccccacgatgtttcagcatgggcgtacatctgaatttctgcttagaatattttccgaggttccagtacaattaagggagttaaccttggatatgcccaagatgtcatgctggaatctcgcccgtggataccccaaggttgttactcaaattacagtgcactctgccgaggacttagaaaaaaagtatgccaacgaaacagtaaacccctacctggtaattaaatgcggcaaggaggaagtgcgttcccccgtgcagaaaaacaccgtccacgctatttttgacacacaagccattttctataggagaacgaccgatatacccattatagtacaagtatggaacagcaggaaattctgcgaccagttcttgggccaggtgaccctggacgcagacccttctgactgcagggatctgaaatctttgtatcttagaaagaagggtggtccaacagctaaagtgaagcagggccacatctcctttaaagttatcagttccgacgatctcactgaactctag

SEQ ID NO: 178974 - DNA, 1894 bp, Artificial Sequence
  derived and/or modified sequence
atcaaagacagcagacttttctgtgatccaacatttctgcctgagaatgattctcttttctacaaccgactgcttcctggaaaggtggtgtggaaacgtccccaggacatctgtgatgacccccatctgattgtgggcaacattagcaaccaccagctgacccaagggagactggggcacaagccaatggtttctgcattttcctgtttggctgttcaggagtctcattggacaaagacaattcccaaccataaggaacaggaatgggaccctcaaaaaacagaaaaatacgctgggatatttcactttcgtttctggcattttggagaatggactgaagtggtgattgatgacttgttgcccaccattaacggagatctggtcttctctttctccacttccatgaatgagttttggaatgctctgctggaaaaagcttatgcaaatctcccaatcaggaggagcaagaagttgaaactgattggggtctgctgaagggccatacctataccatgactgatattcgcaaaattcgtcttggagagagacttgtggaagtcttcagtgctgagaaggtgtatatggttcgcctgagaaaccccttgggaagacaggaatggagtggcccctggagtgaaatttctgaagagtggcagcaactgactgcatcagatcgcaagaacctggggcttgttatgtctgatgatggagagttttggatgagcttggaggacttttgccgcaactttcacaaactgaatgtctgccgcaatgtgaacaaccctatttttggccgaaaggagctggaatcggtgttgggatgctggactgtggatgatgatcccctgatgaaccgctcaggaggctgctataacaaccgtgataccttcctgcagaatccccagtacatcttcactgtgcctgaggatgggcacaaggtcattatgtcactgcagcagaaggacctgcgcacttaccgccgaatgggaagacctgacaattacatcattggctttgagctcttcaaggtggagatgaaccgcaaattccgcctccaccacctctacatccaggagcgtgctgggacttccacctatattgacacccgcacagtgtttctgagcaagtacctgaagaagggcaactatgtgcttgtcccaaccatgttccagcatggtcgcaccagcgagtttctcctgagaatcttctctgaagtgcctgtccagctcagggaactgactctggacatgcccaaaatgtcctgctggaacctggctcgtggctacccgaaagtagttactcagatcactgttcacagtgctgaggacctggagaagaagtatgccaatgaaactgtaaacccatatttggtcatcaaatgtggaaaggaggaagtccgttctcctgtccagaagaatacagttcatgccatttttgacacccaggccattttctacagaaggaccactgacattcctattatagtacaggtctggaacagccgaaaattctgtgatcagttcttggggcaggttactctggatgctgaccccagcgactgccgtgatctgaagtctctgtacctgcgtaagaagggtggtccaactgccaaagtcaagcaaggccacatcagcttcaaggttatttccagcgatgatctcactgagctctaaatctgcaatcccagagaatcctgacaaagcgtgccacccttttattttccgtcaggtgccaggtcttagttaagattcacaatctttagaaagaatgagattcacaataattaactcttcctctcttctgataaattccccatacctcccaatccaagtagcatctgtagctacataacctatatacctccagcagctggacatggggaggcgacagtcct

SEQ ID NO: 178975 - DNA, 3568 bp, Artificial Sequence
  derived and/or modified sequence
atagttttcaggttaagaaagccagaatctttgttcagccacactgactgaacagacttttagtggggttacctggctaacagcagcagcggcaacggcagcagcagcagcagcagcagcagcagcagcagcagggctcctgggataactcaggcatagttcaacactatgggtcctcctctgaagctcttcaaaaaccagaaataccaggaactgaagcaggaatgcatcaaagacagcagacttttctgtgatccaacatttctgcctgagaatgattctcttttctacaaccgactgcttcctggaaaggtggtgtggaaacgtccccaggacatctgtgatgacccccatctgattgtgggcaacattagcaaccaccagctgacccaagggagactggggcacaagccaatggtttctgcattttcctgtttggctgttcaggagtctcattggacaaagacaattcccaaccataaggaacaggaatgggaccctcaaaaaacagaaaaatacgctgggatatttcactttcgtttctggcattttggagaatggactgaagtggtgattgatgacttgttgcccaccattaacggagatctggtcttctctttctccacttccatgaatgagttttggaatgctctgctggaaaaagcttatgcaaagctgctaggctgttatgaggccctggatggtttgaccatcactgatattattgtggacttcacgggcacattggctgaaactgttgacatgcagaaaggaagatacactgagcttgttgaggagaagtacaagctattcggagaactgtacaaaacatttaccaaaggtggtctgatctgctgttccattgagtctcccaatcaggaggagcaagaagttgaaactgattggggtctgctgaagggccatacctataccatgactgatattcgcaaaattcgtcttggagagagacttgtggaagtcttcagtgctgagaaggtgtatatggttcgcctgagaaaccccttgggaagacaggaatggagtggcccctggagtgaaatttctgaagagtggcagcaactgactgcatcagatcgcaagaacctggggcttgttatgtctgatgatggagagttttggatgagcttggaggacttttgccgcaactttcacaaactgaatgtctgccgcaatgtgaacaaccctatttttggccgaaaggagctggaatcggtgttgggatgctggactgtggatgatgatcccctgatgaaccgctcaggaggctgctataacaaccgtgataccttcctgcagaatccccagtacatcttcactgtgcctgaggatgggcacaaggtcattatgtcactgcagcagaaggacctgcgcacttaccgccgaatgggaagacctgacaattacatcattggctttgagctcttcaaggtggagatgaaccgcaaattccgcctccaccacctctacatccaggagcgtgctgggacttccacctatattgacacccgcacagtgtttctgagcaagtacctgaagaagggcaactatgtgcttgtcccaaccatgttccagcatggtcgcaccagcgagtttctcctgagaatcttctctgaagtgcctgtccagctcagggaactgactctggacatgcccaaaatgtcctgctggaacctggctcgtggctacccgaaagtagttactcagatcactgttcacagtgctgaggacctggagaagaagtatgccaatgaaactgtaaacccatatttggtcatcaaatgtggaaaggaggaagtccgttctcctgtccagaagaatacagttcatgccatttttgacacccaggccattttctacagaaggaccactgacattcctattatagtacaggtctggaacagccgaaaattctgtgatcagttcttggggcaggttactctggatgctgaccccagcgactgccgtgatctgaagtctctgtacctgcgtaagaagggtggtccaactgccaaagtcaagcaaggccacatcagcttcaaggttatttccagcgatgatctcactgagctctaaatctgcaatcccagagaatcctgacaaagcgtgccacccttttattttccgtcaggtgccaggtcttagttaagattcacaatctttagaaagaatgagattcacaataattaactcttcctctcttctgataaattccccatacctcccaatccaagtagcatctgtagctacataacctatatacctccagcagctggacatggggaggcgacagtcctatctagacatcatacacatttgccaagaaaggatctctggggcttccgggggtgagattcaagtaggacaataacaagaggctggacaccctacagatgtctttgatgttttcagttgtttgatatatctcccctgtagggcatgttgaggaaggaggagggctgatcaaggccaagctggtctagcctgacatcctagctcctgactgaacactatagacttcccagcagcatttcacccagcagccagagccggctttaagtccccaacccttacagacaccactgccaccaccaccaaccacgaccaccaccaccaccaccactcaccaccatcatcacctccggaaagtgtagtcctgccctaacccaagtcacccccgacagtaaattttaccttcatgttgagaaagcttcctggtgcttaatcaagagctggagttcaatgagtcctagacagtgagaggggcctgagcttcagctcaatggaagcctgctgtgtgccacaagacggaaaagtggaagaagctgcagtgggagacaaagcctcggtcccccacccatccacacacacctacactcacacacgcgcacatgggcgcgcacgaactaccattcaggcagtcagtgggcaagaggaaagataagtaagtaccatacacacctaaaagatgagagaattcatccagacatattacagccagtttggggcccctgactgcaatgtgaaacctctcgctgctgctaggtttacaaacaagcccattgtcctgtgcctcctaatatcatttgtactgaagaccccatctggggacttgagactttggtcccagcccagactcctcagacttttctctcagttgggatgcttcactcgctgggggtgtttgtttgccctctcatttttcagtacttctacagaattttctctagagtcagtcattatgaaatgtacttccctccatcttaacctatcaactttctgcccctccttcaaggcccagtataaatgccacctcctccatgaagccttccctaattccaccccaaacccccaccttcaacaatatttcaacgcttctgcaatgatgaaaaagaaacatagttgtagtacttagcctacctagaccagcaagcattcatttttagctcgctcattttttaccatgttttccagtctgtttaacttctgcagtgccttcactacactgccttacataaaccaaatcacaataaagttcatattcagtaca

SEQ ID NO: 178976 - DNA, 1926 bp, Artificial Sequence
  derived and/or modified sequence
atgggcccccccctgaagctgttcaagaaccagaagtaccaggagctgaagcaggagtgcatcaaggacagcagactgttctgcgaccccaccttcctgcccgagaacgacagcctgttctacaacagactgctgcccggcaaggtggtgtggaagagaccccaggacatctgcgacgacccccacctgatcgtgggcaacatcagcaaccaccagctgacccagggcagactgggccacaagcccatggtgagcgccttcagctgcctggccgtgcaggagagccactggaccaagaccatccccaaccacaaggagcaggagtgggacccccagaagaccgagaagtacgccggcatcttccacttcagattctggcacttcggcgagtggaccgaggtggtgatcgacgacctgctgcccaccatcaacggcgacctggtgttcagcttcagcaccagcatgaacgagttctggaacgccctgctggagaaggcctacgccaagctgctgggctgctacgaggccctggacggcctgaccatcaccgacatcatcgtggacttcaccggcaccctggccgagaccgtggacatgcagaagggcagatacaccgagctggtggaggagaagtacaagctgttcggcgagctgtacaagaccttcaccaagggcggcctgatctgctgcagcatcgagagccccaaccaggaggagcaggaggtggagaccgactggggcctgctgaagggccacacctacaccatgaccgacatcagaaagatcagactgggcgagagactggtggaggtgttcagcgccgagaaggtgtacatggtgagactgagaaaccccctgggcagacaggagtggagcggcccctggagcgagatcagcgaggagtggcagcagctgaccgccagcgacagaaagaacctgggcctggtgatgagcgacgacggcgagttctggatgagcctggaggacttctgcagaaacttccacaagctgaacgtgtgcagaaacgtgaacaaccccatcttcggcagaaaggagctggagagcgtgctgggctgctggaccgtggacgacgaccccctgatgaacagaagcggcggctgctacaacaacagagacaccttcctgcagaacccccagtacatcttcaccgtgcccgaggacggccacaaggtgatcatgagcctgcagcagaaggacctgagaacctacagaagaatgggcagacccgacaactacatcatcggcttcgagctgttcaaggtggagatgaacagaaagttcagactgcaccacctgtacatccaggagagagccggcaccagcacctacatcgacaccagaaccgtgttcctgagcaagtacctgaagaagggcaactacgtgctggtgcccaccatgttccagcacggcagaaccagcgagttcctgctgagaatcttcagcgaggtgcccgtgcagctgagagagctgaccctggacatgcccaagatgagctgctggaacctggccagaggctaccccaaggtggtgacccagatcaccgtgcacagcgccgaggacctggagaagaagtacgccaacgagaccgtgaacccctacctggtgatcaagtgcggcaaggaggaggtgagaagccccgtgcagaagaacaccgtgcacgccatcttcgacacccaggccatcttctacagaagaaccaccgacatccccatcatcgtgcaggtgtggaacagcagaaagttctgcgaccagttcctgggccaggtgaccctggacgccgaccccagcgactgcagagacctgaagagcctgtacctgagaaagaagggcggccccaccgccaaggtgaagcagggccacatcagcttcaaggtgatcagcagcgacgacctgaccgagctgtag

SEQ ID NO: 178977 - protein, 1098 aa, Artificial Sequence
  derived and/or modified sequence
MLEGDLVSKMLRAVLQSHKNGVALPRLQGEYRSLTGDWIPFKQLGFPTLEAYLRSVPAVVRIETSRSGEITCYAMACTETARIAQLVARQRSSKRKTGRQVNCQMRVKKTMPFFLEGKPKATLRQPGFASNFSVGKKPNPAPLRDKGNSVGVKPDAEMSPYMLHTTLGNEAFKDIPVQRHVTMSTNNRFSPKASLQPPLQMHLSRTSTKEMSDNLNQTVEKPNVKPPASYTYKMDEVQNRIKEILNKHNNGIWISKLPHFYKELYKEDLNQGILQQFEHWPHICTVEKPCSGGQDLLLYPAKRKQLLRSELDTEKVPLSPLPGPKQTPPLKGCPTVMAGDFKEKVADLLVKYTSGLWASALPKAFEEMYKVKFPEDALKNLASLSDVCSIDYISGNPQKAILYAKLPLPTDKIQKDAGQAHGDNDIKAMVEQEYLQVEESIAESANTFMEDITVPPLMIPTEASPSVLVVELSNTNEVVIRYVGKDYSAAQELMEDEMKEYYSKNPKITPVQAVNVGQLLAVNAEEDAWLRAQVISTEENKIKVCYVDYGFSENVEKSKAYKLNPKFCSLSFQATKCKLAGLEVLSDDPDLVKVVESLTCGKIFAVEILDKADIPLVVLYDTSGEDDININATCLKAICDKSLEVHLQVDAMYTNVKVTNICSDGTLYCQVPCKGLNKLSDLLRKIEDYFHCKHMTSECFVSLPFCGKICLFHCKGKWLRVEITNVHSSRALDVQFLDSGTVTSVKVSELREIPPRFLQEMIAIPPQAIKCCLADLPQSIGMWTPDAVLWLRDSVLNCSDCSIKVTKVDETRGIAHVYLFTPKNFPDPHRSINRQITNADLWKHQKDVFLSAISSGADSPNSKNGNMPMSGNTGENFRKNLTDVIKKSMVDHTSAFSTEELPPPVHLSKPGEHMDVYVPVACHPGYFVIQPWQEIHKLEVLMEEMILYYSVSEERHIAVEKDQVYAAKVENKWHRVLLKGILTNGLVSVYELDYGKHELVNIRKVQPLVDMFRKLPFQAVTAQLAGVKCNQWSEEASMVFRNHVEKKPLVALVQTVIENANPWDRKVVVYLVDTSLPDTDTWIHDFMSEYLIELSKVN

SEQ ID NO: 178978 - protein, 1024 aa, Artificial Sequence
  derived and/or modified sequence
MACTETARIAQLVARQRSSKRKTGRQVNCQMRVKKTMPFFLEGKPKATLRQPGFASNFSVGKKPNPAPLRDKGNSVGVKPDAEMSPYMLHTTLGNEAFKDIPVQRHVTMSTNNRFSPKASLQPPLQMHLSRTSTKEMSDNLNQTVEKPNVKPPASYTYKMDEVQNRIKEILNKHNNGIWISKLPHFYKELYKEDLNQGILQQFEHWPHICTVEKPCSGGQDLLLYPAKRKQLLRSELDTEKVPLSPLPGPKQTPPLKGCPTVMAGDFKEKVADLLVKYTSGLWASALPKAFEEMYKVKFPEDALKNLASLSDVCSIDYISGNPQKAILYAKLPLPTDKIQKDAGQAHGDNDIKAMVEQEYLQVEESIAESANTFMEDITVPPLMIPTEASPSVLVVELSNTNEVVIRYVGKDYSAAQELMEDEMKEYYSKNPKITPVQAVNVGQLLAVNAEEDAWLRAQVISTEENKIKVCYVDYGFSENVEKSKAYKLNPKFCSLSFQATKCKLAGLEVLSDDPDLVKVVESLTCGKIFAVEILDKADIPLVVLYDTSGEDDININATCLKAICDKSLEVHLQVDAMYTNVKVTNICSDGTLYCQVPCKGLNKLSDLLRKIEDYFHCKHMTSECFVSLPFCGKICLFHCKGKWLRVEITNVHSSRALDVQFLDSGTVTSVKVSELREIPPRFLQEMIAIPPQAIKCCLADLPQSIGMWTPDAVLWLRDSVLNCSDCSIKVTKVDETRGIAHVYLFTPKNFPDPHRSINRQITNADLWKHQKDVFLSAISSGADSPNSKNGNMPMSGNTGENFRKNLTDVIKKSMVDHTSAFSTEELPPPVHLSKPGEHMDVYVPVACHPGYFVIQPWQEIHKLEVLMEEMILYYSVSEERHIAVEKDQVYAAKVENKWHRVLLKGILTNGLVSVYELDYGKHELVNIRKVQPLVDMFRKLPFQAVTAQLAGVKCNQWSEEASMVFRNHVEKKPLVALVQTVIENANPWDRKVVVYLVDTSLPDTDTWIHDFMSEYLIELSKVN

SEQ ID NO: 178979 - protein, 418 aa, Artificial Sequence
  derived and/or modified sequence
MYTNVKVTNICSDGTLYCQVPCKGLNKLSDLLRKIEDYFHCKITNVHSSRALDVQFLDSGTVTSVKVSELREIPPRFLQEMIAIPPQAIKCCLADLPQSIGMWTPDAVLWLRDSVLNCSDCSIKVTKVDETRGIAHVYLFTPKNFPDPHRSINRQITNADLWKHQKDVFLSAISSGADSPNSKNGNMPMSGNTGENFRKNLTDVIKKSMVDHTSAFSTEELPPPVHLSKPGEHMDVYVPVACHPGYFVIQPWQEIHKLEVLMEEMILYYSVSEERHIAVEKDQVYAAKVENKWHRVLLKGILTNGLVSVYELDYGKHELVNIRKVQPLVDMFRKLPFQAVTAQLAGVKCNQWSEEASMVFRNHVEKKPLVALVQTVIENANPWDRKVVVYLVDTSLPDTDTWIHDFMSEYLIELSKVN

SEQ ID NO: 178980 - DNA, 3297 bp, Artificial Sequence
  derived and/or modified sequence
atgctggagggcgacctggtgagcaagatgctgagagccgtgctgcagagccacaagaacggcgtggccctgcccagactgcagggcgagtacagaagcctgaccggcgactggatccccttcaagcagctgggcttccccaccctggaggcctacctgagaagcgtgcccgccgtggtgagaatcgagaccagcagaagcggcgagatcacctgctacgccatggcctgcaccgagaccgccagaatcgcccagctggtggccagacagagaagcagcaagagaaagaccggcagacaggtgaactgccagatgagagtgaagaagaccatgcccttcttcctggagggcaagcccaaggccaccctgagacagcccggcttcgccagcaacttcagcgtgggcaagaagcccaaccccgcccccctgagagacaagggcaacagcgtgggcgtgaagcccgacgccgagatgagcccctacatgctgcacaccaccctgggcaacgaggccttcaaggacatccccgtgcagagacacgtgaccatgagcaccaacaacagattcagccccaaggccagcctgcagccccccctgcagatgcacctgagcagaaccagcaccaaggagatgagcgacaacctgaaccagaccgtggagaagcccaacgtgaagccccccgccagctacacctacaagatggacgaggtgcagaacagaatcaaggagatcctgaacaagcacaacaacggcatctggatcagcaagctgccccacttctacaaggagctgtacaaggaggacctgaaccagggcatcctgcagcagttcgagcactggccccacatctgcaccgtggagaagccctgcagcggcggccaggacctgctgctgtaccccgccaagagaaagcagctgctgagaagcgagctggacaccgagaaggtgcccctgagccccctgcccggccccaagcagaccccccccctgaagggctgccccaccgtgatggccggcgacttcaaggagaaggtggccgacctgctggtgaagtacaccagcggcctgtgggccagcgccctgcccaaggccttcgaggagatgtacaaggtgaagttccccgaggacgccctgaagaacctggccagcctgagcgacgtgtgcagcatcgactacatcagcggcaacccccagaaggccatcctgtacgccaagctgcccctgcccaccgacaagatccagaaggacgccggccaggcccacggcgacaacgacatcaaggccatggtggagcaggagtacctgcaggtggaggagagcatcgccgagagcgccaacaccttcatggaggacatcaccgtgccccccctgatgatccccaccgaggccagccccagcgtgctggtggtggagctgagcaacaccaacgaggtggtgatcagatacgtgggcaaggactacagcgccgcccaggagctgatggaggacgagatgaaggagtactacagcaagaaccccaagatcacccccgtgcaggccgtgaacgtgggccagctgctggccgtgaacgccgaggaggacgcctggctgagagcccaggtgatcagcaccgaggagaacaagatcaaggtgtgctacgtggactacggcttcagcgagaacgtggagaagagcaaggcctacaagctgaaccccaagttctgcagcctgagcttccaggccaccaagtgcaagctggccggcctggaggtgctgagcgacgaccccgacctggtgaaggtggtggagagcctgacctgcggcaagatcttcgccgtggagatcctggacaaggccgacatccccctggtggtgctgtacgacaccagcggcgaggacgacatcaacatcaacgccacctgcctgaaggccatctgcgacaagagcctggaggtgcacctgcaggtggacgccatgtacaccaacgtgaaggtgaccaacatctgcagcgacggcaccctgtactgccaggtgccctgcaagggcctgaacaagctgagcgacctgctgagaaagatcgaggactacttccactgcaagcacatgaccagcgagtgcttcgtgagcctgcccttctgcggcaagatctgcctgttccactgcaagggcaagtggctgagagtggagatcaccaacgtgcacagcagcagagccctggacgtgcagttcctggacagcggcaccgtgaccagcgtgaaggtgagcgagctgagagagatcccccccagattcctgcaggagatgatcgccatccccccccaggccatcaagtgctgcctggccgacctgccccagagcatcggcatgtggacccccgacgccgtgctgtggctgagagacagcgtgctgaactgcagcgactgcagcatcaaggtgaccaaggtggacgagaccagaggcatcgcccacgtgtacctgttcacccccaagaacttccccgacccccacagaagcatcaacagacagatcaccaacgccgacctgtggaagcaccagaaggacgtgttcctgagcgccatcagcagcggcgccgacagccccaacagcaagaacggcaacatgcccatgagcggcaacaccggcgagaacttcagaaagaacctgaccgacgtgatcaagaagagcatggtggaccacaccagcgccttcagcaccgaggagctgcccccccccgtgcacctgagcaagcccggcgagcacatggacgtgtacgtgcccgtggcctgccaccccggctacttcgtgatccagccctggcaggagatccacaagctggaggtgctgatggaggagatgatcctgtactacagcgtgagcgaggagagacacatcgccgtggagaaggaccaggtgtacgccgccaaggtggagaacaagtggcacagagtgctgctgaagggcatcctgaccaacggcctggtgagcgtgtacgagctggactacggcaagcacgagctggtgaacatcagaaaggtgcagcccctggtggacatgttcagaaagctgcccttccaggccgtgaccgcccagctggccggcgtgaagtgcaaccagtggagcgaggaggccagcatggtgttcagaaaccacgtggagaagaagcccctggtggccctggtgcagaccgtgatcgagaacgccaacccctgggacagaaaggtggtggtgtacctggtggacaccagcctgcccgacaccgacacctggatccacgacttcatgagcgagtacctgatcgagctgagcaaggtgaactag

SEQ ID NO: 178981 - DNA, 3297 bp, Artificial Sequence
  derived and/or modified sequence
atgctggagggcgatctggtttccaagatgctgagagccgtgcttcagagccacaaaaatggcgtagcgctgcctcgactccaaggcgagtatcggagcctgacaggggattggatcccttttaagcaactgggctttcctacactggaagcttatctgagatcagttccggccgtggtgcgcatcgagacctctcggtcaggcgaaattacatgttatgccatggcttgcacagagacggctcgaattgcacagttagttgcgcgccagagatccagcaagcgcaagaccgggagacaggtcaattgtcagatgagagtcaaaaagactatgcccttcttcttagaaggtaaacccaaagccacgttgaggcaaccgggctttgcaagtaatttctcagtgggcaaaaagcccaatcccgcccccctgcgagataaaggcaactctgtgggcgtgaagcccgacgcggagatgagcccctatatgctgcatactacccttgggaacgaagccttcaaggacatcccagtccagagacacgttactatgtcaactaataacagattcagcccaaaagccagtttgcagcctcccctgcagatgcatctgtcaaggacctccacaaaagagatgtctgacaatctcaatcagactgtagaaaaacccaatgtcaagccacccgcctcttatacgtacaaaatggacgaggtacagaacagaatcaaagaaatcctaaacaaacataacaatgggatttggatttctaagttacctcacttctataaggagctgtataaggaagatcttaaccagggcatcctacagcagttcgagcattggcctcatatctgtacagttgagaagccctgctccggggggcaagatctccttctgtaccctgcgaaacgcaagcaactcctgcgctctgagctggataccgagaaggtgccgcttagtcctctcccggggcccaagcagacccctccgctcaaggggtgtcccaccgtgatggccggggactttaaggaaaaagtagccgacttgctggttaagtatacctcaggactttgggcaagcgcactgcctaaagcattcgaggagatgtacaaggtaaaatttcctgaggatgctcttaagaaccttgcgagcctcagcgatgtttgttctatcgattacatctcggggaacccccagaaggccatactgtatgctaagttgcctctgcccactgataagatccagaaagatgccggacaggcccatggggacaatgatatcaaagccatggtagagcaggagtatctgcaagtggaggaatctattgcagagagcgccaacaccttcatggaagacattaccgtccctccactgatgattccaacagaggcatcgccctccgtgctcgtcgtggagctgagcaacaccaacgaagtcgtgattcggtatgtgggcaaggactactcagcagcacaagagttgatggaggacgagatgaaggagtactatagtaaaaaccctaaaattacaccggtacaggccgttaatgttggccaactcctggccgtgaatgccgaagaggatgcttggctacgcgcccaggttattagcaccgaagagaataaaatcaaggtgtgttatgtggactacggtttctccgagaatgtcgagaaaagtaaagcgtataagctgaatcctaaattctgctcattgagcttccaggcaacaaagtgcaaactcgccggcctagaagtactcagtgatgatccagacctggtgaaggtagtcgaatctctcacgtgcggaaaaatatttgccgttgagatcctggataaggcagacatcccactcgtcgttctgtatgatacttcaggggaggacgatattaacatcaacgccacatgtcttaaggccatatgtgacaagtcacttgaggtccatctgcaggtggatgctatgtatacaaacgttaaggtgacaaatatctgttctgatgggactctgtattgtcaggttccttgcaagggcctaaacaaactgtccgacctgttgcggaaaatcgaggactattttcactgcaagcatatgacttccgaatgttttgttagcctgcctttttgcggcaaaatctgcctgttccattgtaaggggaaatggctcagggtggaaataaccaacgtccattcctcgagggccctggatgtgcaattcctggactctggcactgtcaccagtgttaaggtgagcgaactgcgcgaaatcccgcctcgatttctccaggaaatgattgccatccccccacaggccataaagtgctgcctcgcagatctcccccagagcattggcatgtggacacctgacgccgtcctctggcttcgcgactcagtgttgaactgcagcgattgttcaattaaggtgacaaaggtcgatgaaaccagaggtatcgcacacgtgtatttgtttacaccaaaaaattttcctgatcctcaccgatcaatcaaccgccaaatcaccaacgccgacctgtggaaacaccagaaagatgtttttctcagtgccatctctagcggcgctgactcacccaattctaagaacggaaatatgcccatgtctgggaacaccggggaaaacttccggaaaaacctaactgatgtgatcaaaaaatccatggtcgatcacacttctgccttcagcaccgaggaattgcccccccctgtgcacctctccaagcccggagagcatatggatgtctacgtgcctgtcgcctgccatccggggtactttgtcatccagccctggcaagagatccataaattagaagtcctcatggaggagatgattctctattattccgtgtccgaggagagacacattgccgtggaaaaggatcaagtctatgccgcaaaagtcgagaacaagtggcacagggttcttctgaagggcatactgaccaatggtctcgtgtccgtttacgagctcgactacggaaagcatgagctggttaatatccgaaaggtccagcccctggtggacatgtttagaaagttgccatttcaggctgtgactgctcaactggcaggcgtgaagtgcaaccagtggagtgaggaagccagtatggtgttcaggaaccacgtcgagaagaagcccctcgttgcacttgtacagacagtgatcgagaacgccaatccttgggatcgtaaagtggtagtgtacctggtggatacttctctcccggacacagatacttggatccatgattttatgtctgaatacctaatcgagttgtccaaagtgaactag

SEQ ID NO: 178982 - DNA, 3297 bp, Artificial Sequence
  derived and/or modified sequence
atgctggagggggacctggtgtccaagatgctgcgggctgtgctgcagagccacaagaatggagtggccctgccccggctgcagggcgagtaccgcagcctgactggagactggatccccttcaagcagctgggcttccccaccctggaggcctacctgcggtctgtgcctgctgtggtgcgcatcgagaccagccgctctggagagatcacctgctacgccatggcctgcacagaaacagccagaattgcccagctggtggcccggcagaggagcagcaagaggaagacaggccggcaggtgaactgccagatgagggtgaagaagaccatgcccttcttcctggagggcaagcccaaggccaccctgcggcagcccggctttgccagcaacttctctgtgggcaagaagcccaacccagcccccctgcgggacaagggcaacagcgtgggcgtgaagccagatgctgagatgagcccctacatgctgcacaccaccctgggcaatgaggccttcaaggacatccctgtgcagagacatgtgaccatgagcaccaacaaccgcttcagccccaaggccagcctgcagccccccctgcagatgcacctgagcaggaccagcaccaaggagatgtctgacaacctgaaccagacagtggagaagcccaacgtgaagcccccagccagctacacctacaagatggatgaggtgcagaaccgcatcaaggagatcctgaacaagcacaacaacggcatctggatcagcaagctgccccacttctacaaggagctgtacaaggaggacctgaaccagggcatcctgcagcagtttgagcactggccccacatctgcaccgtggagaagccctgcagcggcggccaggacctgctgctgtacccagccaagaggaagcagctgctgcggtctgagctggacacagagaaggtgcccctgagccccctgcccggccccaagcagaccccacccctgaagggctgccccaccgtgatggccggggacttcaaggagaaggtggccgacctgctggtgaagtacaccagcggcctgtgggccagcgccctgcccaaggcctttgaggagatgtacaaggtgaagttcccagaagatgccctgaagaacctggccagcctgagtgatgtgtgcagcattgactacatcagcggcaacccccagaaggccatcctgtatgccaagctgcccctgcccacagacaagatccagaaggatgctggccaggcccatggagacaatgacatcaaggccatggtggagcaggagtacctgcaggtggaggagagcattgctgagagcgccaacaccttcatggaggacatcaccgtgccccccctgatgatccccacagaggccagccccagcgtgctggtggtggagctgagcaacaccaatgaggtggtgatccgctacgtgggcaaggactacagcgctgcccaggagctgatggaggatgagatgaaggagtactacagcaagaaccccaagatcacccctgtgcaggccgtgaatgtgggccagctgctggccgtgaatgctgaggaggatgcctggctgcgggcccaggtgatcagcacagaggagaacaagatcaaggtgtgctacgtggactatggcttctctgaaaatgtggagaagagcaaggcctacaagctgaaccccaagttctgcagcctgtccttccaggccaccaagtgcaagctggccggcctggaggtgctgagtgatgatcctgacctggtgaaggtggtggagagcctgacctgtgggaagatctttgctgtggagatcctggacaaggctgacatccccctggtggtgctgtatgacaccagcggagaagatgacatcaacatcaatgccacctgcctgaaggccatctgtgacaagagcctggaggtgcacctgcaggtggatgccatgtacaccaacgtgaaggtgaccaacatctgcagtgatggcaccctgtactgccaggtgccctgcaagggcctgaacaagctgagtgacctgctgaggaagattgaggactacttccactgcaagcacatgaccagcgagtgctttgtgtccctgcccttctgtgggaagatctgcctcttccactgcaagggcaagtggctgcgggtggagatcaccaacgtgcacagcagccgggccctggatgtgcagttcctggacagcggcaccgtgacctctgtgaaggtgtctgagctgcgggagatccccccacgcttcctgcaggagatgattgccatccccccccaggccatcaagtgctgcctggccgacctgccccagagcatcggcatgtggaccccagatgctgtgctgtggctgcgggacagcgtgctgaactgcagcgactgcagcatcaaggtgaccaaggtggatgagacccggggcatcgcccacgtgtacctgttcacccccaagaacttcccagacccccacaggagcatcaaccggcagatcaccaatgctgacctgtggaagcaccagaaggatgtgttcctgagcgccatcagcagtggagctgacagccccaacagcaagaatggaaacatgcccatgagcggcaacacaggagagaacttcaggaagaacctgacagatgtgatcaagaagtccatggtggaccacaccagcgccttcagcacagaggagctgcccccacctgtgcacctgagcaagccaggagagcacatggatgtgtatgtgcctgtggcctgccaccctggctactttgtgatccagccctggcaggagatccacaagctggaggtgctgatggaggagatgatcctgtactacagcgtgtctgaggagcggcacatcgctgtggagaaggaccaggtgtatgctgccaaggtggagaacaagtggcaccgggtgctgctgaagggcatcctgaccaacggcctggtgtctgtgtatgagctggactatggcaagcatgagctggtgaacatcaggaaggtgcagcccctggtggacatgttcaggaagctgcccttccaggccgtgacagcccagctggccggcgtgaagtgcaaccagtggagcgaggaggcctccatggtgttcagaaatcatgtggagaagaagcccctggtggccctggtgcagacagtgattgaaaatgccaacccctgggacaggaaggtggtggtgtacctggtggacaccagcctgcctgacacagacacctggattcatgacttcatgtctgagtacctgattgagctgagcaaggtgaactag

SEQ ID NO: 178983 - DNA, 3297 bp, Artificial Sequence
  derived and/or modified sequence
atgctggagggcgacctggtgagcaagatgctgcgggccgtgctgcaaagccataagaacggcgtagcgctgccccggcttcaaggagaatatagatccttgaccggcgattggatcccattcaagcagctgggcttccccaccctggaagcctacctccgctcggtacctgctgtggtgagaattgagaccagccgctcaggagaaatcacctgttatgcgatggcctgtaccgaaaccgccagaatagctcagctcgtggcacgacagcggagcagcaaacggaaaaccgggcgccaggtaaactgccagatgcgcgtcaaaaaaactatgccattctttctcgaagggaagccaaaggcaacgctgcgtcagcctggattcgccagcaatttctctgtgggtaagaaacccaaccctgctcctctgcgcgataaaggcaatagtgtgggggtgaagcctgacgcagagatgtctccctatatgctccacactaccctcggaaacgaagcatttaaagacatccctgtgcagagacatgtgacaatgtcaacgaacaacaggtttagtccgaaagcaagcctgcagcctcctctgcaaatgcacctcagcagaacatctactaaggagatgagcgataacctgaaccagaccgttgagaaacccaacgttaagcctccagcctcttatacatacaagatggatgaagttcagaatcgtattaaagagattcttaacaagcacaataatggtatctggatctccaaactgccacacttttataaagagctttataaggaagacctcaaccaaggcattctgcagcaatttgaacattggccacatatatgcacagtcgagaaaccctgctctggaggccaggatctcctgctgtatcctgccaagcggaagcagctgctccgatccgaattggatactgaaaaggtgcctctatcccccctcccggggcctaaacagactcctcctcttaagggatgtccaactgttatggcaggcgattttaaggagaaggtggccgatttgctagtgaaatatacaagcggactctgggctagcgctctccctaaggcctttgaggaaatgtataaagttaagttccctgaagatgcgctgaagaacctcgcttcactgagtgacgtctgctcgattgattatataagtggtaatccccaaaaggctatcctctacgccaagcttcccctgcctacagataagattcaaaaggatgcgggccaggctcacggagacaatgacattaaagctatggttgagcaggagtatttgcaggtggaggaaagcatcgcagagtctgctaacacctttatggaagacattactgtgccacctttgatgatcccaacagaagctagtcccagcgttctggtggtggaactaagtaacaccaacgaagtggtgattcggtacgttggcaaggactatagcgctgctcaagaattaatggaagatgagatgaaggagtactattcgaagaatcccaaaatcactccagtacaagctgttaacgtgggccagctgctggctgtcaacgccgaagaagacgcctggctacgggcgcaggttatatccaccgaggagaacaagattaaagtctgttacgtggattatgggttctcagagaacgtcgagaaaagtaaagcttataagcttaaccctaaattttgtagtcttagtttccaagcaacaaagtgcaagctcgcaggactcgaggtgctgtccgatgacccagacctggtcaaggtggtcgaatcactgacttgcggtaaaatcttcgccgtggagatcctggacaaggccgatatcccactggtcgtgttgtatgacacgtccggggaggacgacatcaatattaatgctacatgcttaaaagcaatctgcgacaagtccctggaagtccacctacaagtggatgcaatgtacacaaatgtgaaggtcacgaacatctgctccgacggaacgctatattgccaagtgccatgtaaggggctgaacaaattgtcggatctgctccgcaagattgaagattacttccattgcaaacatatgaccagcgagtgctttgttagcctccccttctgtggaaaaatttgccttttccattgtaaaggaaaatggttgcgcgtggaaatcacgaatgtccacagttcccgcgcgctcgacgtgcaattcctggattccggcacggtgacaagtgtcaaggtaagtgagcttagagagatcccaccgcgcttcctgcaggaaatgattgccatccccccacaggcgattaaatgctgtctcgcggatttgccgcagtccatcggcatgtggacgcctgacgctgtgctatggctgcgggattccgttctgaactgctccgattgcagcattaaagtcacgaaggtggacgaaacccgggggatagcccacgtataccttttcacacctaagaacttccccgacccccaccgcagcatcaataggcagataacaaacgccgatctttggaaacaccagaaggacgtctttctgtccgcaatctctagcggggccgattcgccaaattccaaaaacggaaatatgcccatgagtggcaacactggagagaacttccggaaaaatcttactgatgtcatcaagaaatcgatggtagatcatacttccgctttcagtactgaggaactgcccccacccgtacaccttagtaagcccggcgagcatatggatgtttatgtcccggtcgcttgccaccctggttatttcgtgatccaaccatggcaggaaattcataaacttgaggtgctcatggaggagatgattctgtactattctgtgtcagaggagcgccacattgccgttgaaaaggaccaggtttatgctgccaaagtcgagaacaagtggcaccgggtgctgctgaagggtatcctaactaatggcttggtgtctgtgtatgagttggactacggaaaacacgagctcgttaatatccggaaggtgcagcccttagtggatatgtttcgcaagctgcccttccaagccgttacagcacagcttgcgggcgtcaagtgtaaccagtggtccgaggaagcttctatggtgtttagaaatcacgtagagaaaaaacctttggtcgctcttgtgcagacagtcatcgagaatgcgaatccctgggatagaaaggtggtggtgtatctcgtcgatacttcactgccagacaccgatacatggatccatgatttcatgagcgagtatttgatcgagttgtcgaaagttaattag

SEQ ID NO: 178984 - DNA, 3297 bp, Artificial Sequence
  derived and/or modified sequence
atgctcgaaggtgatctcgtgtcaaaaatgttaagggcagtgctgcaaagtcataaaaacggcgttgccctgccgaggttgcaaggggagtacaggagtttaacaggtgactggatacctttcaagcagttgggatttcctactctggaggcttatctccggtctgtccccgctgtggtgcgtatcgagaccagcaggagcggggagatcacctgttacgccatggcttgtactgaaacagcccgaattgcccaactggtggcacgccagaggtcctccaaaaggaagaccggcagacaagtaaactgccagatgagggtgaaaaagacaatgcctttttttctagaaggtaaacccaaagcaaccctgcgacagccgggattcgcctctaacttctctgtcgggaagaagcctaatccagcgcctctgcgtgataaagggaactcagttggggtaaaacctgatgcagaaatgtccccatatatgttgcatactacactgggaaacgaggcgttcaaggacatccccgttcagcgtcatgttacaatgagcacaaacaacagatttagccctaaagcctctttgcagcctccacttcagatgcacctctctcgaacctccaccaaagagatgtcagataatttaaatcagaccgtggagaaaccaaatgtgaaaccacctgccagctacacttacaaaatggatgaggttcaaaataggataaaagaaatccttaacaaacataataacggcatctggatttctaagctgccgcacttctataaggagttgtataaagaggacctcaaccaggggatcctgcaacaattcgaacactggccccacatttgcacagtggagaagccttgcagcgggggtcaagacctgctgctgtaccctgcaaaacgcaaacagcttctgcgatctgaactcgacactgaaaaggtacctctgtctcctttaccgggtcctaaacagactccaccgcttaaaggctgccccaccgtgatggctggggattttaaagagaaggtcgcagatctgcttgtgaagtacacttctggcctttgggcttccgcgctgcccaaggcttttgaagagatgtataaagtcaagttccctgaggatgcactaaagaatttagccagtctctccgacgtgtgctcgattgattatatttctggcaacccccagaaggccattctctacgctaagctgcccctgcctacagacaaaatccaaaaggatgcagggcaggcgcacggggacaatgatattaaggccatggtagagcaagaatacttacaggtggaggagtctattgcagaatccgctaatactttcatggaagatatcaccgtccctcctctgatgattccgacagaggccagtccttccgtgctggtagtcgagctgtccaataccaacgaggtggtgatccgatacgtcggaaaagattattcggccgctcaagagctgatggaggacgaaatgaaagagtactatagtaagaatcccaagatcactcctgtgcaagctgtcaacgtgggccaacttttagcggtcaacgcagaagaagacgcttggttacgcgcacaggtgatttcgaccgaggaaaataagatcaaagtgtgctacgtggactacggcttctcagaaaatgtggagaagtcaaaggcatataaactgaaccccaaattctgctcactctcctttcaggcgactaagtgcaaactggccggactggaggtgttgagcgacgatccagacttggtgaaggtagtggagtccctcacctgtgggaaaatctttgccgtcgagatcctcgataaagctgacatcccccttgttgtgctgtatgacacttctggcgaggacgatatcaacatcaacgctacttgcctgaaagccatctgcgataagtcccttgaggtccacttgcaggttgacgctatgtacacgaacgtgaaggtgaccaatatctgcagtgacggtacattatattgtcaggttccctgcaaaggactgaacaagttaagcgacctcctgcggaaaatcgaagactactttcactgcaaacacatgacaagcgagtgttttgtgtctctaccattttgcggtaaaatctgcttgttccattgcaaaggtaagtggcttagagtggagatcactaatgtgcactcatccagagcacttgacgtgcagtttctggactcagggactgtaacctccgttaaggttagtgaactgcgtgagattccacctcggtttctccaggaaatgatcgccatccctccgcaggccatcaaatgttgtttggctgacctgccgcaaagtattgggatgtggacgcctgatgccgtactttggctcagagactctgtcttgaattgtagcgattgcagcataaaagtgacaaaggtcgacgaaacccgcggaatcgcacatgtatatttgtttaccccaaagaattttcctgatcctcaccgctcgattaatcgccagattaccaacgctgatctgtggaaacaccagaaggatgtctttctgtccgccatttcttccggagctgactcccccaattcaaagaatggcaatatgcctatgtctggcaacacaggcgagaattttagaaagaatctgacggatgtgattaagaagtctatggtcgatcacacctccgctttcagtacagaagaacttccacctcctgtgcacctctctaaaccaggtgaacatatggacgtttacgttcctgttgcctgccatcccggttatttcgtcatccaaccatggcaggaaatccacaaactcgaggtgctgatggaggagatgattctgtattactctgtctccgaagagcgacatattgctgtcgaaaaggaccaggtatacgcagctaaagtcgaaaataagtggcatcgggtgctgctcaagggaatcctcaccaacgggcttgtgtcagtttacgaactcgattacgggaagcatgaactcgtgaacataagaaaagtgcagccactagtagacatgttccgcaagctccctttccaggccgtgactgctcagctcgccggtgtgaagtgtaaccagtggagtgaggaggcatccatggtgttcaggaaccacgtggagaagaaaccactggtggcacttgttcagactgtgattgaaaatgcaaatccctgggatagaaaggtggtggtgtacctggtggatacttctcttcctgacaccgatacgtggatccacgactttatgtccgagtacctgattgaactctccaaggtaaattag

SEQ ID NO: 178985 - DNA, 3834 bp, Artificial Sequence
  derived and/or modified sequence
ggcgacggtttcccttcccacgcgcggacgccggcgtgggccgacgcggccggagcgcccgcgcgtgcgcagagccgaggccaggctgccctcgaagcggggcggggcgaagcggggcggggccgagcagggcggggcgggggcttgaggtgattcccaagccgcggggcggctccggtggtgcggggaaaccgaaagtgggcggcggccgcggcggggcccctggcggagacggcggcaggagctgggcccagagacgcggggacgggccgtgggcccccggaacgaggcaaagatgctggaaggagatctggtttcaaagatgctacgagctgttctgcagtctcataagaatggagtagcattaccccggctccaaggagagtacagatccttgactggagactggatccccttcaaacagctaggtttccctacactagaagcctatctgagaagtgtgccagcagtggtcaggatagagactagtagatctggagagattacctgctatgccatggcctgcacagaaactgcaagaattgctcagcttgtggctcgtcaaaggagttctaaaaggaaaaccgggcgtcaagttaattgtcagatgagagtgaagaaaaccatgccattttttctagaaggaaaaccaaaagcaaccctcagacaaccaggatttgcttcaaatttttctgttggcaaaaaacctaatccagcaccgttaagagacaaaggaaactctgttggagttaagcctgatgctgaaatgtctccttatatgctacacacaactcttggaaatgaagcattcaaagacattccagtgcaaaggcatgtgaccatgtccaccaacaacaggtttagcccaaaggcgtcccttcaaccacctttgcagatgcatctctcaagaacctctactaaggaaatgagtgataatttaaatcagactgttgaaaaacccaatgtcaagcctcctgcctcttacacttataaaatggatgaggttcaaaatcgcataaaggaaatactaaacaagcataacaatggcatttggatatctaagcttccacatttttacaaagagttatataaagaagaccttaatcaaggaattttacaacagtttgaacactggcctcatatttgcacggtggagaaaccttgcagtggtggccaagatttacttctttatccagctaagagaaagcagcttttgagaagtgaactggatactgagaaagtacctctatccccactacctggtcccaaacaaacaccaccgttgaaagggtgtccaacagttatggcaggagactttaaagaaaaagtggcagacctgctggtgaaatacacaagtggcctttgggccagtgcacttccgaaagcatttgaggaaatgtacaaagtgaaattccctgaggatgccttaaaaaatcttgcctcactttctgatgtatgcagcatagactacatttctggaaatccccagaaggccattctctatgctaaacttccattgcccactgacaaaatccaaaaggatgcagggcaagcacatggtgataatgatatcaaggctatggttgaacaagagtatttgcaggtagaagaaagcattgctgaaagtgctaatacctttatggaggacataacagttcctcctttaatgattccaactgaagcatcaccatctgtattggtggttgaactgagcaacacaaatgaagtggttatcaggtatgtgggcaaagactattctgctgctcaggaattaatggaagatgagatgaaggaatattacagtaagaatcctaagatcacaccagtccaggctgtgaatgttgggcagttgctggccgtaaatgccgaggaggacgcctggttacgggcacaggtcatctcaacagaagagaacaaaataaaggtatgctatgttgactatggttttagtgaaaatgttgaaaaaagcaaagcatacaaattaaacccgaagttttgttcactctcatttcaagctacaaaatgtaagcttgcaggcttggaagtcctaagcgatgaccctgatctagtgaaggtggttgaatctttaacttgtggaaagatctttgcagtggaaatacttgacaaagctgacattccacttgttgttctgtacgatacctcaggagaagatgatatcaatatcaatgccacctgcttgaaggctatatgtgacaagtcactagaggttcacctgcaggttgacgccatgtacacaaatgtcaaagtaactaatatttgctctgatgggacactctactgccaggtgccttgtaagggtctgaacaagctcagtgaccttctacgtaagatagaggactacttccattgcaagcacatgacctctgagtgctttgtttcattacccttctgtgggaaaatctgcctcttccattgcaaaggaaaatggttacgagtagagatcacaaatgttcacagcagccgggctcttgatgttcagttcctggactctggcactgtgacatctgtaaaagtgtcagagctcagggaaattccacctcggtttctacaagaaatgattgcaataccacctcaggccattaagtgctgtttagcagatcttccacaatctattggcatgtggacaccagatgcagtgctgtggttaagagattctgttttgaattgctcggactgtagcattaaggttacaaaagtggatgaaaccagagggatcgcacatgtttatttatttacccctaagaacttccctgaccctcatcgcagtattaatcgccagattacaaatgcagacttgtggaagcatcagaaggatgtgtttttgagtgccatatccagtggagctgactctcccaacagcaaaaatggcaacatgcccatgtcgggcaacactggagagaatttcagaaagaacctcacagatgtcatcaaaaagtccatggtggaccatacgagcgctttctccacagaggaactgccacctcctgtccacttatcaaagccaggggaacacatggatgtgtatgtgcctgtggcctgtcacccaggctacttcgtcatccagccttggcaggagatacataagttggaagttctgatggaagagatgattctatattacagcgtgtctgaagagcgccacatagcagtggagaaagaccaagtgtatgctgcaaaagtggaaaataagtggcacagggtgcttttaaaaggaatcctgaccaatggactggtatctgtgtatgagctggattatggcaaacacgaattagtcaacataagaaaagtacagcccctagtggacatgttccgaaagctgcccttccaagcagtcacagctcaacttgcaggagtgaagtgcaaccagtggtctgaggaggcttctatggtgtttcgaaatcatgtggagaagaaacctctggtggcactggtgcagacagtcattgaaaatgctaacccttgggaccggaaagtagtggtctacttagtggacacatcgttgccagacaccgatacctggattcatgattttatgtcagagtatctgatagagctttcaaaagttaattaatgactgcctctgaaaccttgacaactaattcagattttttagcaataacaaaatgtagtaggcttaaaaaaaatcttaactctgctacatggctctgactgctgtgggggattgaaaagaatatgcttatgtttgatgaaagatatttaacaagttttgttttaacagagttgacttttcaaagaaaattgtacttgaattattactataatattagaataaaaatgtttatcaatataaaa

SEQ ID NO: 178986 - DNA, 3473 bp, Artificial Sequence
  derived and/or modified sequence
ttgaggtgattcccaagccgcggggcggctccggtggtgcggggaaaccgaaagtgggcggcggccgcggcggggcccctggcggagacggcggcaggagctgggcccagagacgcggggacgggccgtgggcccccggaacgagattacctgctatgccatggcctgcacagaaactgcaagaattgctcagcttgtggctcgtcaaaggagttctaaaaggaaaaccgggcgtcaagttaattgtcagatgagagtgaagaaaaccatgccattttttctagaaggaaaaccaaaagcaaccctcagacaaccaggatttgcttcaaatttttctgttggcaaaaaacctaatccagcaccgttaagagacaaaggaaactctgttggagttaagcctgatgctgaaatgtctccttatatgctacacacaactcttggaaatgaagcattcaaagacattccagtgcaaaggcatgtgaccatgtccaccaacaacaggtttagcccaaaggcgtcccttcaaccacctttgcagatgcatctctcaagaacctctactaaggaaatgagtgataatttaaatcagactgttgaaaaacccaatgtcaagcctcctgcctcttacacttataaaatggatgaggttcaaaatcgcataaaggaaatactaaacaagcataacaatggcatttggatatctaagcttccacatttttacaaagagttatataaagaagaccttaatcaaggaattttacaacagtttgaacactggcctcatatttgcacggtggagaaaccttgcagtggtggccaagatttacttctttatccagctaagagaaagcagcttttgagaagtgaactggatactgagaaagtacctctatccccactacctggtcccaaacaaacaccaccgttgaaagggtgtccaacagttatggcaggagactttaaagaaaaagtggcagacctgctggtgaaatacacaagtggcctttgggccagtgcacttccgaaagcatttgaggaaatgtacaaagtgaaattccctgaggatgccttaaaaaatcttgcctcactttctgatgtatgcagcatagactacatttctggaaatccccagaaggccattctctatgctaaacttccattgcccactgacaaaatccaaaaggatgcagggcaagcacatggtgataatgatatcaaggctatggttgaacaagagtatttgcaggtagaagaaagcattgctgaaagtgctaatacctttatggaggacataacagttcctcctttaatgattccaactgaagcatcaccatctgtattggtggttgaactgagcaacacaaatgaagtggttatcaggtatgtgggcaaagactattctgctgctcaggaattaatggaagatgagatgaaggaatattacagtaagaatcctaagatcacaccagtccaggctgtgaatgttgggcagttgctggccgtaaatgccgaggaggacgcctggttacgggcacaggtcatctcaacagaagagaacaaaataaaggtatgctatgttgactatggttttagtgaaaatgttgaaaaaagcaaagcatacaaattaaacccgaagttttgttcactctcatttcaagctacaaaatgtaagcttgcaggcttggaagtcctaagcgatgaccctgatctagtgaaggtggttgaatctttaacttgtggaaagatctttgcagtggaaatacttgacaaagctgacattccacttgttgttctgtacgatacctcaggagaagatgatatcaatatcaatgccacctgcttgaaggctatatgtgacaagtcactagaggttcacctgcaggttgacgccatgtacacaaatgtcaaagtaactaatatttgctctgatgggacactctactgccaggtgccttgtaagggtctgaacaagctcagtgaccttctacgtaagatagaggactacttccattgcaagcacatgacctctgagtgctttgtttcattacccttctgtgggaaaatctgcctcttccattgcaaaggaaaatggttacgagtagagatcacaaatgttcacagcagccgggctcttgatgttcagttcctggactctggcactgtgacatctgtaaaagtgtcagagctcagggaaattccacctcggtttctacaagaaatgattgcaataccacctcaggccattaagtgctgtttagcagatcttccacaatctattggcatgtggacaccagatgcagtgctgtggttaagagattctgttttgaattgctcggactgtagcattaaggttacaaaagtggatgaaaccagagggatcgcacatgtttatttatttacccctaagaacttccctgaccctcatcgcagtattaatcgccagattacaaatgcagacttgtggaagcatcagaaggatgtgtttttgagtgccatatccagtggagctgactctcccaacagcaaaaatggcaacatgcccatgtcgggcaacactggagagaatttcagaaagaacctcacagatgtcatcaaaaagtccatggtggaccatacgagcgctttctccacagaggaactgccacctcctgtccacttatcaaagccaggggaacacatggatgtgtatgtgcctgtggcctgtcacccaggctacttcgtcatccagccttggcaggagatacataagttggaagttctgatggaagagatgattctatattacagcgtgtctgaagagcgccacatagcagtggagaaagaccaagtgtatgctgcaaaagtggaaaataagtggcacagggtgcttttaaaaggaatcctgaccaatggactggtatctgtgtatgagctggattatggcaaacacgaattagtcaacataagaaaagtacagcccctagtggacatgttccgaaagctgcccttccaagcagtcacagctcaacttgcaggagtgaagtgcaaccagtggtctgaggaggcttctatggtgtttcgaaatcatgtggagaagaaacctctggtggcactggtgcagacagtcattgaaaatgctaacccttgggaccggaaagtagtggtctacttagtggacacatcgttgccagacaccgatacctggattcatgattttatgtcagagtatctgatagagctttcaaaagttaattaatgactgcctctgaaaccttgacaactaattcagattttttagcaataacaaaatgtagtaggcttaaaaaaaatcttaactctgctacatggctctgactgctgtgggggattgaaaagaatatgcttatgtttgatgaaagatatttaacaagttttgttttaacagagttgacttttcaaagaaaattgtacttgaattattactataatattagaataaaaatgtttatcaatat

SEQ ID NO: 178987 - protein, 412 aa, Artificial Sequence
  derived and/or modified sequence
MELSAVGERVFAAESIIKRRIRKGRIEYLVKWKGWAIKYSTWEPEENILDSRLIAAFEQKERERELYGPKKRGPKPKTFLLKARAQAEALRISDVHFSVKPSASASSPKLHSSAAVHRLKKDIRRCHRMSRRPLPRPDPQGGSPGLRPPISPFSETVRIINRKVKPREPKRNRIILNLKVIDKGAGGGGAGQGAGALARPKVPSRNRVIGKSKKFSESVLRTQIRHMKFGAFALYKPPPAPLVAPSPGKAEASAPGPGLLLAAPAAPYDARSSGSSGCPSPTPQSSDPDDTPPKLLPETVSPSAPSWREPEVLDLSLPPESAATSKRAPPEVTAAAGPAPPTAPEPAGASSEPEAGDWRPEMSPCSNVVVTDVTSNLLTVTIKEFCNPEDFEKVAAGVAGAAGGGGSIGASK

SEQ ID NO: 178988 - protein, 500 aa, Artificial Sequence
  derived and/or modified sequence
LKFLAVLLAAGMLAFLGAVICIIASVPLAASPARALPGGADNASVASGAAASPGPQRSLSALHGAGGSAGPPALPGAPAASAHPLPPGPLFSRFLCTPLAAACPSGAQQGDAAGAAPGEREELLLLQSTAEQLRQTALQQEARIRADQDTIRELTGKLGRCESGLPRGLQGAGPRRDTMADGPWDSPALILELEDAVRALRDRIDRLEQELPARVNLSAAPAPVSAVPTGLHSKMDQLEGQLLAQVLALEKERVALSHSSRRQRQEVEKELDVLQGRVAELEHGSSAYSPPDAFKISIPIRNNYMYARVRKALPELYAFTACMWLRSRSSGTGQGTPFSYSVPGQANEIVLLEAGHEPMELLINDKVAQLPLSLKDNGWHHICIAWTTRDGLWSAYQDGELQGSGENLAAWHPIKPHGILILGQEQDTLGGRFDATQAFVGDIAQFNLWDHALTPAQVLGIANCTAPLLGNVLPWEDKLVEAFGGATKAAFDVCKGRAKA

SEQ ID NO: 178989 - DNA, 1503 bp, Artificial Sequence
  derived and/or modified sequence
ctgaagttcctggccgtgctgctggccgccggcatgctggccttcctgggcgccgtgatctgcatcatcgccagcgtgcccctggccgccagccccgccagagccctgcccggcggcgccgacaacgccagcgtggccagcggcgccgccgccagccccggcccccagagaagcctgagcgccctgcacggcgccggcggcagcgccggcccccccgccctgcccggcgcccccgccgccagcgcccaccccctgccccccggccccctgttcagcagattcctgtgcacccccctggccgccgcctgccccagcggcgcccagcagggcgacgccgccggcgccgcccccggcgagagagaggagctgctgctgctgcagagcaccgccgagcagctgagacagaccgccctgcagcaggaggccagaatcagagccgaccaggacaccatcagagagctgaccggcaagctgggcagatgcgagagcggcctgcccagaggcctgcagggcgccggccccagaagagacaccatggccgacggcccctgggacagccccgccctgatcctggagctggaggacgccgtgagagccctgagagacagaatcgacagactggagcaggagctgcccgccagagtgaacctgagcgccgcccccgcccccgtgagcgccgtgcccaccggcctgcacagcaagatggaccagctggagggccagctgctggcccaggtgctggccctggagaaggagagagtggccctgagccacagcagcagaagacagagacaggaggtggagaaggagctggacgtgctgcagggcagagtggccgagctggagcacggcagcagcgcctacagcccccccgacgccttcaagatcagcatccccatcagaaacaactacatgtacgccagagtgagaaaggccctgcccgagctgtacgccttcaccgcctgcatgtggctgagaagcagaagcagcggcaccggccagggcacccccttcagctacagcgtgcccggccaggccaacgagatcgtgctgctggaggccggccacgagcccatggagctgctgatcaacgacaaggtggcccagctgcccctgagcctgaaggacaacggctggcaccacatctgcatcgcctggaccaccagagacggcctgtggagcgcctaccaggacggcgagctgcagggcagcggcgagaacctggccgcctggcaccccatcaagccccacggcatcctgatcctgggccaggagcaggacaccctgggcggcagattcgacgccacccaggccttcgtgggcgacatcgcccagttcaacctgtgggaccacgccctgacccccgcccaggtgctgggcatcgccaactgcaccgcccccctgctgggcaacgtgctgccctgggaggacaagctggtggaggccttcggcggcgccaccaaggccgccttcgacgtgtgcaagggcagagccaaggcctag

SEQ ID NO: 178990 - DNA, 1503 bp, Artificial Sequence
  derived and/or modified sequence
ttgaaattccttgcagttttgctagccgcagggatgctggccttcctcggcgccgtaatttgcattatcgcctctgtgccactggctgcaagtcccgctcgcgccctccccggcggggctgataacgcatctgtagctagtggagctgcagcctcccctggtccgcagaggtccctgtctgctcttcacggagcagggggaagcgctggaccccccgccctgccgggagcgccagccgcctctgctcacccacttccgcccggcccccttttttctcgcttcctctgtacaccactggctgccgcgtgtccctcaggtgctcaacagggcgacgccgctggtgctgcccctggtgaacgggaagaacttttactgctgcaatccacggctgagcagctacggcaaacagcactgcagcaggaggccaggatacgggcggaccaggacaccataagggaactcacagggaagctgggcagatgtgaatcagggcttcctaggggtctgcaaggggccggcccaaggcgcgatacgatggcagacggcccttgggattccccagctctaatattggagctggaagatgccgtacgggctctcagggatcggatagatagacttgaacaagaattgcctgcgcgggtcaatctctccgccgcccctgctcccgtctcagctgttcccaccggcctgcacagcaaaatggaccagttagagggccagctactggcccaggttctagccctagaaaaggagagagtggccctgagccacagttctaggagacagagacaggaggtggaaaaggaacttgacgtcctgcagggccgagtggctgagctcgagcacgggtccagtgcatactctccacctgacgcatttaagatctccatccccatacgtaacaattatatgtacgcgagagttcgcaaagcccttcctgagctgtatgcatttactgcctgcatgtggctcagatcccgtagttccgggacagggcaaggtactccctttagttactctgtgcccggtcaggccaacgaaatagtgctcctggaagcaggtcatgagcccatggagctcttgataaatgataaggtagcgcagctgccactgtcactgaaagataacgggtggcaccacatctgtatcgcgtggaccactcgcgatgggctgtggtctgcataccaggacggcgagcttcagggcagcggagagaatctcgccgcttggcatccaatcaagccccacggaatccttattctgggacaggaacaggatacgctaggagggcgattcgatgccacccaggcgttcgtaggggacatagcccagtttaacctgtgggatcacgcactgacacctgcccaggtcttgggtatcgcaaactgtaccgcgcccctcctgggaaacgtgcttccttgggaggataagctggtagaggcatttggaggtgccaccaaggcagcctttgatgtttgcaagggccgcgccaaagcttag

SEQ ID NO: 178991 - DNA, 219 bp, Artificial Sequence
  derived and/or modified sequence
atggagaagtggaagctgggcagacagatccagccaccatggccgctggctcacgcgcggggcagctggatggccctgccccgatccgagcagttaggtacaggcggggaccaggactggcagctgcagggccacacacgcgccaccgagaccaaagagaacttccagaaggagtcaatggttaaatccctcaggatgcagcggagacagggcgaatag

SEQ ID NO: 178992 - DNA, 1503 bp, Artificial Sequence
  derived and/or modified sequence
ctgaagttcctggccgtgctgctggccgccggcatgctggccttcctgggcgccgtcatctgcatcatcgcctctgtgcccctggccgccagccctgcccgggccctgcctggaggagctgacaatgcctctgtggccagcggggccgccgccagccctggcccccagaggagcctgagcgccctgcatggagctgggggcagcgctggccccccagccctgcccggggccccagctgccagcgcccaccccctgcccccaggccccctcttcagccgcttcctgtgcacccccctggccgccgcctgccccagcggggcccagcagggagatgctgctggagctgcccctggagagcgggaggagctgctgctgctgcagagcacagctgagcagctgcggcagacagccctgcagcaggaggcccgcatccgggctgaccaggacaccatccgggagctgaccgggaagctgggccgctgtgagagcggcctgccccggggcctgcagggcgccggcccccggcgggacaccatggctgatggcccctgggacagccctgccctgatcctggagctggaggatgctgtgcgggccctgcgggacagaattgaccggctggagcaggagctgcctgcccgggtgaacctgtctgctgccccagcccctgtgtctgctgtgcccaccggcctgcacagcaagatggaccagctggagggccagctgctggcccaggtgctggccctggagaaggagcgggtggccctgagccacagcagccggcggcagaggcaggaggtggagaaggagctggatgtgctgcagggccgggtggccgagctggagcacggcagcagcgcctacagccccccagatgccttcaagatcagcatccccatccggaacaactacatgtatgcccgggtgaggaaggccctgcctgagctgtatgccttcaccgcctgcatgtggctgcggagccgcagcagcggcaccggccagggcacccccttctcctacagcgtgcccggccaggccaatgaaattgtgctgctggaggccggccacgagcccatggagctgctgatcaatgacaaggtggcccagctgcccctgagcctgaaggacaatggctggcaccacatctgcatcgcctggaccaccagagatggcctgtggagcgcctaccaggatggagagctgcagggcagcggggagaacctggccgcctggcaccccatcaagccccacggcatcctgatcctgggccaggagcaggacaccctgggcggccgctttgatgccacccaggcctttgtgggggacatcgcccagttcaacctgtgggaccacgccctgaccccagcccaggtgctgggcatcgccaactgcacagcccccctgctgggcaatgtgctgccctgggaggacaagctggtggaggcctttggaggagccaccaaggccgcctttgatgtgtgcaagggccgggccaaggcctag

SEQ ID NO: 178993 - DNA, 1503 bp, Artificial Sequence
  derived and/or modified sequence
ctgaagttcctggccgtgctgctggccgccggcatgctggccttcctcggcgccgtcatatgcattattgcttccgtgccccttgccgctagccccgcacgagctctgccaggcggcgccgacaacgccagcgtagcctcaggtgccgcagcaagccccggcccacagaggagtctcagtgccctccacggggccggcggatccgcggggcctccagcccttccaggagcgccagctgcatctgcacatccactcccaccagggcccttattttccagattcctctgcaccccattggccgctgcctgcccttcaggggctcagcagggtgacgccgccggcgctgcccctggagagcgagaggagctgcttctgctgcaatcaacagctgaacagcttaggcagacagccctgcaacaggaagcgaggatccgggcggatcaggatacaattcgggagcttacaggcaaactgggtcgatgtgagagtggcctgcctcgcggactgcaaggagccggtccacggcgcgatacaatggccgacggcccctgggattcaccagccctgatccttgagctggaagacgcagttagggccctccgggacagaatcgacaggctagagcaggagctacccgcacgcgttaatcttagcgccgctcctgcgcccgttagcgccgtcccgactggacttcactctaagatggatcagctcgaaggacagctattggcacaggtgctggccttagagaaagagcgagtagcactgtcacactcttctcgtcggcagaggcaggaggttgagaaggaattggacgtgctgcagggccgagtggctgagctcgagcacggcagctccgcatatagtccacccgacgcatttaagatctcgatccctattcgcaataactacatgtatgctagagtgagaaaggccctgcctgagctttacgcgtttactgcctgcatgtggctccggagtcgaagttcagggaccggccagggcacaccattcagctatagcgtgcctggacaggcgaacgaaatcgtccttcttgaagcgggacatgaacccatggagctgctaattaacgataaagtggcgcagttgcccctgtctctgaaagacaatggctggcaccatatctgtattgcgtggaccaccagggatggattgtggtctgcataccaggacggcgagttgcagggctccggcgagaacttggcagcctggcatccgataaagccacacggcatcctgattctgggccaagaacaagacaccctcggaggtagattcgatgccacacaggcctttgtgggtgatattgcccagttcaacctttgggatcatgcactgaccccggctcaggttctcggcatagcaaactgtaccgccccactcctcggcaatgtgctaccctgggaagataagctggttgaagcatttgggggagctaccaaagccgcattcgatgtgtgcaaaggccgcgcgaaggcttag

SEQ ID NO: 178994 - DNA, 5784 bp, Artificial Sequence
  derived and/or modified sequence
cggctccggctccggctccggctcccgcgcctgccccgctcggcccagcgcgcccgggctccgcgccccgaccccgccgccgcgcctgccgggggcctcgggcgcccccgccgcccgcctcacgctgaagttcctggccgtgctgctggccgcgggcatgctggcgttcctcggtgccgtcatctgcatcatcgccagcgtgcccctggcggccagcccggcgcgggcgctgcccggcggcgccgacaatgcttcggtcgcctcgggcgccgccgcgtccccgggcccgcagcggagcctgagcgcgctgcacggcgcgggcggttcagccgggccccccgcgctgcccggggcacccgcggccagcgcgcacccgctgccgcccgggcccctgttcagccgcttcctgtgcacgccgctggctgctgcctgcccgtcgggggcccagcagggggacgcggcgggcgctgcgccgggcgagcgcgaagagctgctgctgctgcagagcacggccgagcagctgcgccagacggcgctgcagcaggaggcgcgcatccgcgccgaccaggacaccatccgtgagctcaccggcaagctgggccgctgcgagagcggcctgccgcgcggcctccagggcgccgggccccgccgcgacaccatggccgacgggccctgggactcgcctgcgctcattctggagctggaggacgccgtgcgcgccctgcgggaccgcatcgaccgcctggagcaggagcttccagcccgtgtgaacctctcagctgccccagccccagtctctgctgtgcccaccggcctacactccaagatggaccagctggaggggcagctgctggcccaggtgctggcactggagaaggagcgtgtggccctcagccacagcagccgccggcagaggcaggaagtggaaaaggagttggacgtcctgcagggtcgtgtggctgagctggagcacgggtcctcagcctacagtcctccagatgccttcaagatcagcatccccatccgtaacaactacatgtacgcccgcgtgcggaaggctctgcccgagctctacgcattcaccgcctgcatgtggctgcggtccaggtccagcggcaccggccagggcacccccttctcctactcagtgcccgggcaggccaacgagattgtactgctagaggcgggccatgagcccatggagctgctgatcaacgacaaggtggcccagctgcccctgagcctgaaggacaatggctggcaccacatctgcatcgcctggaccacaagggatggcctatggtctgcctaccaggacggggagctgcagggctccggtgagaacctggctgcctggcaccccatcaagcctcatgggatccttatcttgggccaggagcaggataccctgggtggccggtttgatgccacccaggcctttgtcggtgacattgcccagtttaacctgtgggaccacgccctgacaccagcccaggtcctgggcattgccaactgcactgcgccactgctgggcaacgtccttccctgggaagacaagttggtggaggcctttgggggtgcaacaaaggctgccttcgatgtctgcaaggggagggccaaggcatgaggggccacctcatccagggcccctcccttgcctgccactttggggacttgaggggggtcatattccctcctcagcctgcccacgcactggccttccctcctgccccactcctggctgtgcctcccatttcccctcacctgtacccacacctccagaatgccctgccctgcgagtgtgtcccctgtccccacctgagtggggaggagcgtctcaagtgaacagtgggagcctgcccacctggcactgcactggagttgtctcttaccccaccctccctgcccatcaactgtatctgatttcactaattttgacagcacccccagtagggtaggattgtgtatgagggggaccccactatctcagtggtgggggtggccgcccgcccccttgtcccccatgcaacaggcccagtggcttccccttcagggccacaacaggctgtagaaggggatgacgaggacatcagaggttagacttaccctcctccctctttccaccagctgccagtcaagggcagtgggatctcgatggagcctccccccccccccacccatgcctccctcttcctcctctttcctcctctctttgtgtgtagcggtttgaatgttggttccatgcctggcccagccccacctcagtctccaggacattcctttcccagctccagcctggagggaaggggacaaagaccccaggaggccaaagggctgcagtcaccccttgtgctcacccatagtgatggccactggtatagtcatcgctctccctccatgccaaggacaggacttggaccgcttcagcctgggctgggagcagccctaaggtagaggcctcatggcccaggagaccccacctctggcagagccacattacctaccctgtgcatggtcctggggcagcaaggaagaagctcagagggtggggagaagcatgaagcagtgagcagagcactgggtgagagggagaagaccttggttcctagccagccctgctaatgtgctgtgtggccttctgtaagtccctgccctctctgggcctggccttcctcattcgtgagctgaggccctcgctttggtcatttgctctccagattgggtgtgagcttctctgtgattccaggtggatatgtggggaaagctctggtgaccctgggcttcgcaggggtagatcccaggactcggcagtggatgggatgcagccagtcatgggttagggtcagcagagactcagagtccagggcaaggttcaaggcagactaacctcatgcatggattgtaaaaaaccagctccctttggatcaacccagcctggcacccttgcctgtctgagagtgtctcaaagggctgatggcttcctggtccccttgagtcatcaccagcttccccaagagagtgtcagaatcttaagagctgagaggccgggcacggtggctcacgcctgtaatcccagcactttgggaggctgagacaggcagatcacttgaggtcaggagttcgaagtcagcctggccaacgtggtgaaaccccatcttcactaaaaatacaaaacttagctggttaggtggtgcatgcctgtagtcccagctactcgggaggccgaggcagaagaatctcttgaactgaggaggtggaggttgcagtgagccgagatcacgccattgcactccagcctgggcaacagagcaagactccatctcaaaaaaataataataatcttaaagatgagaaaagccaccccatctggcaccacagctgcatcttgcttgtgagaaatggggaagagttcagggaggacacgtgacctgcacaggatcacagagcatggggcagagccaggactagagctcagggcatctgactccctcttcagtgttcttccccctccatgttgcctgcccctgaagacctttgagttcagtctacacctaagcaggtagacatccgcgaggtcagatgctttccaacatgacacctgaacatcttcctttatgcaacacccaaacatcttggcatccccaccccaggaagtgcggggaggaggttatgatccctgggcgcttcggcagaatggagagctgaggtgtccctcccctgctagtcacctaccaggtgtctgagcagctgcatgctccctggctcaagtgggcactgtaccttttgcctgcctttttgttccctatctccactccctgaggccacttagcctgagacatgatgcaagagctgcaggccggggggctcagtgccatggaagctactccaagttgcattgcctcccgcgcccagatcctgctttccatttcgagaacataaatagattgcccagcccctccagtacaatcccactggaagaaaaggcaatggcgggcttcagccagacctgctgagacctaggttgccacggtaacagccaaagacatcaacccaagtgctgggtcaagtgtctcatcatactggcactgttgctggggtgacggcagaattcagaacttcaatttcagtgacgccaagcttgatgtgtttctgttattgttttgaagaaggtagctcttgtggaggacttgggagaaggatggggtcttaggaaggaggtgacagcacttgcatggtcacttgagcccacacacacgctcaaccccaagtcctttatgctttgtcacagtgaagatgagacctctgacgtccaagccttgttcctgtgctgcatcacccactcagccttccaaagggaacaggaacaaatttccccagcaccactgtttgggtcccgcttttcctatcttctgctgcccctgagcacatccaagcagacagggaaagaggagtcagacatggcccagtcacatcctgagctgctcctggctgataaccacgatggagcccgtgtttgtcctgccatctggcactgcactgagtgtggcacaggcaccgtcctgttgatctcacaacacagttctaagttaggacgttcttggctccgttagacaggtgaggaaactggggcacagagaggtgatgtcatctgcctggtgtcaatcagctagcaagtgatggagcccagatttcaaaccaaagggggttacgtccaggggctgagttcccactcacctgtgtagagtgccatctgggcaccattgctccagacgtgttccgacccctttcccagcccacagggcttgaagtgaaggaacagaggcagggggtgggccagccccagggccagggtccccttggtgaagccgtgccagggggctcagctgcttcagggaatgtgtccctcccaccatgggccagagcttcagcccttctttagctcagctagagttcacaggagagccaaaaaagaaaaggaagctgagcatctcccgagtcctgggcagggaaggggagggaaattgctgcttctccaactcttgcttggggccaagccctgcaccagttgcttcccagctgttatctgccagatcttcccatcttgtggcatgtggtgcccccaccaacatcccaaggggaccaatccccttgccaccactttgcatcacctgggaccacagatttggacaggaagggctctgagaagaggccaaagccctcattttacagatgaggaagctgaagcccggggaggggagcgaccctcaaggccacccagctggacacgggagacttgagcccagccttctgactgcattcagccctctctaggacgcagcagcctctccccagcactgagtcccccctcctttgtgtgtcccagcacccttggcctgagtaaacttggaaaggggctccctcccagagaagggactactctcttcacccctttattccagctgcctgccaccccagacccccacctcccaccctgacccccgacccctgggtggggaaggggctcacatgggcccaggctgagtgtgagtgagcatgtcaagttgtctgacactgtgacattagtgcaccctactgacaacccctccccagccttgcccctttctcctctccctgttttgtacataaattgacatgagctgcaacatgtgtgcgtgtgtgtgcgtgtgtgtgtgtgtgtatgtgtgtgtgatctgtgtcatggttttgttacctttttgtttttgtaaacttgaatgttcaaaataaacatgctgtttactctga

SEQ ID NO: 178995 - DNA, 1503 bp, Artificial Sequence
  derived and/or modified sequence
ctgaagttccttgccgtgctgttagctgctggaatgctggcatttctgggcgctgtgatttgcattatagcaagcgtcccactggccgcttccccagctagggctcttcctggtggagccgacaacgccagcgtcgcgtcgggtgcggcagcaagtccagggcctcagagaagcctgtctgcccttcacggtgccggaggcagtgcaggacccccagctctcccaggcgctcccgcagcatctgcccatcctctccctccagggccactgttttcgcggttcctatgcacgcccttagccgctgcctgtccctctggggctcagcagggagacgccgctggtgcagccccaggcgaaagggaggagctcttactcctccagtccacggcagagcagctgagacagactgcgctacagcaggaggccaggattcgagctgaccaggacactataagagagctgacaggcaaactgggtaggtgcgagagcggcttgcctagaggactgcagggtgctgggcctagaagggacaccatggctgatggaccctgggacagcccagctttgatattagaacttgaagatgccgtgcgcgctttgcgggataggatagatagactagagcaggagctccccgcaagagtcaatttgtctgctgcgcctgctcctgtttctgcggtccctacaggcctgcacagcaaaatggaccagctcgagggccagttgctggcccaggtgctggcccttgagaaggagagagtcgccctttctcattcctctaggcgtcagcggcaggaagtcgagaaggagctcgatgtactgcaaggacgtgtagccgaactggagcacggttctagcgcatacagccccccagatgcatttaagatcagcattcccatccgtaacaactatatgtacgccagggtgaggaaagctcttcccgagctgtacgctttcactgcttgcatgtggttacgctcccgatccagtggaacaggacagggtacaccatttagctactccgtccctggccaggctaacgaaatcgtgctactagaggcagggcacgagcctatggaactgcttatcaatgacaaggtcgcccagttgcccctgagtctgaaagataacggctggcaccacatttgcatagcttggaccactcgagacggactttggtcggcttatcaggatggcgagttgcaaggtagcggagagaatcttgcggcttggcatcctataaagcctcatggcatccttattctgggacaggagcaggataccctgggagggaggttcgacgccactcaggccttcgtcggcgacatcgcccagttcaatttatgggatcacgcactgactccagcccaggtgctgggcatcgcaaactgcacggccccactcctggggaatgtgttaccttgggaagacaagttggtggaggcctttggcggagcgacaaaagccgcttttgacgtctgcaagggtcgagccaaggcctag

SEQ ID NO: 178996 - protein, 374 aa, Artificial Sequence
  derived and/or modified sequence
MAIRKKSTKSPPVLSHEFVLQNHADIVSCVAMVFLLGLMFEITAKASIIFVTLQYNVTLPATEEQATESVSLYYYGIKDLATVFFYMLVAIIIHAVIQEYMLDKINRRMHFSKTKHSKFNESGQLSAFYLFACVWGTFILISENYISDPTILWRAYPHNLMTFQMKFFYISQLAYWLHAFPELYFQKTKKEDIPRQLVYIGLYLFHIAGAYLLNLNHLGLVLLVLHYFVEFLFHISRLFYFSNEKYQKGFSLWAVLFVLGRLLTLILSVLTVGFGLARAENQKLDFSTGNFNVLAVRIAVLASICVTQAFMMWKFINFQLRRWREHSAFQAPAVKKKPTVTKGRSSKKGTENGVNGTLTSNVADSPRNKKEKSS

SEQ ID NO: 178997 - protein, 343 aa, Artificial Sequence
  derived and/or modified sequence
MVFLLGLMFEITAKASIIFVTLQYNVTLPATEEQATESVSLYYYGIKDLATVFFYMLVAIIIHAVIQEYMLDKINRRMHFSKTKHSKFNESGQLSAFYLFACVWGTFILISENYISDPTILWRAYPHNLMTFQMKFFYISQLAYWLHAFPELYFQKTKKEDIPRQLVYIGLYLFHIAGAYLLNLNHLGLVLLVLHYFVEFLFHISRLFYFSNEKYQKGFSLWAVLFVLGRLLTLILSVLTVGFGLARAENQKLDFSTGNFNVLAVRIAVLASICVTQAFMMWKFINFQLRRWREHSAFQAPAVKKKPTVTKGRSSKKGTENGVNGTLTSNVADSPRNKKEKSS

SEQ ID NO: 178998 - DNA, 1125 bp, Artificial Sequence
  derived and/or modified sequence
atggccatcagaaagaagagcaccaagagcccccccgtgctgagccacgagttcgtgctgcagaaccacgccgacatcgtgagctgcgtggccatggtgttcctgctgggcctgatgttcgagatcaccgccaaggccagcatcatcttcgtgaccctgcagtacaacgtgaccctgcccgccaccgaggagcaggccaccgagagcgtgagcctgtactactacggcatcaaggacctggccaccgtgttcttctacatgctggtggccatcatcatccacgccgtgatccaggagtacatgctggacaagatcaacagaagaatgcacttcagcaagaccaagcacagcaagttcaacgagagcggccagctgagcgccttctacctgttcgcctgcgtgtggggcaccttcatcctgatcagcgagaactacatcagcgaccccaccatcctgtggagagcctacccccacaacctgatgaccttccagatgaagttcttctacatcagccagctggcctactggctgcacgccttccccgagctgtacttccagaagaccaagaaggaggacatccccagacagctggtgtacatcggcctgtacctgttccacatcgccggcgcctacctgctgaacctgaaccacctgggcctggtgctgctggtgctgcactacttcgtggagttcctgttccacatcagcagactgttctacttcagcaacgagaagtaccagaagggcttcagcctgtgggccgtgctgttcgtgctgggcagactgctgaccctgatcctgagcgtgctgaccgtgggcttcggcctggccagagccgagaaccagaagctggacttcagcaccggcaacttcaacgtgctggccgtgagaatcgccgtgctggccagcatctgcgtgacccaggccttcatgatgtggaagttcatcaacttccagctgagaagatggagagagcacagcgccttccaggcccccgccgtgaagaagaagcccaccgtgaccaagggcagaagcagcaagaagggcaccgagaacggcgtgaacggcaccctgaccagcaacgtggccgacagccccagaaacaagaaggagaagagcagctag

SEQ ID NO: 178999 - DNA, 1125 bp, Artificial Sequence
  derived and/or modified sequence
atggcgatcaggaagaagtctacaaaaagcccccccgtcctaagccatgagttcgtactgcagaaccacgctgatatcgttagctgcgtagctatggttttccttcttggtttaatgttcgagataacagccaaagcctctatcatatttgtgaccctgcaatacaatgttaccctgccagcaaccgaggaacaggctactgagagcgtgtcactgtattactacgggatcaaggacctggctactgtgttcttctacatgctcgtggccatcattattcacgcagttatccaggagtatatgctagacaagattaacagaaggatgcatttttccaaaaccaaacactcgaagttcaacgagtctggtcagttgagtgccttctacttattcgcttgtgtttggggaacatttatcctgatctctgaaaattacatctccgacccgactattctgtggcgcgcctacccccataatcttatgaccttccagatgaagtttttttatatttcccaacttgcctattggttgcatgctttccccgaactgtacttccagaaaaccaagaaagaagatattcctcgacagttggtctatatcggcctttacctgttccatatcgcaggcgcatacctacttaatctgaaccacctgggtctcgtgcttttagtgctccactacttcgtcgagtttctgtttcacatttcaaggctcttctactttagcaatgagaagtaccaaaaaggattttctctgtgggccgtgttatttgttctcggccgactcttaaccttgatcctgagcgtcctgaccgtggggttcgggctggcccgcgccgaaaatcagaagctggatttctctacaggaaatttcaatgttttggccgtaagaatagccgtgctggcaagcatctgtgtgacccaggccttcatgatgtggaagtttatcaacttccagctgcggcgctggcgggagcacagcgcattccaggcgccagctgtgaagaaaaagcccacggttacaaagggtcggtcctccaagaaagggacagaaaacggtgtaaacggtaccctcacctccaacgtggcagacagccctaggaacaaaaaagaaaagtcctcttag

SEQ ID NO: 179000 - DNA, 1125 bp, Artificial Sequence
  derived and/or modified sequence
atggccatcaggaagaagagcaccaagagcccccctgtgctgagccatgaatttgtgctgcagaaccacgccgacatcgtgtcctgtgtggccatggtgttcctgctgggcctgatgtttgagatcacagccaaggccagcatcatctttgtgaccctgcagtacaacgtgaccctgcctgccacagaggagcaggccacagaatctgtgtccctgtactactacggcatcaaggacctggccaccgtcttcttctacatgctggtggccatcatcatccatgctgtgatccaggagtacatgctggacaagatcaacagaaggatgcacttcagcaagaccaagcacagcaagttcaatgaaagtggccagctgagcgccttctacctgtttgcctgtgtgtggggcaccttcatcctgatcagcgagaactacatcagtgaccccaccatcctgtggagggcctacccccacaacctgatgaccttccagatgaagttcttctacatcagccagctggcctactggctgcacgccttccctgagctgtacttccagaagaccaagaaggaggacatcccccggcagctggtgtacatcggcctgtacctgttccacatcgccggggcctacctgctgaacctgaaccacctgggcctggtgctgctggtgctgcactactttgtggagttcctgttccacatcagccgcctcttctacttcagcaatgagaagtaccagaagggcttcagcctgtgggccgtgctgtttgtgctgggccgcctgctgaccctcatcctgtctgtgctgactgtgggcttcggcctggcccgggcagagaaccagaagctggacttcagcacaggcaacttcaacgtgctggccgtgagaattgctgtgctggccagcatctgtgtgacccaggccttcatgatgtggaagttcatcaacttccagctgcggcgctggagggagcacagcgccttccaggccccagctgtgaagaagaagcccaccgtgaccaagggccgcagcagcaagaagggcacagaaaatggagtgaatggcaccctgaccagcaatgtggccgacagccccaggaacaagaaggagaagagcagctag

SEQ ID NO: 179001 - DNA, 1125 bp, Artificial Sequence
  derived and/or modified sequence
atggccatccggaagaagagcaccaagagcccccccgtgctgagccacgagttcgtgcttcagaaccatgcggacatcgtttcctgcgtggccatggtatttctgctggggctcatgtttgagatcactgccaaagcctccataatcttcgttaccctgcaatacaatgtgactctgcctgcgaccgaggagcaggccaccgagagcgtcagcctgtactattacggcataaaggatctggccactgtctttttttacatgctcgtggcgatcataattcatgccgtgatccaggaatacatgttagacaagattaaccgccggatgcattttagcaaaaccaagcactcaaaatttaacgagtcgggacagttgtccgctttctatttgtttgcgtgtgtgtggggcaccttcattctgatctccgagaactatatttcagatcccacaatcctctggagagcttaccctcataaccttatgacattccagatgaaatttttttacatctcccagcttgcgtactggttgcacgccttcccagagttgtatttccagaaaaccaagaaggaggatatccctaggcagctggtgtatatagggctgtatctattccacatcgcaggggcatatttgctaaacctcaatcatctgggtcttgtgcttctggtcctgcactacttcgtggagtttctgtttcacatctctaggcttttctactttagtaatgagaagtatcaaaaagggttcagtctctgggccgtcctattcgtgctgggccggcttctgacattgattctttcagttttgacggtagggttcggactcgctcgtgcagagaaccaaaaactcgatttttccacgggcaacttcaatgtgcttgcggtgagaatcgccgtcttagcctcaatttgcgtgacccaagcatttatgatgtggaaatttatcaactttcagcttaggagatggagagaacactcagccttccaggcccccgccgtaaaaaagaaaccaacagtgacaaaaggcaggtcttctaaaaaggggaccgagaatggtgtaaacggcacactcacgagcaatgtggcggatagcccacgtaataaaaaggagaagtcctcatag

SEQ ID NO: 179002 - DNA, 1125 bp, Artificial Sequence
  derived and/or modified sequence
atggccattcgtaagaaatccactaagtccccacccgtcttgtctcatgaatttgtgctgcaaaatcacgccgacattgtgagctgcgtcgcaatggtctttctccttgggctgatgttcgagatcacggctaaagccagtattatcttcgttacacttcagtacaatgtgaccttgccagcaactgaggaacaagcaactgaaagcgtgtccctgtattactatggtataaaggacctggccacagtcttcttctatatgcttgtagccataattatccacgccgtgatccaagagtacatgctcgacaagattaacaggaggatgcacttttcaaagaccaaacatagcaagttcaacgagagcgggcagctgagtgcattctacctgtttgcctgtgtgtggggcacttttatcctgattagcgagaattacatcagtgatccaaccatcttgtggcgcgcttatccccataatctaatgacattccagatgaagttcttctacatcagccagctggcgtattggttgcacgcctttccggagctgtattttcagaaaacaaaaaaggaggacatacccaggcagctagtttacattggcctttacctcttccacatcgcgggagcgtaccttctgaatctaaatcacctggggctggtgctactcgtgctccactatttcgtagagtttctgttccacatttctaggctgttctatttttcaaatgagaaataccaaaaaggcttctctctgtgggcagttctcttcgtcctaggcaggttgctaacattaatcctgagcgtcctgacagtgggctttggtctcgcccgagccgagaaccagaagttggatttctccacgggaaatttcaacgtgcttgcagttaggattgccgtcctggctagtatatgcgttactcaggccttcatgatgtggaaattcataaacttccaactgaggaggtggcgcgaacactctgccttccaagcgcctgctgttaaaaagaaacccacggtgaccaaggggagaagctctaagaaggggactgagaatggcgtgaatggaaccctcacatccaacgttgctgacagtccccgaaataaaaaggaaaaatcttcgtag

SEQ ID NO: 179003 - DNA, 2785 bp, Artificial Sequence
  derived and/or modified sequence
cgggcggcccggcggctgcgtactggctgtgggatgggaagtgaagccccagcgagcggctgcagcggggccgtgaggagcagccagcgggaggcggcggcgagtcggtgagcagctgggaagagcagaaccggggcggagcacctgcaggcgcgggcggcggccccaccatggcgattcgcaagaaaagcaccaagagccccccagtgctgagccacgaattcgtcctgcagaatcacgcggacatcgtctcctgtgtggcgatggtcttcctgctggggctcatgtttgagataacggcaaaagcttctatcatttttgttactcttcagtacaatgtcaccctcccagcaacagaagaacaagctactgaatcagtgtccctttattactatggcatcaaagatttggctactgttttcttctacatgctagtggcgataattattcatgccgtaattcaagagtatatgttggataaaattaacaggcgaatgcacttctccaaaacaaaacacagcaagtttaatgaatctggtcagcttagtgcgttctacctttttgcctgtgtttggggcacattcattctcatctctgaaaactacatctcagacccaactatcttatggagggcttatccccataacctgatgacatttcaaatgaagtttttctacatatcacagctggcttactggcttcatgcttttcctgaactctacttccagaaaaccaaaaaagaagatattcctcgtcagcttgtctacattggtctttacctcttccacattgctggagcttaccttttgaacttgaatcatctaggacttgttcttctggtgctacattattttgttgaatttcttttccacatttcccgcctgttttattttagcaatgaaaagtatcagaaaggattttctctgtgggcagttctttttgttttgggaagacttctgactttaattctttcagtactgactgttggttttggccttgcaagagcagaaaatcagaagctggatttcagtactggaaacttcaatgtgttagctgttagaatcgctgttctggcatccatttgcgttactcaggcatttatgatgtggaagttcattaattttcagcttcgaaggtggagggaacattctgcttttcaggcaccagctgtgaagaagaaaccaacagtaactaaaggcagatcttctaaaaaaggaacagaaaatggtgtgaatggaacattaacttcaaatgtagcagactctccccggaataaaaaagagaaatcttcataatgaattataaactaattgattaatgtccccaaagaaatctgctttctactatatctttcagcattagagatttttctgttcttgaaaatacagtctgtgctctttgatttttgctattgtacggtttcatgcatttttttaaagggcatttgaggggaggattattgctatgaatgaaaaaaatattttagcttagactaagctacctgccttcaaaatagtttagggaccaccaccatattttattttgtttttatttttgaacatttttctaatgatttggagagaaaactatttacaaaaattccacatatcagtgatacaatttcttgctgtcaccaattttttataatagcagagtggcctgttctaagaaggccatattttttaagttatctttcagggtaacatggaaatactataaagttggatgtcaaactttaatatgttttcagtgttctctaattttttggaatttttgtagactttacacctggaaaaaaagatttgtaaaatcaccggaacaattgtgtgctttattttataggtagtggttattagtattacatccccattttaaaaacaaaaacataataatcgttacaacacgtggagttttactaacatacatattaaatcaaagtatattcttaaaagtacttgtgaagtaaaatctttcttgtgcattttcaatacttgtaaactggaaatcagaaaatatttactatgaacaggaaaatctgacatatagccctttttgatatgtttattaataatgattcttaatggggctcataataagtttaatatgcacagcatcttagaaaagtttaacctgcaaacacttttaaaacataatgcctacttgatttatatctataaaaagactgacaggtaattatatttggaaaacatttaatgcactaactttaaagaaattgaaaattcaggtggataaatagtcttacaaaagacaatgtgctttatgttatacctatagctttggtcccatctttaattgagaaacatttatctgtataaaacatatttttggataaatatatatatatatatttgtatctctacagaaaggctctaaaaagcatttgaggaaaatatttggttcccttttctataatcatcctttaagattcttatagctacatttggtttattcatcatatttacagtatatatattgttcttttcagtgttcacatcttgttccccatttctcacttgtgtcaccagctgtttgtgccatttttagtgtaaaagttgcagacctattagatctgcagtttaagttgccatgctgctaggaaattgtcctttttctttctagctgttaacctacttcctggaaaaagtagtagctctctgtagcattatggagtttcagtggaaccaaatttttgccattaaaaactggcattatactgaactatacattgagaaatcaatcaaaataaaaatttttactttcacaa

SEQ ID NO: 179004 - DNA, 1296 bp, Artificial Sequence
  derived and/or modified sequence
cccccgggcggcccggcggctgcgtactggctgtgggatgggaagtgaagccccagcgagcggctgcagcggggccgtgaggagcagccagcgggaggcggcggcgagtcggtgagcagctgggaagagcagaaccggggcggagcacctgcagaatcacgcggacatcgtctcctgtgtggcgatggtcttcctgctggggctcatgtttgagataacggcaaaagcttctatcatttttgttactcttcagtacaatgtcaccctcccagcaacagaagaacaagctactgaatcagtgtccctttattactatggcatcaaagatttggctactgttttcttctacatgctagtggcgataattattcatgccgtaattcaagagtatatgttggataaaattaacaggcgaatgcacttctccaaaacaaaacacagcaagtttaatgaatctggtcagcttagtgcgttctacctttttgcctgtgtttggggcacattcattctcatctctgaaaactacatctcagacccaactatcttatggagggcttatccccataacctgatgacatttcaaatgaagtttttctacatatcacagctggcttactggcttcatgcttttcctgaactctacttccagaaaaccaaaaaagaagatattcctcgtcagcttgtctacattggtctttacctcttccacattgctggagcttaccttttgaacttgaatcatctaggacttgttcttctggtgctacattattttgttgaatttcttttccacatttcccgcctgttttattttagcaatgaaaagtatcagaaaggattttctctgtgggcagttctttttgttttgggaagacttctgactttaattctttcagtactgactgttggttttggccttgcaagagcagaaaatcagaagctggatttcagtactggaaacttcaatgtgttagctgttagaatcgctgttctggcatccatttgcgttactcaggcatttatgatgtggaagttcattaattttcagcttcgaaggtggagggaacattctgcttttcaggcaccagctgtgaagaagaaaccaacagtaactaaaggcagatcttctaaaaaaggaacagaaaatggtgtgaatggaacattaacttcaaatgtagcagactctccccggaataaaaaagagaaatcttcataatgaattataaactaattgattaatgtccccaaagaaatctgctttctactatatctttcagcattagagatttttctgtt

SEQ ID NO: 179005 - protein, 813 aa, Artificial Sequence
  derived and/or modified sequence
MDATALERDAVQFARLAVQRDHEGRYSEAVFYYKEAAQALIYAEMAGSSLENIQEKITEYLERVQALHSAVQSKSADPLKSKHQLDLERAHFLVTQAFDEDEKENVEDAIELYTEAVDLCLKTSYETADKVLQNKLKQLARQALDRAEALSEPLTKPVGKISSTSVKPKPPPVRAHFPLGANPFLERPQSFISPQSCDAQGQRYTAEEIEVLRTTSKINGIEYVPFMNVDLRERFAYPMPFCDRWGKLPLSPKQKTTFSKWVRPEDLTNNPTMIYTVSSFSIKQTIVSDCSFVASLAISAAYERRFNKKLITGIIYPQNKDGEPEYNPCGKYMVKLHLNGVPRKVIIDDQLPVDHKGELLCSYSNNKSELWVSLIEKAYMKVMGGYDFPGSNSNIDLHALTGWIPERIAMHSDSQTFSKDNSFRMLYQRFHKGDVLITASTGMMTEAEGEKWGLVPTHAYAVLDIREFKGLRFIQLKNPWSHLRWKGRYSENDVKNWTPELQKYLNFDPRTAQKIDNGIFWISWDDLCQYYDVIYLSWNPGLFKESTCIHSTWDAKQGPVKDAYSLANNPQYKLEVQCPQGGAAVWVLLSRHITDKDDFANNREFITMVVYKTDGKKVYYPADPPPYIDGIRINSPHYLTKIKLTTPGTHTFTLVVSQYEKQNTIHYTVRVYSACSFTFSKIPSPYTLSKRINGKWSGQSAGGCGNFQETHKNNPIYQFHIEKTGPLLIELRGPRQYSVGFEVVTVSTLGDPGPHGFLRKSSGDYRCGFCYLELENIPSGIFNIIPSTFLPKQEGPFFLDFNSIIPIKITQLQ

SEQ ID NO: 179006 - DNA, 2442 bp, Artificial Sequence
  derived and/or modified sequence
atggacgccacagctctggagagggacgcggtccagtttgcccggctcgccgttcagagggatcacgagggacgatattctgaagccgttttttactataaggaggccgcacaggctttgatctatgccgagatggctggaagttcacttgagaatatccaagagaagattaccgagtatctggagcgggtgcaggccctccacagcgccgtccagtctaagagtgcggacccattaaagagtaaacaccagttagacctcgaaagggctcatttcctggtgacacaagcctttgacgaggatgaaaaggaaaatgtcgaggatgccatcgaactctacaccgaggccgtggacctctgcttgaaaacctcatatgaaaccgccgataaggtgctgcagaacaagttgaagcagcttgctcggcaagccctcgacagagctgaagccctgagcgagccgctaacgaaacctgttgggaagatttccagcacctcagtgaaacccaagccccccccagtacgagcccattttcccctgggggcaaacccgttcttagagaggccacagtcatttattagcccccaatcctgtgatgcgcagggacagcgttacaccgccgaggaaatcgaggtgctgagaaccacctcaaagattaacgggatagagtacgttccgttcatgaatgtggacctgcgcgagcggtttgcttaccccatgccgttctgcgaccgatgggggaagttacctctgtcacccaaacagaaaaccacattcagcaaatgggttcggccagaagatttgacgaacaaccccacaatgatttacaccgtgtccagtttctccattaagcagactatagtatcggattgtagttttgtagcttcccttgcaatctcagcggcctacgagcgcaggttcaataagaaactaatcactggtatcatctacccacaaaacaaggacggagagccagagtataacccttgcggtaagtacatggtcaagctacacctgaatggtgtacccaggaaggttattatcgacgaccaattgccagtcgaccacaagggcgagctgctgtgttcctatagcaacaataagagtgaactctgggtgagtctgatcgagaaagcgtacatgaaggtgatgggcgggtatgatttccccggcagcaactcgaatattgatttacacgcgctcaccggatggatccctgaaagaatagctatgcactcagattcacagacattcagcaaagacaactcctttcgtatgctctatcaacgcttccataagggcgacgtgctgatcaccgcgtcgaccgggatgatgaccgaggcggaaggggagaaatgggggcttgtccccactcatgcatatgccgtcctagacattcgtgagtttaagggcctgcgattcattcagctgaagaacccctggtcccacttacggtggaaaggtaggtatagtgaaaacgatgttaaaaattggactcctgagctccaaaagtatctgaactttgacccacgcacagcgcagaaaattgacaacggcattttttggatttcttgggacgacttatgtcagtattacgacgtaatctacctctcctggaaccctggactgtttaaagaatcaacctgcattcactccacgtgggacgccaagcagggcccggttaaggatgcgtattctctggcaaataacccacagtataagctcgaagtgcaatgcccccagggaggcgcggctgtgtgggttctgctgtcgagacacataactgataaggacgacttcgctaataaccgagagtttattacgatggtcgtatacaagactgacggtaagaaggtgtactaccccgcagacccacccccgtatattgatgggattcgcatcaacagcccacattatctcactaagatcaagctgacaaccccaggaactcacacatttaccctcgttgtcagccaatatgaaaaacaaaatactatccattataccgttcgggtgtacagtgcctgcagtttcacattttccaaaattccctctccttacacactgagcaagcgcataaacggcaaatggtctggccagagtgcgggaggatgtggaaatttccaagaaacccacaaaaacaatccaatatatcagtttcacattgaaaaaacaggcccacttctgattgagcttcgaggtccacggcaatattcagttggtttcgaggtggtgacagtgagtactttgggcgatccagggccccatggctttctgaggaagtcaagcggcgactatcgatgtgggttctgctaccttgagttagaaaacataccctcaggaatcttcaacattattccctctaccttcctgcctaaacaagaaggcccctttttcttggacttcaacagcatcatccccatcaagataacacagctgcagtag

SEQ ID NO: 179007 - DNA, 2442 bp, Artificial Sequence
  derived and/or modified sequence
atggatgccacagccctggagagagatgctgtgcagtttgcccggctggccgtgcagagggaccacgagggccgctacagcgaggccgtgttctactacaaggaggccgcccaggccctgatctatgcagagatggccggcagcagcctggagaacatccaggagaagatcacagagtacctggagcgggtgcaggccctgcacagcgctgtgcagagcaagtctgctgaccccctgaagagcaagcaccagctggacctggagcgggcccacttcctggtgacccaggcctttgatgaagatgagaaggaaaatgtggaggatgccatcgagctgtacacagaggccgtggacctgtgcctgaagaccagctatgaaacagctgacaaggtgctgcagaacaagctgaagcagctggcccggcaggccctggacagagctgaggccctgtctgagcccctgaccaagcctgtgggcaagatcagcagcacctctgtgaagcccaagcccccacctgtgcgggcccacttccccctgggcgccaaccccttcctggagcggccccagagcttcatcagcccccagagctgtgatgcccagggccagcgctacacagctgaggagattgaggtgctgcggaccaccagcaagatcaatggaattgaatatgtgcccttcatgaatgtggacctgcgggagagatttgcctaccccatgcccttctgtgaccgctggggcaagctgcccctgagccccaagcagaagaccaccttcagcaagtgggtgcggcctgaggacctgaccaacaaccccaccatgatctacacagtgtcctccttcagcatcaagcagaccatcgtgtctgactgcagctttgtggccagcctggccatctctgctgcctatgaaagacgcttcaacaagaagctgatcaccggcatcatctacccccagaacaaggatggagagcctgagtacaacccctgtgggaagtacatggtgaagctgcacctgaatggagtgcccaggaaggtgatcattgatgaccagctgcctgtggaccacaagggggagctgctgtgcagctacagcaacaacaagtctgagctgtgggtgtccctgattgagaaggcctacatgaaggtgatgggcggctatgacttccctggcagcaacagcaacatcgacctgcacgccctgaccggctggatccctgagcgcatcgccatgcacagcgacagccagaccttcagcaaggacaacagcttcaggatgctgtaccagcgcttccacaagggagatgtgctgatcacagccagcacaggcatgatgacagaagctgagggggagaagtggggcctggtgcccacccacgcctatgctgtgctggacatccgggagttcaagggcctgcgcttcatccagctgaagaacccctggagccacctgcgctggaagggccgctacagtgaaaatgatgtgaagaactggaccccagagctgcagaagtacctgaactttgaccccaggacagcccagaagattgacaatggcatcttctggatctcctgggatgacctgtgccagtactatgatgtgatctacctgtcctggaaccctggcctcttcaaggagagcacctgcatccacagcacctgggatgccaagcagggccctgtgaaggatgcctacagcctggccaacaacccccagtacaagctggaggtgcagtgcccccagggcggcgctgctgtgtgggtgctgctgagccgccacatcacagacaaggatgactttgccaacaaccgggagttcatcaccatggtggtgtacaagacagatggcaagaaggtgtactacccagctgaccccccaccctacattgatggcatccgcatcaacagcccccactacctgaccaagatcaagctgaccaccccaggcacccacaccttcaccctggtggtgtcccagtatgagaagcagaacaccatccactacacagtgcgggtgtacagcgcctgcagcttcaccttcagcaagatccccagcccctacaccctgagcaagaggatcaatggcaagtggagcggccagagcgctgggggctgcggcaacttccaggagacccacaagaacaaccccatctaccagttccacatcgagaagacaggccccctgctgattgagctgcggggcccccggcagtacagcgtgggctttgaggtggtgacagtgtccaccctgggggaccccggcccccacggcttcctgaggaagagcagcggggactaccgctgtggcttctgctacctggagctggagaacatccccagcggcatcttcaacatcatccccagcaccttcctgcccaagcaggagggccccttcttcctggacttcaacagcatcatccccatcaagatcacccagctgcagtag

SEQ ID NO: 179008 - DNA, 2442 bp, Artificial Sequence
  derived and/or modified sequence
atggacgccaccgccctggagcgggacgccgtgcagttcgcccggctggctgtgcagcgagaccacgagggtcgttatagtgaagctgtattttattacaaagaggcggcacaggccttaatttacgccgaaatggccggcagctccctggaaaatatccaggagaagattactgaatatctggaacgagtccaagcactgcactcagcagtgcaaagcaaaagcgctgatcctctgaaaagcaaacatcagctcgacctggagagagcgcacttcttagtaacccaggcattcgacgaggacgagaaggagaacgtcgaggatgcaatcgagctgtatacagaggccgttgacttgtgtttgaagacaagttatgagacagcagacaaggtactgcagaacaagttgaagcagctggctcgccaagcccttgaccgtgccgaagccctgtcagagcccctcacgaaacctgtgggcaagatttcatccacgagtgtgaagcccaagcccccccccgtcagagcccacttccccttgggggcgaacccttttctcgaacgaccccagagtttcatctcgccacaatcgtgtgacgcgcaaggtcagcgctataccgccgaggagatagaggtcttgagaacaacctctaagatcaatggcattgaatacgttcctttcatgaatgtggatctcagggagagattcgcctaccctatgccattctgtgatcggtgggggaaattaccgttaagtcccaaacagaagacgaccttcagcaagtgggtaagacccgaggaccttacaaacaatcctacaatgatctatacagtgtcatccttttctattaaacagacgattgtctccgactgcagcttcgtggctagccttgctatttcagccgcttacgaacggaggttcaacaaaaaattaatcaccggcattatttatccacagaataaagacggcgaaccagagtacaacccttgtggcaagtatatggtcaaactgcacctaaatggagtccctcgaaaagttatcatcgacgatcagttgccagtggaccacaagggcgagttgctttgttcgtactctaataacaagtctgagctttgggtgagcttaatcgaaaaggcctacatgaaagttatgggtgggtacgactttcccggttcaaattccaacatcgacctgcacgcactcacgggatggatccccgaacgtatagctatgcactcagacagtcaaactttttctaaggacaattctttcagaatgctgtatcaacggtttcacaagggggatgtgttaattaccgcatctacaggcatgatgactgaagcagagggggagaaatggggactcgtcccgactcatgcatacgccgtgctggacattagagagtttaaaggcctcagatttatccagctgaagaacccttggtctcacctgaggtggaaggggcgatactcagagaatgatgttaaaaactggactcctgagctgcaaaagtacctgaacttcgaccctagaactgcacagaagattgacaacggaatcttttggatatcgtgggacgacctctgccagtactatgacgtgatatacttaagttggaaccctggactgttcaaggaatcaacctgtatacactctacctgggatgccaaacagggacccgtcaaagacgcgtacagtctagctaacaacccacagtataagctggaggttcagtgcccacagggaggcgccgcagtctgggtcttgttgtcacggcacatcaccgacaaagacgactttgcaaacaatagggaatttattacgatggtggtctataaaaccgacgggaagaaggtgtattaccctgctgatccacccccttacatagacggcatacgcatcaactcaccacattatctgaccaagattaagctaaccacccccgggacacacaccttcactctcgtcgtttcacaatacgagaagcagaacacaatccattacactgtaagagtctattctgcctgctctttcacgttctctaaaattccatcaccttatacgttgagtaagcgcattaacggaaaatggtccggccagagcgctggcggatgtggaaactttcaggaaactcataagaataaccccatatatcagttccacatagaaaaaacagggcccctgctgatcgagttgcgaggcccccggcagtacagtgtcgggttcgaagtcgtgacagtttccaccctcggagacccgggtcctcacggatttctacgcaagtcttctggggattatagatgcggcttttgttatctggagctggagaacatcccatcagggatttttaatattattccgtcaacctttctcccaaagcaggaagggccattcttcctcgactttaatagcattatccccatcaagatcacccagcttcaatag

SEQ ID NO: 179009 - DNA, 2442 bp, Artificial Sequence
  derived and/or modified sequence
atggatgccactgccttggagagggatgccgttcagttcgctcgcctcgccgttcagcgggatcacgagggaaggtacagtgaagctgtcttctattataaagaagccgcacaggctcttatctatgccgagatggctggatcttcattagaaaatattcaggaaaagattaccgaatacctggagagggtccaagctttgcactctgccgttcagagcaagagtgctgacccgctcaagtccaaacatcaacttgacttggaaagggcccatttcctcgtgacacaggcctttgacgaggacgaaaaggaaaatgtcgaagatgctattgagctgtatactgaggccgtagacctgtgcctaaaaacttcatatgaaacagctgacaaggtcctgcagaacaagctgaaacagttggccaggcaggcccttgacagggcagaagccctcagtgagcccctcactaagccagtaggtaagatctctagcacatctgtcaagcctaagccgccaccggtccgcgctcattttccactaggggctaacccgttcctcgaacgtcctcagagctttattagcccacaatcttgtgacgcacagggacagcgatacacagcagaggaaattgaagtgcttcggaccacatcgaagatcaatggaatcgaatacgtaccattcatgaacgtcgatctgagggaacgatttgcctaccccatgcctttctgcgatcgctggggcaagctgcccttgagtcccaagcagaagaccacgttctctaagtgggtcagacccgaggacttgactaacaaccctacaatgatttacaccgtcagctctttctcaattaagcagacgatcgttagcgattgcagttttgttgccagcctagccatcagcgcagcctacgaacgcaggttcaataaaaagttgatcactggcattatttatccccagaacaaggacggagagcctgaatacaacccatgtggcaagtatatggtcaagctccatctgaatggggttcctcgcaaggttatcatcgacgatcagctcccagtcgatcacaaaggtgagctgctgtgcagctacagtaacaataagtctgaactatgggtgtcactgatcgagaaggcttacatgaaggttatgggcggatatgattttcctgggagtaactctaatattgacctccatgccctcacaggttggatccccgaacggatcgccatgcactcggattcacagacatttagtaaagacaactcctttcggatgctgtatcagaggttccacaaaggggatgtcctgatcaccgcctcgacagggatgatgaccgaagctgagggggagaaatggggcctcgttcccactcacgcatatgccgttctggatatacgggagttcaaggggttgcgcttcattcagctgaaaaatccttggagccacctacggtggaagggcaggtattcggagaatgatgttaaaaactggactcctgagttgcaaaaatacttaaactttgatcctagaactgcccagaagatcgataatgggatattctggattagctgggatgatctgtgccaatactatgacgtgatctacctgtcatggaaccctggacttttcaaggagagtacatgcattcactctacatgggatgcaaaacaggggccagtgaaggatgcttactctctcgctaacaatccacagtataaactggaggtccagtgtcctcagggaggcgcagcagtgtgggtcctgctatctcgccacattaccgacaaggacgactttgcaaacaaccgcgagttcatcacaatggttgtgtataagacagacggaaagaaagtctactaccctgccgatccaccaccgtatattgatggaatcagaattaatagcccccattacttaaccaagatcaagctaaccacacctggtacccatactttcaccttagtggtcagtcagtacgagaagcagaacaccatccattacaccgttagggtctactctgcatgttcatttacgtttagcaagatacccagcccctatacgctgagcaaaaggatcaatggtaaatggagcggccagtcagccggaggttgtggcaactttcaggaaacccataagaacaacccaatatatcagttccacatcgagaagacagggcctctgttgattgaacttcggggacctcgccaatacagtgttggtttcgaagtagtcacggtgagcacccttggggaccctggtccacacggctttctccggaagtcctccggagattataggtgcgggttctgttacctcgaattagagaacatcccttccggcatctttaatatcatcccatccactttcctccctaaacaggaaggccctttcttcctggattttaactcgattatcccaatcaagataacccagctgcaatag

SEQ ID NO: 179010 - DNA, 4353 bp, Artificial Sequence
  derived and/or modified sequence
ggcgagggccgctggggccgcgaagtggggcggccgggtgggctacaagccgggtctgggctgaggggcgcggcttcgcggtggaccccagcccggcaacgggaaggcgagctctcctccaccgtccaaagtaaactttgccgctccttccgcggcgctcccgagtcctcgccgccgccgggccgccgcagtccgcgaagagccgtcctgcgtcagggcctccttccctgccccggcgcggggccactgcgccatggacgccacagcactggagcgggacgctgtgcagttcgcccgtctggcggttcagcgcgaccacgaaggccgctactccgaggcggtgttttattacaaggaagctgcacaagccttaatttatgctgagatggcaggatcaagcctagaaaatattcaagaaaaaataactgagtatctggaaagagttcaagctctacattcagcagttcagtcaaagagtgctgatcctttgaagtcaaaacatcagttggacttagagcgtgctcatttccttgttacacaagcttttgatgaagatgaaaaagagaatgttgaagatgctatagaattgtacacagaagctgtggatctctgtctgaaaacatcttatgaaactgctgataaagtcctgcaaaataaactgaaacagttggctcgacaggcactagacagagcagaagcgctgagtgagcctttgaccaagccagttggcaaaatcagttcaacaagtgttaagccaaagccacctccagtgagagcacattttccactgggcgctaatcccttccttgaaagacctcagtcatttataagtcctcagtcatgtgatgcacaaggacagagatacacagcagaagaaatagaagtactcaggacaacatcaaaaataaatggtatagaatatgttcctttcatgaatgttgacctgagagaacgttttgcctatccaatgcctttctgtgatagatggggcaagctaccattatcacctaaacaaaaaactacattttccaagtgggtacgaccagaagacctcaccaacaatcctacaatgatatatactgtgtccagttttagcataaagcagacaatagtatcggattgctcctttgtggcatcactggccatcagtgcagcttatgaaagacgttttaataagaagttaattaccggcataatttaccctcaaaacaaggatggtgaaccagaatacaatccatgtgggaagtatatggtaaaacttcacctcaatggtgtcccaagaaaggtgataattgatgaccagttacctgttgatcacaagggagaattgctctgttcttattccaacaacaaaagtgaattatgggtttctctcatagaaaaagcatacatgaaagtcatgggaggatatgattttccaggatccaactccaatattgatcttcatgcactgactggctggataccagaaagaattgctatgcattcagatagccaaactttcagtaaggataattctttcagaatgctttatcaaagatttcacaaaggagatgtcctcatcactgcgtcaactggaatgatgacagaagctgaaggagagaagtggggtctggttcccacacacgcatatgctgttttggatattagagagttcaaggggctgcgatttatccagttgaaaaatccttggagtcatttacgttggaaaggaagatacagtgaaaatgatgtaaaaaactggactccagagttgcaaaagtatttaaactttgatccccgaacagctcagaaaatagacaacggaatattttggatttcctgggatgatctctgccagtattatgatgtgatttatttgagttggaatccaggtctttttaaagaatcaacatgtattcacagtacttgggatgctaagcaaggacctgtgaaagatgcctatagcctggccaacaacccccagtacaaactggaggtgcagtgtccacaggggggtgctgcagtttgggttttgcttagtagacacataacagacaaggatgattttgcgaataatcgagaatttatcacaatggttgtatacaagactgatgggaaaaaagtttattacccagctgacccacctccatacattgatggaattcgaattaacagccctcattatttgactaagataaagctgaccacacctggcacccatacctttacattagtggtttctcaatatgaaaaacagaacacaatccattacacggttcgggtatattcagcatgcagctttactttttcaaagattccttcaccatacaccttatcaaaacggattaatggaaagtggagtggtcagagtgctggaggatgtggaaatttccaagagactcacaaaaataaccccatctaccaattccatatagaaaagactgggccgttactgattgagctacgaggaccaaggcaatatagcgttggatttgaggttgtaacagtttctactctaggagatcctggtccccatggctttctgaggaaatctagtggtgactataggtgtgggttttgctacctggaattagaaaatataccttctgggatcttcaatatcattcctagtacctttttgcctaaacaagaaggaccttttttcttggactttaatagtattatccccatcaagatcacacaacttcagtgatggagaaatctcaagttactggcttttatacttaccaaacatcagttcttcaaataaggacgcaaatcttcaggacagtaagcagaacaatcagaatggaattaaatctctaaaaacgtgttacagtggaatctggtgcttgtcagggtgtttggtaagaactgtatatagtcagaattacctaaatcacctagaggtaccgtttacatggttttgtgtatatagagttggcttgcattttaggggccattttgtataaaaagtgcatatgattaaaattagactcagtcatcactgtgagatgcctttgctaagaggataaaggaactgagaccagatgagaaaaagaaaggatatagattccttgagtggaatagtgggctagattaatataccgaaatatttccattgtttcccttttttgcagagcatgtggaagttaaacctgcttgattctactatacatcttgggcaactagttaccaaatgaattgtgccaccataactgattttaattttgcattatttatgattttaaaatatttgttgcccaggtgttatgaaagaataaagcttttaagtatagactaccttagcatgaagatgctcatgcctaagaatgaaaattgttgaggttatctcccattcaatcatgtagcaagaacttaaagaaattcactactgcagtttttatttttaaaaaacagtaattgagatattgaagacattacaatttagtttgtgtggtctttttttaaattgctgtatcgttcagtctcttgtggcaatagcactttgaagaaaatagagaatttaatatatggtgattgggatatgtagcattcaaaaaaagtgaattgccaagatactggtgtcatgtaaattcccactttacataaaaacccatcaggacagaatgatgctcaatattttaaaattctaaaaatagggtgggatttttcattgtctctactttataattatcaaaacttattttgtattgctactaccttaaattgaaataaaatgtttatacttacggatattgcatagtttaagttagatttattgaaagatttcatctgtcgtgtttcatgtaaatgagaacagattatttgcatgaaaatatatacttcaacaaaaatctgttctttaacagagtagtggtagattattacactaatgagatttcactttggtaaatacttcatgctttcagttttagcctattaattttaggtggacaaatttaacaagttttctgttactttttaaaaagaaaaaatccagaacataagaactatattatgaacacatgatttgaacctgttgtggtaaagatcttgtacaggatgcaaactaaaaacctaatccctgccatcaaatttattagaagagacctatatatgaacaacttaaaggcactgatttctataatagagctctaaaaacatgccaccagtgtatgaataagggaaagattaattttggctggaccaatataaaaaattgtatttgaagaattgatactttaacttggaccttgaaggtaaagcttcaaaagacaggttactgaccattgagtgtttactatgtacccaatgtgtatatttttctttttaatcttcccaatagctgaataaagtatagatactatt

SEQ ID NO: 179011 - DNA, 2442 bp, Artificial Sequence
  derived and/or modified sequence
atggacgccaccgccctggagagagacgccgtgcagttcgccagactggccgtgcagagagaccacgagggcagatacagcgaggccgtgttctactacaaggaggccgcccaggccctgatctacgccgagatggccggcagcagcctggagaacatccaggagaagatcaccgagtacctggagagagtgcaggccctgcacagcgccgtgcagagcaagagcgccgaccccctgaagagcaagcaccagctggacctggagagagcccacttcctggtgacccaggccttcgacgaggacgagaaggagaacgtggaggacgccatcgagctgtacaccgaggccgtggacctgtgcctgaagaccagctacgagaccgccgacaaggtgctgcagaacaagctgaagcagctggccagacaggccctggacagagccgaggccctgagcgagcccctgaccaagcccgtgggcaagatcagcagcaccagcgtgaagcccaagcccccccccgtgagagcccacttccccctgggcgccaaccccttcctggagagaccccagagcttcatcagcccccagagctgcgacgcccagggccagagatacaccgccgaggagatcgaggtgctgagaaccaccagcaagatcaacggcatcgagtacgtgcccttcatgaacgtggacctgagagagagattcgcctaccccatgcccttctgcgacagatggggcaagctgcccctgagccccaagcagaagaccaccttcagcaagtgggtgagacccgaggacctgaccaacaaccccaccatgatctacaccgtgagcagcttcagcatcaagcagaccatcgtgagcgactgcagcttcgtggccagcctggccatcagcgccgcctacgagagaagattcaacaagaagctgatcaccggcatcatctacccccagaacaaggacggcgagcccgagtacaacccctgcggcaagtacatggtgaagctgcacctgaacggcgtgcccagaaaggtgatcatcgacgaccagctgcccgtggaccacaagggcgagctgctgtgcagctacagcaacaacaagagcgagctgtgggtgagcctgatcgagaaggcctacatgaaggtgatgggcggctacgacttccccggcagcaacagcaacatcgacctgcacgccctgaccggctggatccccgagagaatcgccatgcacagcgacagccagaccttcagcaaggacaacagcttcagaatgctgtaccagagattccacaagggcgacgtgctgatcaccgccagcaccggcatgatgaccgaggccgagggcgagaagtggggcctggtgcccacccacgcctacgccgtgctggacatcagagagttcaagggcctgagattcatccagctgaagaacccctggagccacctgagatggaagggcagatacagcgagaacgacgtgaagaactggacccccgagctgcagaagtacctgaacttcgaccccagaaccgcccagaagatcgacaacggcatcttctggatcagctgggacgacctgtgccagtactacgacgtgatctacctgagctggaaccccggcctgttcaaggagagcacctgcatccacagcacctgggacgccaagcagggccccgtgaaggacgcctacagcctggccaacaacccccagtacaagctggaggtgcagtgcccccagggcggcgccgccgtgtgggtgctgctgagcagacacatcaccgacaaggacgacttcgccaacaacagagagttcatcaccatggtggtgtacaagaccgacggcaagaaggtgtactaccccgccgacccccccccctacatcgacggcatcagaatcaacagcccccactacctgaccaagatcaagctgaccacccccggcacccacaccttcaccctggtggtgagccagtacgagaagcagaacaccatccactacaccgtgagagtgtacagcgcctgcagcttcaccttcagcaagatccccagcccctacaccctgagcaagagaatcaacggcaagtggagcggccagagcgccggcggctgcggcaacttccaggagacccacaagaacaaccccatctaccagttccacatcgagaagaccggccccctgctgatcgagctgagaggccccagacagtacagcgtgggcttcgaggtggtgaccgtgagcaccctgggcgaccccggcccccacggcttcctgagaaagagcagcggcgactacagatgcggcttctgctacctggagctggagaacatccccagcggcatcttcaacatcatccccagcaccttcctgcccaagcaggagggccccttcttcctggacttcaacagcatcatccccatcaagatcacccagctgcagtag

SEQ ID NO: 179012 - protein, 254 aa, Artificial Sequence
  derived and/or modified sequence
MAEAVLRVARRQLSQRGGSGAPILLRQMFEPVSCTFTYLLGDRESREAVLIDPVLETAPRDAQLIKELGLRLLYAVNTHCHADHITGSGLLRSLLPGCQSVISRLSGAQADLHIEDGDSIRFGRFALETRASPGHTPGCVTFVLNDHSMAFTGDALLIRGCGRTDFQQGCAKTLYHSVHEKIFTLPGDCLIYPAHDYHGFTVSTVEEERTLNPRLTLSCEEFVKIMGNLNLPKPQQIDFAVPANMRCGVQTPTA

SEQ ID NO: 179013 - DNA, 765 bp, Artificial Sequence
  derived and/or modified sequence
atggccgaagctgtgttgcgagtggctcggagacagttgtcccagagaggtgggagcggcgcacctatcctcctgcggcaaatgtttgagccggtcagttgcactttcacctatctgctcggtgacagagagtcaagggaggccgtgctgatcgacccagtgctcgagacggctcctcgagacgcacagctgataaaggagctgggattgcgcctgttatatgccgtgaacacacactgtcacgccgaccacataacaggaagtggtttgctgaggtccctgctgcccggatgtcagagtgtgattagcaggctgtcgggcgcccaggctgacctgcatatagaggacggagacagcattcgatttgggcgctttgccttggagactcgagccagccccggacatacccctgggtgtgtgactttcgtgttgaatgatcattcgatggcatttacaggagacgccctcctaatccgtggttgcggacggaccgactttcaacagggctgtgcaaagacactgtatcactcagtccacgagaaaatatttactctgccaggtgactgtctaatttaccctgcccacgattaccatggttttacagtgtccacggtggaagaggaacgcacactcaacccacgtctgacactttcgtgcgaagagttcgtgaaaatcatgggaaaccttaatctccccaaaccgcagcagattgacttcgccgttcccgccaatatgaggtgcggagtccaaacccctacagcctag

SEQ ID NO: 179014 - DNA, 765 bp, Artificial Sequence
  derived and/or modified sequence
atggccgaggccgtgctgcgggtggcccggcggcagctgagccagagaggaggcagcggggcccccatcctgctgcggcagatgtttgagcctgtgtcctgcaccttcacctacctgctgggggaccgggagagccgggaggccgtgctgattgatcctgtgctggagacagcccccagagatgcccagctgatcaaggagctgggcctgcggctgctgtatgctgtgaacacccactgccacgccgaccacatcaccggcagcggcctgctgcggagcctgctgcccggctgccagagcgtcatcagccggctgagcggggcccaggccgacctgcacattgaagatggagacagcatccgcttcggccgctttgccctggagacccgggccagccctggccacaccccaggctgtgtgacctttgtgctgaatgaccacagcatggccttcaccggagatgccctgctgatccggggctgcggccgcacagacttccagcagggctgtgccaagaccctgtaccacagcgtgcatgagaagatcttcaccctgcccggggactgcctgatctacccagcccatgactaccacggcttcaccgtgtccacagtggaggaggagaggaccctgaacccccggctgaccctgagctgtgaggagtttgtgaagatcatgggcaacctgaacctgcccaagccccagcagattgactttgctgtgcctgccaacatgagatgtggggtgcagacccccacagcctag

SEQ ID NO: 179015 - DNA, 765 bp, Artificial Sequence
  derived and/or modified sequence
atggccgaggccgtgctgcgggtggcccggcggcagctgagccagcggggtggatcgggggcgcccatcttgctgcgccagatgtttgaaccggtcagctgtacctttacatatttgctgggggatagggaatcaagagaggctgtgctgattgaccccgtcctggagactgccccccgagatgcacagctgattaaggagctggggctcaggctgctgtatgccgtgaatactcattgccatgctgatcacattactggctctggtttgctgcgtagtttgctcccaggctgtcaaagcgttatctcacgcctctctggcgcccaggctgatctgcacattgaagacggtgactcaataagatttgggaggttcgctctcgaaactcgtgcatctcccgggcacactccaggctgcgtaaccttcgtgctgaatgatcatagtatggcttttacaggagatgccctgcttatccggggctgcggacgcacagatttccaacagggctgcgccaagactctgtaccacagtgtacacgagaaaatcttcactctgcctggtgattgcctgatttatcccgcccatgattaccatggctttaccgtgtccacagtggaggaggagcgcaccttaaacccgcggctgacgctttcctgtgaagagttcgttaagataatgggcaatctgaatctccctaagcctcaacagatcgattttgccgttccagcaaacatgaggtgtggagtgcagaccccaacggcttag

SEQ ID NO: 179016 - DNA, 765 bp, Artificial Sequence
  derived and/or modified sequence
atggctgaagccgtgctaagggtcgcccgacgacagttaagccagagagggggatctggcgctcctattctactccggcagatgttcgagcctgtaagctgcacctttacctacttattgggagacagagagtctagagaggcagttctgattgacccggttctcgagacagcccctcgagacgcccagctgattaaggaattgggcctgcggttgctttatgctgttaacacacattgtcacgccgaccacattaccgggtccggattgttgagaagtctcctccccggttgccagtcagtcatctcccgactttccggagctcaagctgaccttcatatagaggacggtgactctatacggtttggacggtttgcactcgagacaagggcttccccgggtcatacgccaggctgtgtgacattcgtcctcaatgaccattcgatggcatttaccggcgacgctctcctgatcagaggttgcgggcgtactgattttcagcaggggtgcgccaagacgctttaccattctgtgcacgagaaaatcttcactctgcccggagactgcctgatctatcctgcccacgattaccatgggttcactgtcagtactgtagaagaagagcgaactctaaatccgagactgacactctcctgtgaggagtttgttaagatcatggggaaccttaatctgccgaagccacagcagatagacttcgcagtaccagccaacatgcgatgtggtgtgcagacgcccacagcatag

SEQ ID NO: 179017 - DNA, 765 bp, Artificial Sequence
  derived and/or modified sequence
atggccgaggccgtgctgagagtggccagaagacagctgagccagagaggcggcagcggcgcccccatcctgctgagacagatgttcgagcccgtgagctgcaccttcacctacctgctgggcgacagagagagcagagaggccgtgctgatcgaccccgtgctggagaccgcccccagagacgcccagctgatcaaggagctgggcctgagactgctgtacgccgtgaacacccactgccacgccgaccacatcaccggcagcggcctgctgagaagcctgctgcccggctgccagagcgtgatcagcagactgagcggcgcccaggccgacctgcacatcgaggacggcgacagcatcagattcggcagattcgccctggagaccagagccagccccggccacacccccggctgcgtgaccttcgtgctgaacgaccacagcatggccttcaccggcgacgccctgctgatcagaggctgcggcagaaccgacttccagcagggctgcgccaagaccctgtaccacagcgtgcacgagaagatcttcaccctgcccggcgactgcctgatctaccccgcccacgactaccacggcttcaccgtgagcaccgtggaggaggagagaaccctgaaccccagactgaccctgagctgcgaggagttcgtgaagatcatgggcaacctgaacctgcccaagccccagcagatcgacttcgccgtgcccgccaacatgagatgcggcgtgcagacccccaccgcctag

SEQ ID NO: 179018 - DNA, 962 bp, Artificial Sequence
  derived and/or modified sequence
agtgccgtagcgcccggctcctgcaggcgctcggcctccgctcattcctgaccccgcagtgggcgcgatggcggaggctgtactgagggtcgcccggcggcagctgagccagcgcggcgggtctggagcccccatcctcctgcggcagatgttcgagcctgtgagctgcaccttcacgtacctgctgggtgacagagagtcccgggaggccgttctgatcgacccagtcctggaaacagcgcctcgggatgcccagctgatcaaggagctggggctgcggctgctctatgctgtgaatacccactgccacgcggaccacattacaggctcggggctgctccgttccctcctccctggctgccagtctgtcatctcccgccttagtggggcccaggctgacttacacattgaggatggagactccatccgcttcgggcgcttcgcgttggagaccagggccagccctggccacaccccaggctgtgtcaccttcgtcctgaatgaccacagcatggccttcactggagatgccctgttgatccgtgggtgtgggcggacagacttccagcaaggctgtgccaagaccttgtaccactcggtccatgaaaagatcttcacacttccaggagactgtctgatctaccctgctcacgattaccatgggttcacagtgtccaccgtggaggaggagaggactctgaaccctcggctcaccctcagctgtgaggagtttgtcaaaatcatgggcaacctgaacttgcctaaacctcagcagatagactttgctgttccagccaacatgcgctgtggggtgcagacacccactgcctgatctcacttctgtcagatgctcccatccactattaatgcactaggtgggaggagagggcggcaatgacactgcacctctcctttcccaccgcattccctggagctccctaaataaaactttttttaacgtg

SEQ ID NO: 179019 - DNA, 894 bp, Artificial Sequence
  derived and/or modified sequence
atggatgcagagggcctggctttgttattacccccagtgacattggccgcccttgttgattcttggctcagagaagattgtcccggtctcaactatgctgccctggtgagcggtgcaggaccgagtcaggcagcactgtgggctaagtcaccaggtgtcctggcaggacagccattcttcgacgccatctttacacagctgaactgtcaagtctcatggtttttaccagaagggtcaaagctggtgcctgtcgctagagtggctgaggttcggggacccgcgcactgtctcttgcttggggagcgggtggcactgaataccctagcccgctgctcagggatcgcatccgcagcggctgctgcagtggaggccgctcgtggcgccgggtggactggccacgtcgcaggcaccaggaaaaccacacccggttttcggctggtcgaaaagtatggactgcttgtgggcggcgctgctagccaccggtatgacctggggggtctggtgatggtgaaagataatcatgtagtcgcagcaggtggcgtggagaaagcagtcagagccgctaggcaggctgccgattttaccctgaaagttgaggtggagtgcagctccctgcaggaagccgtgcaggcggccgaggctggcgccgatctggtcctgctcgataactttaaacctgaagaactgcatccaaccgctactgtgttgaaagctcaatttcccagcgtcgctgttgaagcatccggaggaattactctcgacaatctgccacagttttgtggaccacacattgacgttatttctatgggtatgctgacacaggcggccccagcgctggatttttccctgaagctcttcgcgaaggaagtagcccccgtccccaagatccactag

SEQ ID NO: 179020 - DNA, 498 bp, Artificial Sequence
  derived and/or modified sequence
atggacgctgagggcctggcccttctcctgccccccgttacactggccgcactggtggatagttggctaagggaagactgccccgggctgaactatgcggccctagtgagcggtgcgggcccgagtcaggccgcgttatgggctaagagccccggcgtcctggctggtcaaccattcttcgacgccatttttacacaactcaattgtcaggtgagctggtttctccctgaggggtcgaagttggtgcccgtagcccgcgtggctgaagtgcgaggccctgctcactgtctcttgctgggggagcgcgtggcactgaatactctggctcggtgctctggtatcgcctccgcagctgccgccgctgtcgaggccgcacggggcgccggctggaccggtcatgtagctggtacccgcaagactacacctgggtttagacttgtagagaaatatgggttactcgtgggtggagccgccagtcacagatatgacctcggatag

SEQ ID NO: 179021 - DNA, 894 bp, Artificial Sequence
  derived and/or modified sequence
atggatgctgagggcctggccctgctgctgccccctgtgaccctggccgccctggtggacagctggctgcgggaggactgccccggcctgaactatgctgccctggtgtctggagctggccccagccaggccgccctgtgggccaagagccctggggtgctggccggccagcccttctttgatgccatcttcacccagctgaactgccaggtgtcctggttcctgcctgagggcagcaagctggtgcctgtggcccgggtggccgaggtgcggggccctgcccactgcctgctgctgggggagcgggtggccctgaacaccctggcccgctgcagcggcatcgccagcgctgctgctgctgctgtggaggccgcccggggggccggctggacaggccacgtggccggcaccaggaagaccaccccaggcttccggctggtggagaagtatggcctgctggtgggcggggccgccagccacagatatgacctgggcggcctggtgatggtgaaggacaaccacgtggtggccgccggcggcgtggagaaggctgtgcgggccgcccggcaggccgctgacttcaccctgaaggtggaggtggagtgcagcagcctgcaggaggccgtgcaggccgctgaggccggggctgacctggtgctgctggacaacttcaagccagaggagctgcaccccacagccaccgtgctgaaggcccagttccccagcgtggccgtggaggccagcggcggcatcaccctggacaacctgccccagttctgtggcccccacattgatgtgatctccatgggcatgctgacccaggccgccccagccctggacttcagcctgaagctgtttgccaaggaggtggcccctgtgcccaagatccactag

SEQ ID NO: 179022 - DNA, 498 bp, Artificial Sequence
  derived and/or modified sequence
atggatgctgagggcctggccctgctgctgccccctgtgaccctggccgccctggtggacagctggctgcgggaggactgccccggcctgaactatgctgccctggtgtctggagctggccccagccaggccgccctgtgggccaagagccctggggtgctggccggccagcccttctttgatgccatcttcacccagctgaactgccaggtgtcctggttcctgcctgagggcagcaagctggtgcctgtggcccgggtggccgaggtgcggggccctgcccactgcctgctgctgggggagcgggtggccctgaacaccctggcccgctgcagcggcatcgccagcgctgctgctgctgctgtggaggccgcccggggggccggctggacaggccacgtggccggcaccaggaagaccaccccaggcttccggctggtggagaagtatggcctgctggtgggcggggccgccagccacagatatgacctgggctag

SEQ ID NO: 179023 - DNA, 894 bp, Artificial Sequence
  derived and/or modified sequence
atggacgccgagggcctggccctgctgctgccccccgtgaccctggctgccttagtcgacagctggctaagggaggactgccccggtctgaattatgcagcccttgtgtccggtgcgggcccttcacaggcagcgttgtgggcaaagtcgcccggcgtcctggccggacagcccttcttcgatgccatcttcacacagctcaattgtcaggtgtcctggtttctgcccgagggcagcaagctcgtgcctgtagcaagagtcgccgaagtccgcggtcctgcccactgtcttctcttaggcgaaagagttgctctgaatacgttagcgcgttgcagcgggattgctagtgctgccgcggccgccgtggaggccgcccgcggggctgggtggactggccacgtcgccggcacacgcaagactaccccaggctttaggcttgtcgaaaagtatggtttgttggtgggcggggccgcatcccaccgatacgatcttggtggattggttatggttaaggacaatcacgttgttgctgccggcggcgtggagaaagcggtccgggcagctcggcaggcggcagacttcacactcaaagtggaggtagaatgtagcagcctgcaggaggcagttcaggcagctgaggccggagcagatctggttttgctggataacttcaaacccgaggaattgcaccccacagccactgtcctgaaggctcagttcccgtctgtagcagttgaggcgtcagggggcataacgctagacaatctccctcagttttgtggaccacatatagatgttatctcaatgggtatgctgactcaggcagcgccagccctggacttttctctgaaactgtttgcgaaggaagtagctcctgtgcctaagatccactag

SEQ ID NO: 179024 - DNA, 498 bp, Artificial Sequence
  derived and/or modified sequence
atggacgccgagggcctggccctgctgctgccccccgtgaccctggctgcccttgtagattcatggctacgagaagactgcccgggcctgaactacgcagcccttgtgtcaggtgctgggccctcacaggcagctctgtgggctaagtctccaggggtgctggccgggcagcctttcttcgatgccattttcacgcagctgaattgccaggtcagctggttccttcccgagggatcgaagctggtccccgtcgcacgtgtcgcagaggttcgtggtcccgcccactgtttgctgctcggtgagcgagtggccctgaacactctggctcggtgttccggcatcgctagcgctgctgccgctgcagtagaagctgcacgcggggcggggtggactggtcacgtggccggaactcgcaagactacccccgggttcaggttggtggaaaaatatggtctgctggtcggaggagccgcctctcacaggtacgatcttggatag

SEQ ID NO: 179025 - DNA, 894 bp, Artificial Sequence
  derived and/or modified sequence
atggatgctgaaggattggcacttctgttgcccccagtcactttggccgctctagtggattcctggctgcgagaggactgtcctggactgaattacgcagctttggtgagcggggctggcccttctcaagcagccctctgggcaaagagtccaggggtcttagccggacagcccttttttgatgcaatttttacccagctaaactgtcaggtgtcttggtttctgccagagggctctaaactggtgcctgtggcccgtgtcgctgaggtgcgaggccctgctcattgccttctgcttggtgagagggtggcccttaataccttggctagatgcagcggcattgctagcgcagccgcagcagctgtggaggcggcacggggtgcgggttggacaggacatgtagcaggtacccggaagactacccccggtttccgtctcgtggaaaaatatggcctcttggtcggcggagccgcatcccacaggtatgatctggggggattggtaatggtgaaggataatcacgttgtcgcagcgggaggagtggaaaaagccgtgagagccgcaagacaggccgcagacttcactctgaaggtggaggtcgaatgcagtagtctgcaagaagctgtgcaggcagctgaagccggtgctgatctcgtgttgttggacaacttcaagccggaagagctccacccaaccgccacagttctgaaagcgcagttcccaagtgtggcggttgaggcttccgggggaattacattagacaacctcccacaattctgtggtcctcacatcgacgtaatcagcatgggaatgctcacacaggctgcccctgccctggacttctccctgaagcttttcgcaaaagaagtcgcacctgtgcctaagatccactag

SEQ ID NO: 179026 - DNA, 498 bp, Artificial Sequence
  derived and/or modified sequence
atggatgctgagggccttgctcttcttctgccacctgtgactctcgcggctctcgtggactcgtggctcagggaagattgtccagggctcaactatgccgcactagtgtcaggcgctggtcctagccaagcggcattgtgggccaagtctccgggagtattggctggccagcccttcttcgacgccatctttactcagctgaattgccaagtttcttggttccttccagaaggaagtaagttagtacccgttgccagggttgctgaagtaagagggcctgcacactgtttattactcggggaacgagtcgccttaaacacgcttgcccgttgcagcggtatcgcatcggccgcagctgccgctgtcgaggccgctcgcggagccggatggaccgggcacgtggccggtaccaggaaaaccaccccgggtttcagactcgtggaaaagtatgggcttctcgtgggcggtgcggcatcccaccggtacgatctcggatag

SEQ ID NO: 179027 - DNA, 894 bp, Artificial Sequence
  derived and/or modified sequence
atggacgccgagggcctggccctgctgctgccccccgtgaccctggccgccctggtggacagctggctgagagaggactgccccggcctgaactacgccgccctggtgagcggcgccggccccagccaggccgccctgtgggccaagagccccggcgtgctggccggccagcccttcttcgacgccatcttcacccagctgaactgccaggtgagctggttcctgcccgagggcagcaagctggtgcccgtggccagagtggccgaggtgagaggccccgcccactgcctgctgctgggcgagagagtggccctgaacaccctggccagatgcagcggcatcgccagcgccgccgccgccgccgtggaggccgccagaggcgccggctggaccggccacgtggccggcaccagaaagaccacccccggcttcagactggtggagaagtacggcctgctggtgggcggcgccgccagccacagatacgacctgggcggcctggtgatggtgaaggacaaccacgtggtggccgccggcggcgtggagaaggccgtgagagccgccagacaggccgccgacttcaccctgaaggtggaggtggagtgcagcagcctgcaggaggccgtgcaggccgccgaggccggcgccgacctggtgctgctggacaacttcaagcccgaggagctgcaccccaccgccaccgtgctgaaggcccagttccccagcgtggccgtggaggccagcggcggcatcaccctggacaacctgccccagttctgcggcccccacatcgacgtgatcagcatgggcatgctgacccaggccgcccccgccctggacttcagcctgaagctgttcgccaaggaggtggcccccgtgcccaagatccactag

SEQ ID NO: 179028 - DNA, 498 bp, Artificial Sequence
  derived and/or modified sequence
atggacgccgagggcctggccctgctgctgccccccgtgaccctggccgccctggtggacagctggctgagagaggactgccccggcctgaactacgccgccctggtgagcggcgccggccccagccaggccgccctgtgggccaagagccccggcgtgctggccggccagcccttcttcgacgccatcttcacccagctgaactgccaggtgagctggttcctgcccgagggcagcaagctggtgcccgtggccagagtggccgaggtgagaggccccgcccactgcctgctgctgggcgagagagtggccctgaacaccctggccagatgcagcggcatcgccagcgccgccgccgccgccgtggaggccgccagaggcgccggctggaccggccacgtggccggcaccagaaagaccacccccggcttcagactggtggagaagtacggcctgctggtgggcggcgccgccagccacagatacgacctgggctag

SEQ ID NO: 179029 - protein, 179 aa, Artificial Sequence
  derived and/or modified sequence
MLSLDFLDDVRRMNKRQLYYQVLNFGMIVSSALMIWKGLMVITGSESPIVVVLSGSMEPAFHRGDLLFLTNRVEDPIRVGEIVVFRIEGREIPIVHRVLKIHEKQNGHIKFLTKGDNNAVDDRGLYKQGQHWLEKKDVVGRARGFVPYIGIVTILMNDYPKFKYAVLFLLGLFVLVHRE

SEQ ID NO: 179030 - protein, 153 aa, Artificial Sequence
  derived and/or modified sequence
MIVSSALMIWKGLMVITGSESPIVVVLSGSMEPAFHRGDLLFLTNRVEDPIRVGEIVVFRIEGREIPIVHRVLKIHEKQNGHIKFLTKGDNNAVDDRGLYKQGQHWLEKKDVVGRARGFVPYIGIVTILMNDYPKFKYAVLFLLGLFVLVHRE

SEQ ID NO: 179031 - DNA, 540 bp, Artificial Sequence
  derived and/or modified sequence
atgctgagcctggacttcctggacgacgtgagaagaatgaacaagagacagctgtactaccaggtgctgaacttcggcatgatcgtgagcagcgccctgatgatctggaagggcctgatggtgatcaccggcagcgagagccccatcgtggtggtgctgagcggcagcatggagcccgccttccacagaggcgacctgctgttcctgaccaacagagtggaggaccccatcagagtgggcgagatcgtggtgttcagaatcgagggcagagagatccccatcgtgcacagagtgctgaagatccacgagaagcagaacggccacatcaagttcctgaccaagggcgacaacaacgccgtggacgacagaggcctgtacaagcagggccagcactggctggagaagaaggacgtggtgggcagagccagaggcttcgtgccctacatcggcatcgtgaccatcctgatgaacgactaccccaagttcaagtacgccgtgctgttcctgctgggcctgttcgtgctggtgcacagagagtag

SEQ ID NO: 179032 - DNA, 540 bp, Artificial Sequence
  derived and/or modified sequence
atgctcagtcttgacttcctagatgacgttcggcgtatgaataaacggcagttatactatcaggtgttgaacttcggcatgattgtgagcagcgcactcatgatctggaaggggctgatggttatcaccgggtccgagtccccaatcgtggtcgtactctctggaagtatggaaccggcattccaccgtggggacctgctgttcctgaccaaccgggtggaggatcccatccgggtcggggaaatcgtcgtttttaggatcgagggccgcgagatcccaatcgtgcaccgggtgctcaagatacatgagaaacagaacggccacatcaagtttctcacgaaaggggataacaacgccgttgacgatagaggtctgtacaagcagggtcaacattggctggagaaaaaagatgtggtgggcagagccagaggatttgtgccatacattggcatcgtgacgatacttatgaacgattatcctaaattcaaatacgcagtgctgtttttgcttggtctttttgtcctggttcacagggagtag

SEQ ID NO: 179033 - DNA, 540 bp, Artificial Sequence
  derived and/or modified sequence
atgctgagcctggacttcctggatgatgtgcggaggatgaacaagaggcagctgtactaccaggtgctgaactttggcatgattgtgtcctctgccctgatgatctggaagggcctgatggtgatcactggaagtgagagccccatcgtggtggtgctgagcggctccatggagcccgccttccacagaggagacctgctcttcctgaccaacagagtggaggaccccatccgggtgggggagatcgtggtgttcagaattgagggccgggagatccccatcgtgcaccgggtgctgaagatccacgagaagcagaatggccacatcaagttcctgaccaagggggacaacaatgctgtggatgaccggggcctgtacaagcagggccagcactggctggagaagaaggatgtggtgggccgggcccggggctttgtgccctacatcggcatcgtgaccatcctgatgaatgactaccccaagttcaagtatgctgtgctcttcctgctgggcctgtttgtgctggtgcaccgggagtag

SEQ ID NO: 179034 - DNA, 540 bp, Artificial Sequence
  derived and/or modified sequence
atgctgagcctggacttcctggacgacgtgcggcggatgaacaagcgccaactgtattatcaggtactaaattttggtatgattgtttcttctgctctaatgatatggaaggggttaatggtcataaccggatcggagtcaccaatcgtggtggttctttcaggttccatggaacctgcgttccatcgcggggatctgctgttcctgacgaatcgagtcgaagacccaattcgggtgggcgagatcgtggtgttccgaatcgagggtagggagatcccaattgtgcaccgggtcctgaagatacacgaaaaacagaacgggcatatcaaatttttgacaaagggcgataacaacgcggtcgacgaccgaggcttgtataagcagggacagcactggttggaaaaaaaggatgtagttggaagggcaagggggtttgtgccatacataggcatagttacgattctgatgaatgattacccgaagttcaagtacgcggtcctgttcttgctgggcctcttcgtgcttgtacatcgagagtag

SEQ ID NO: 179035 - DNA, 540 bp, Artificial Sequence
  derived and/or modified sequence
atgctgagtctagacttcttagatgacgtccggaggatgaacaagagacagctatactatcaggtgcttaattttggtatgatagtaagtagcgccctcatgatttggaagggtctaatggttataacaggctctgaatccccaatagtcgtggtcctctccggtagtatggagccagcctttcataggggtgacttattattcctgaccaatcgggtggaggacccaatccgagttggcgagattgtcgtgttccgcatagagggcagggaaatccccatcgtccatcgtgtattgaaaatccatgaaaagcaaaacggacacatcaaatttcttaccaaaggcgataataacgccgtggatgaccgtggtctctataaacaggggcagcattggcttgaaaaaaaggatgtcgtaggacgcgcaagggggtttgtcccgtacattggcatcgtgacaatcttgatgaatgactatcccaagtttaaatacgcagtgcttttcctcctgggcctattcgtgttggtgcaccgggagtag

SEQ ID NO: 179036 - DNA, 1656 bp, Artificial Sequence
  derived and/or modified sequence
agaaagagacagacagacagaaagtaagcaagcaagcaagcaagcacctcaacagagacagagacgtaaagaaagagagacagagacagaaagaaagaaagcacctcctcagcttcccatagcgcaggagacttgctcgaccagagaacctacggtcagacgacacatccactgccacacccatacccaagccgggacgcggaaccgcttctacccgcccacaccggagaggttgctcgcgattggccgggcgggcacagaggcccgccttccgaaggtggcagagcagcctccccaactaagcctgggtcgccgcctcggtgaagggccgcggggccgagcgcgggaagtggcgtccagtcggtttttggcaggcgagagccagagcgtgagaaccctcccacggcgaggccaagccctgagactggactagcaaggtcgtgagtctctctgtcagctctccgcagcgaaggggcgcggggggcggggaccgtgcccgaccgtgccagctcccgccccggaagcggaagtgcaagcactgcggggtcctgtccagtgtgagcccgacccgagctccagtagttccgcccgctggtcatcgcgccctttcccctgccggtgtcctgctcgccgtccccgccatgctgtctctagactttttggacgatgtgcggcggatgaacaagcggcagctctattatcaagtcctaaattttggaatgattgtctcatcggcactaatgatctggaaggggttaatggtaataactggaagtgaaagtccgattgtagtggtgctcagtggcagcatggaacctgcatttcatagaggagatcttctctttctaacaaatcgagttgaagatcccatacgagtgggagaaattgttgtttttaggatagaaggaagagagattcctatagttcaccgagtcttgaagattcatgaaaagcaaaatgggcatatcaagtttttgaccaaaggagataataatgcggttgatgaccgaggcctctataaacaaggacaacattggctagagaaaaaagatgttgtggggagagccaggggatttgttccttatattggaattgtgacgatcctcatgaatgactatcctaaatttaagtatgcagttctctttttgctgggtttattcgtgctggttcatcgtgagtaagaagcctgccttgctgttcctgggaagatgccatagttttcgttactggatgtttggagtagatactggtctgtgattggtggaatggagaacacacgtgttggtgcttctgggtagcactggtttgcattagtttatgtttccatgccagagtttgtgtgggcgggcgcatgtgcaccacagagtgcactcgaggggactttcagtcacaggatttcataattgtcattgtcacactttcaaatttttgtacatcagtgaatttttttatattaaaaggttgagccaaagcccccagtgtttgtattttgaagccaagcttcacttctaaagtgcctacagagacttgtaaatgaaaatgcagctctgcacgagtttgaaaccgtcatacctccttctattaggaatggcatatactgaggtggtcgtaagtcttaacttctaaaattttaaataaaagactttgcacattgaa

SEQ ID NO: 179037 - DNA, 1223 bp, Artificial Sequence
  derived and/or modified sequence
cagtgtgagcccgacccgagctccagtagttccgcccgctggtcatcgcgccctttcccctgccggtgtcctgctcgccgtccccgccatgctgtctctagactttttggacgatgtgcggcggatgaacaagcggcaggtacaatgagagaaatgcaaagatagttaagaaagactcggccttcaaggagcctaaatgtgtagaaaaggactaaggcaaaacaataacttttttgagctcttgccatgtgtgaagcactttatacacctgtaagctctattatcaagtcctaaattttggaatgattgtctcatcggcactaatgatctggaaggggttaatggtaataactggaagtgaaagtccgattgtagtggtgctcagtggcagcatggaacctgcatttcatagaggagatcttctctttctaacaaatcgagttgaagatcccatacgagtgggagaaattgttgtttttaggatagaaggaagagagattcctatagttcaccgagtcttgaagattcatgaaaagcaaaatgggcatatcaagtttttgaccaaaggagataataatgcggttgatgaccgaggcctctataaacaaggacaacattggctagagaaaaaagatgttgtggggagagccaggggatttgttccttatattggaattgtgacgatcctcatgaatgactatcctaaatttaagtatgcagttctctttttgctgggtttattcgtgctggttcatcgtgagtaagaagcctgccttgctgttcctgggaagatgccatagttttcgttactggatgtttggagtagatactggtctgtgattggtggaatggagaacacacgtgttggtgcttctgggtagcactggtttgcattagtttatgtttccatgccagagtttgtgtgggcgggcgcatgtgcaccacagagtgcactcgaggggactttcagtcacaggatttcataattgtcattgtcacactttcaaatttttgtacatcagtgaatttttttatattaaaaggttgagccaaagcccccagtgtttgtattttgaagccaagcttcacttctaaagtgcctacagagacttgtaaatgaaaatgcagctctgcacgagtttgaaaccgtcatacctccttctattaggaatggcatatactgaggtggtcgtaagtcttaacttctaaaattttaaataaaa

SEQ ID NO: 179038 - protein, 142 aa, Artificial Sequence
  derived and/or modified sequence
MVLIDMSVDLSTQVVDHYENPRNVGSLDKTSKNVGTGLVGAPACGDVMKLQIQVDEKGKIVDARFKTFGCGSAIASSSLATEWVKGKTVEEALTIKNTDIAKELCLPPVKLHCSMLAEDAIKAALADYKLKQEPKKGEAEKK

SEQ ID NO: 179039 - DNA, 429 bp, Artificial Sequence
  derived and/or modified sequence
atggtcctaatagatatgagtgttgacttgagcacccaggtggttgaccattacgagaaccccaggaatgtgggaagcctcgacaaaacatccaagaatgtgggcaccggcctggtcggagcacctgcctgtggcgacgtgatgaagctccagattcaggtggatgaaaagggaaaaattgtcgatgcccgatttaagacttttggttgcggaagcgctatcgcatcctcatcacttgctaccgagtgggtgaagggcaagaccgtggaggaggctttgacaataaagaacacggatatcgccaaagaactttgcctccctccggtgaagctgcactgctcaatgctggccgaggacgccattaaggctgcgctggctgactacaagctgaaacaggaacctaaaaagggcgaagcagagaagaaatag

SEQ ID NO: 179040 - DNA, 1069 bp, Artificial Sequence
  derived and/or modified sequence
aggcgcaagccggcaagatggcggcggctggggctttccgtctgaggcgggcggcatcggctctgctgctgcggagcccccgcctgcccgcccgggagctgtcggccccggcccgactctatcacaagaaggtatctcaaatctgtgaagtattgtagaggagacacaaaaggaattgggggtcacaaatggttctcattgacatgagtgtagacctttctactcaggttgttgatcattatgaaaatcctagaaacgtggggtcccttgacaagacatctaaaaatgttggaactggactggtgggggctccagcatgtggtgacgtaatgaaattacagattcaagtggatgaaaaggggaagattgtggatgctaggtttaaaacatttggctgtggttccgcaattgcctccagctcattagccactgaatgggtgaaaggaaagacggtggaggaagccttgactatcaaaaacacagatatcgccaaggagctctgccttcctcccgtgaaactgcactgctccatgctggctgaagatgcaatcaaggccgccctggctgattacaaattgaaacaagaacccaaaaaaggagaggcagagaagaaatgagccctccctcggcgaagcctccagcaggccacaccagctgtttcccacctgctgtgcagtcaccttagatgttcagaagccgcttcctctccactgaagagctatgagatacgcacaatacttgctgttcacgttatgactctcatgcaagcaaaatacacagtttcattgttctgaatcctgtggtttctttcagcccacttttatcgccttaacctagttaatgtatattttgaattgtgtgtatgacctcagaactgaaattgataatgaagttgcaagttttgatagcccgtgaagtgcataagtatctaattttacctgaattgatttggggggaaattaccagtagaatgccttggtctgaatatttgatagaaccaattgttgtacataaaacagattgcgcatatatatatatgtataaaaaataataaaataatggaagatga

SEQ ID NO: 179041 - DNA, 429 bp, Artificial Sequence
  derived and/or modified sequence
atggtgctgattgacatgtctgtggacctgagcacccaggtggtggaccactatgagaaccccagaaatgtgggcagcctggacaagaccagcaagaatgtgggcaccggcctggtgggcgccccagcctgtggagatgtgatgaagctgcagatccaggtggatgagaagggcaagatcgtggatgcccgcttcaagaccttcggctgcggcagcgccatcgccagcagcagcctggccacagagtgggtgaagggcaagacagtggaggaggccctgaccatcaagaacacagacatcgccaaggagctgtgcctgccccctgtgaagctgcactgcagcatgctggccgaggatgccatcaaggccgccctggccgactacaagctgaagcaggagcccaagaagggggaggccgagaagaagtag

SEQ ID NO: 179042 - DNA, 429 bp, Artificial Sequence
  derived and/or modified sequence
atggtgctgatcgacatgagcgtggacctgagcacccaggtggtggatcattatgagaatcctcgaaacgtagggtctctggacaagaccagcaagaacgtgggcacgggcctcgtgggcgcacctgcctgcggcgatgtcatgaagcttcagatccaggtggatgagaaaggcaaaattgtcgatgctcggtttaagacttttggctgtggctccgctattgccagctcctcgctggcaactgagtgggtcaagggcaagacggttgaggaggcattgacaatcaagaataccgatattgccaaagagctttgcctgcccccagtgaagttgcattgctctatgcttgccgaagacgccatcaaggccgctcttgccgactacaagctgaagcaggagcccaagaagggagaagctgaaaaaaagtag

SEQ ID NO: 179043 - DNA, 429 bp, Artificial Sequence
  derived and/or modified sequence
atggtgctaattgatatgtcagtggacttgtcaacacaggttgttgaccactacgagaatcctagaaatgttggctctttggataaaaccagtaaaaacgtcgggaccgggttggtgggtgctcctgcttgtggtgatgtgatgaagcttcaaattcaggtcgatgaaaagggcaagatagtggatgcaaggttcaagacctttggctgcggatctgccattgcctcctccagcctggcgaccgagtgggtgaagggaaaaaccgtggaagaggctcttacaatcaaaaacactgacatcgccaaagagctttgtctcccacccgtgaaactccattgcagcatgttggcagaggatgccatcaaggccgcacttgccgactataaactgaaacaggagcctaaaaagggtgaagccgagaagaagtag

SEQ ID NO: 179044 - DNA, 429 bp, Artificial Sequence
  derived and/or modified sequence
atggtgctgatcgacatgagcgtggacctgagcacccaggtggtggaccactacgagaaccccagaaacgtgggcagcctggacaagaccagcaagaacgtgggcaccggcctggtgggcgcccccgcctgcggcgacgtgatgaagctgcagatccaggtggacgagaagggcaagatcgtggacgccagattcaagaccttcggctgcggcagcgccatcgccagcagcagcctggccaccgagtgggtgaagggcaagaccgtggaggaggccctgaccatcaagaacaccgacatcgccaaggagctgtgcctgccccccgtgaagctgcactgcagcatgctggccgaggacgccatcaaggccgccctggccgactacaagctgaagcaggagcccaagaagggcgaggccgagaagaagtag

SEQ ID NO: 179045 - protein, 68 aa, Artificial Sequence
  derived and/or modified sequence
MDQVMQFVEPSRQFVKDSIRLVKRCTKPDRKEFQKIAMATAIGFAIMGFIGFFVKLIHIPINNIIVGG

SEQ ID NO: 179046 - DNA, 207 bp, Artificial Sequence
  derived and/or modified sequence
atggaccaggtgatgcagttcgtggagcccagcagacagttcgtgaaggacagcatcagactggtgaagagatgcaccaagcccgacagaaaggagttccagaagatcgccatggccaccgccatcggcttcgccatcatgggcttcatcggcttcttcgtgaagctgatccacatccccatcaacaacatcatcgtgggcggctag

SEQ ID NO: 179047 - DNA, 207 bp, Artificial Sequence
  derived and/or modified sequence
atggatcaggtgatgcaatttgttgaacccagtcgccagtttgtaaaggattccatcaggcttgtgaaaagatgtaccaagccggatcggaaggagtttcaaaaaatcgccatggccacagccatcggctttgcaatcatgggattcatcggcttcttcgtcaaactgattcatataccgataaacaatatcatagtgggcgggtag

SEQ ID NO: 179048 - DNA, 207 bp, Artificial Sequence
  derived and/or modified sequence
atggaccaggtgatgcaatttgtggagccaagtcggcagtttgtcaaggactccatcagattggtaaaacgctgtacgaaaccagacaggaaggagtttcagaagattgccatggccaccgccattggctttgctattatggggtttataggattcttcgtgaagctgatccatataccaattaacaatattatcgtgggcgggtag

SEQ ID NO: 179049 - DNA, 207 bp, Artificial Sequence
  derived and/or modified sequence
atggaccaggtcatgcaatttgtggaaccgagtcggcagtttgtaaaggactccatccgcttggtaaaacggtgtactaaaccagatagaaaggagttccaaaaaattgctatggctactgctatcgggtttgccattatggggtttattgggttcttcgttaaactgatccatattcctatcaataatattatcgtcggcggatag

SEQ ID NO: 179050 - DNA, 207 bp, Artificial Sequence
  derived and/or modified sequence
atggaccaggtgatgcagttcgtggagcccagtcggcagtttgtgaaggactcaatccgcctggtcaaaagatgcaccaagccagatcgtaaggaattccagaaaatcgctatggccaccgcaatcgggttcgccatcatggggttcatcggattcttcgtcaagcttattcacatccctattaacaatattattgtgggaggttag

SEQ ID NO: 179051 - DNA, 207 bp, Artificial Sequence
  derived and/or modified sequence
atggaccaggtgatgcagtttgtggagcccagccggcagtttgtgaaggacagcatccggctggtgaagcgctgcaccaagccagacaggaaggagttccagaagatcgccatggccacagccatcggctttgccatcatgggcttcatcggcttctttgtgaagctgatccacatccccatcaacaacatcatcgtgggcggctag

SEQ ID NO: 179052 - DNA, 207 bp, Artificial Sequence
  derived and/or modified sequence
atggaccaggtgatgcagttcgtggagcccagccggcagttcgtgaaggacagtattaggctggtgaagcgctgcaccaaacctgacagaaaggaatttcagaaaatcgcgatggccactgccatcggctttgccatcatggggttcattggcttcttcgtcaaactcattcatatccccattaacaatattatcgtggggggatag

SEQ ID NO: 179053 - DNA, 207 bp, Artificial Sequence
  derived and/or modified sequence
atggaccaggtgatgcagttcgtggagcccagccggcagttcgtgaaggactctatcagactggtcaagcggtgtacaaagcccgatcgcaaggagtttcagaagatcgctatggccaccgctattggctttgcaatcatgggttttattggcttttttgtgaagctgatacacattccaataaataacattattgtcggagggtag

SEQ ID NO: 179054 - DNA, 207 bp, Artificial Sequence
  derived and/or modified sequence
atggaccaggtgatgcagttcgtggagcccagccggcagttcgtgaaggattctattcggctggtgaagcggtgtaccaaaccagacagaaaagaattccagaagattgcgatggcaaccgcaattggcttcgctatcatggggttcatcggcttcttcgtgaaacttatccatatcccgattaacaacattattgttggaggctag

SEQ ID NO: 179055 - DNA, 207 bp, Artificial Sequence
  derived and/or modified sequence
atggaccaggtgatgcagttcgtggagcccagccggcagttcgtgaaagactctatccgcctggtcaagagatgcacgaagcctgatcggaaggagttccagaagatcgccatggctacggccatcggatttgctataatggggttcatcggattctttgtgaagctcatccacatcccaataaacaatattattgtgggagggtag

SEQ ID NO: 179056 - DNA, 207 bp, Artificial Sequence
  derived and/or modified sequence
atggaccaggtaatgcagtttgtcgagccttccagacaatttgtcaaagacagcatccgcctagttaagcggtgcactaagccagaccggaaggaatttcagaagatcgctatggccacagctatagggtttgcgatcatggggtttataggctttttcgtgaaactgatacatatccctattaacaacataatagtgggcggttag

SEQ ID NO: 179057 - DNA, 207 bp, Artificial Sequence
  derived and/or modified sequence
atggaccaggtgatgcaattcgtggaaccctctaggcaatttgtcaaggactcaatcaggctagtgaaaaggtgcacaaagcccgatcggaaagaatttcagaaaatcgcaatggcaaccgcaatcggattcgcaatcatggggttcatcggcttttttgtgaaactcattcacataccgatcaacaacatcatcgttggcggttag

SEQ ID NO: 179058 - DNA, 207 bp, Artificial Sequence
  derived and/or modified sequence
atggaccaagtgatgcagtttgtggagccatctaggcagtttgttaaggactcgatccgacttgtaaaacggtgtacaaagccggacaggaaagagtttcagaaaattgcgatggctacagccatcgggttcgccattatgggcttcatcggattctttgtgaagctaatccatatcccaatcaacaatataatcgtgggtggctag

SEQ ID NO: 179059 - DNA, 207 bp, Artificial Sequence
  derived and/or modified sequence
atggatcaggttatgcagttcgtggagcccagccgccagttcgtaaaggattcaatcagactggtgaaacgatgtacaaaacccgatagaaaagaattccagaagatagcgatggccactgctatcggctttgcaataatgggcttcattggttttttcgtgaagctgattcatatccccatcaataatattattgtgggaggatag

SEQ ID NO: 179060 - DNA, 462 bp, Artificial Sequence
  derived and/or modified sequence
ggcagaaacccggattccggttccggtgggcctccatcagcaagctccagtgctacgtgtccctggcattttaggtgtcggttgggtaggcagtcatggatcaggtaatgcagtttgttgagccaagtcggcagtttgtaaaggactccattcggctggttaaaagatgcactaaacctgatagaaaagaattccagaagattgccatggcaacagcaataggatttgctataatgggattcattggcttctttgtgaaattgatccatattcctattaataacatcattgttggtggctgaatacattttggaagagagtttttcatcttagagattggtgaacaagtgtgagggtgtgagaaactcacagaatacaaatttgcctgtatgttttgtgggtttttttttttcctttcaagatgttttctatttctaaattaaagtaatttcaaagtaaatg

SEQ ID NO: 179061 - DNA, 459 bp, Artificial Sequence
  derived and/or modified sequence
ggcagaaacccggattccggttccggtgggcctccatcagcaagctccagtgctacgtgtccctggcattttaggtgtcggttgggcagtcatggatcaggtaatgcagtttgttgagccaagtcggcagtttgtaaaggactccattcggctggttaaaagatgcactaaacctgatagaaaagaattccagaagattgccatggcaacagcaataggatttgctataatgggattcattggcttctttgtgaaattgatccatattcctattaataacatcattgttggtggctgaatacattttggaagagagtttttcatcttagagattggtgaacaagtgtgagggtgtgagaaactcacagaatacaaatttgcctgtatgttttgtgggtttttttttttcctttcaagatgttttctatttctaaattaaagtaatttcaaagtaaatga

SEQ ID NO: 179062 - DNA, 732 bp, Artificial Sequence
  derived and/or modified sequence
attgctaaaaggaaacatggccgggcgcggtggctcacgtctgtaatcccagcactttgggaggccgaggcgggtggatcgcgaggtcaggagttcaagaccagcctggccaatatggtgaaaccccgtctctactgacggtttcagccatccggcggggggttcctggaatgcatccttgtgggaagcgtggccgggcgcacgtcgcgctgcgcttgcgcactgaggtttcgcgtaaggaaccaataggacggaggagtgggcgggctgttggcagaaacccggattccggttccggtgggcctccatcagcaagctccagtgctacgtgtccctggcattttaggtgtcggttgggtaggcagtcatggatcaggtaatgcagtttgttgagccaagtcggcagtttgtaaaggactccattcggctggttaaaagatgcactaaacctgatagaaaagaattccagaagattgccatggcaacagcaataggatttgctataatgggattcattggcttctttgtgaaattgatccatattcctattaataacatcattgttggtggctgaatacattttggaagagagtttttcatcttagagattggtgaacaagtgtgagggtgtgagaaactcacagaatacaaatttgcctgtatgttttgtgggtttttttttttcctttcaagatgttttctatttctaaattaaagtaatttcaaagtaaa

SEQ ID NO: 179063 - DNA, 512 bp, Artificial Sequence
  derived and/or modified sequence
ggcattttaggtgtcggttgggtaggtgagtttcttcccaccggtcggtacgggcgaacggggcggccacacctttgcgactcttgggggcagcgggcgtgggcgagccggcgtgtctccccgggcggccgtcgcggggcgggcggcagtcatggatcaggtaatgcagtttgttgagccaagtcggcagtttgtaaaggactccattcggctggttaaaagatgcactaaacctgatagaaaagaattccagaagattgccatggcaacagcaataggatttgctataatgggattcattggcttctttgtgaaattgatccatattcctattaataacatcattgttggtggctgaatacattttggaagagagtttttcatcttagagattggtgaacaagtgtgagggtgtgagaaactcacagaatacaaatttgcctgtatgttttgtgggtttttttttttcctttcaagatgttttctatttctaaattaaagtaatttcaaag

SEQ ID NO: 179064 - protein, 588 aa, Artificial Sequence
  derived and/or modified sequence
MGGLEKKKYERGSATNYITRNKARKKLQLSLADFRRLCILKGIYPHEPKHKKKVNKGSTAARTFYLIKDIRFLLHEPIVNKFREYKVFVRKLRKAYGKSEWNTVERLKDNKPNYKLDHIIKERYPTFIDALRDLDDALSMCFLFSTFPRTGKCHVQTIQLCRRLTVEFMHYIIAARALRKVFLSIKGIYYQAEVLGQPIVWITPYAFSHDHPTDVDYRVMATFTEFYTTLLGFVNFRLYQLLNLHYPPKLEGQAQAEAKAGEGTYALDSESCMEKLAALSASLARVVVPATEEEAEVDEFPTDGEMSAQEEDRRKELEAQEKHKKLFEGLKFFLNREVPREALAFIIRSFGGEVSWDKSLCIGATYDVTDSRITHQIVDRPGQQTSVIGRCYVQPQWVFDSVNARLLLPVAEYFSGVQLPPHLSPFVTEKEGDYVPPEKLKLLALQRGEDPGNLNESEEEEEEDDNNEGDGDEEGENEEEEEDAEAGSEKEEEARLAALEEQRMEGKKPRVMAGTLKLEDKQRLAQEEESEAKRLAIMMMKKREKYLYQKIMFGKRRKIREANKLAEKRKAHDEAVRSEKKAKKARPE

SEQ ID NO: 179065 - DNA, 1767 bp, Artificial Sequence
  derived and/or modified sequence
atgggcggcctggagaagaagaagtacgagagaggcagcgccaccaactacatcaccagaaacaaggccagaaagaagctgcagctgagcctggccgacttcagaagactgtgcatcctgaagggcatctacccccacgagcccaagcacaagaagaaggtgaacaagggcagcaccgccgccagaaccttctacctgatcaaggacatcagattcctgctgcacgagcccatcgtgaacaagttcagagagtacaaggtgttcgtgagaaagctgagaaaggcctacggcaagagcgagtggaacaccgtggagagactgaaggacaacaagcccaactacaagctggaccacatcatcaaggagagataccccaccttcatcgacgccctgagagacctggacgacgccctgagcatgtgcttcctgttcagcaccttccccagaaccggcaagtgccacgtgcagaccatccagctgtgcagaagactgaccgtggagttcatgcactacatcatcgccgccagagccctgagaaaggtgttcctgagcatcaagggcatctactaccaggccgaggtgctgggccagcccatcgtgtggatcaccccctacgccttcagccacgaccaccccaccgacgtggactacagagtgatggccaccttcaccgagttctacaccaccctgctgggcttcgtgaacttcagactgtaccagctgctgaacctgcactacccccccaagctggagggccaggcccaggccgaggccaaggccggcgagggcacctacgccctggacagcgagagctgcatggagaagctggccgccctgagcgccagcctggccagagtggtggtgcccgccaccgaggaggaggccgaggtggacgagttccccaccgacggcgagatgagcgcccaggaggaggacagaagaaaggagctggaggcccaggagaagcacaagaagctgttcgagggcctgaagttcttcctgaacagagaggtgcccagagaggccctggccttcatcatcagaagcttcggcggcgaggtgagctgggacaagagcctgtgcatcggcgccacctacgacgtgaccgacagcagaatcacccaccagatcgtggacagacccggccagcagaccagcgtgatcggcagatgctacgtgcagccccagtgggtgttcgacagcgtgaacgccagactgctgctgcccgtggccgagtacttcagcggcgtgcagctgcccccccacctgagccccttcgtgaccgagaaggagggcgactacgtgccccccgagaagctgaagctgctggccctgcagagaggcgaggaccccggcaacctgaacgagagcgaggaggaggaggaggaggacgacaacaacgagggcgacggcgacgaggagggcgagaacgaggaggaggaggaggacgccgaggccggcagcgagaaggaggaggaggccagactggccgccctggaggagcagagaatggagggcaagaagcccagagtgatggccggcaccctgaagctggaggacaagcagagactggcccaggaggaggagagcgaggccaagagactggccatcatgatgatgaagaagagagagaagtacctgtaccagaagatcatgttcggcaagagaagaaagatcagagaggccaacaagctggccgagaagagaaaggcccacgacgaggccgtgagaagcgagaagaaggccaagaaggccagacccgagtag

SEQ ID NO: 179066 - DNA, 1767 bp, Artificial Sequence
  derived and/or modified sequence
atgggaggtctggagaaaaagaaatacgaaagaggcagcgccacaaattatatcacccgcaataaagcgaggaagaagcttcagctcagcctggcggatttcaggcgcctctgcatcctgaagggaatctacccgcatgagcctaaacacaaaaagaaggtgaacaaaggatccacggccgcccggaccttttatttgatcaaggatatcagatttctcctccacgagccaatcgtgaataagtttcgcgaatataaagtgttcgtgcggaagctgagaaaagcttatggaaaaagcgagtggaatacagtagaacgtctgaaggataacaaacccaattataaactcgaccacattataaaggagaggtatcctaccttcatagacgcgcttagagatcttgacgacgcgctaagcatgtgttttctgttctccacattcccacgcaccggaaaatgccacgtccagaccatccagctgtgccgtcgactgacagtcgagtttatgcattacatcatcgccgcacgcgcgttgcgcaaagtgttcctctctatcaaaggtatatactaccaggcagaagtgttggggcagccaatcgtgtggattaccccctacgcattctcccatgaccacccgacggacgttgactatagagtgatggccaccttcacggagttttatacaactctgctaggattcgtgaatttcaggctgtaccaactgttgaatctgcactatccacctaagctggagggtcaagcccaggcggaggccaaagccggcgaaggaacgtatgcactcgattctgaatcctgtatggagaaactagctgcactttccgcttccctggctcgggttgtggtgcccgcaaccgaagaggaggctgaggtcgacgaatttcctacggatggggaaatgtctgcccaggaagaggataggcgcaaggagctggaggctcaggagaagcacaaaaagcttttcgaaggactgaaatttttcctgaaccgagaggtccctcgcgaggctctagcctttattatccgtagcttcggaggggaagtgtcttgggataaatcgctgtgcattggagccacatacgacgttaccgactcacggatcacacaccagatagtagatcgacccggacagcaaacctcagtaatagggcggtgctacgttcagccacagtgggtcttcgacagcgttaatgccaggcttctgctgcctgtggctgagtatttcagcggtgtgcagctccccccccatctaagtccctttgtaactgagaaggaaggagactatgttccccccgagaaattaaagctgcttgcactgcaaagaggagaggatccagggaacctcaatgagtctgaagaagaggaagaggaagacgataacaatgagggtgacggagatgaggaaggcgagaatgaagaggaggaggaggacgccgaggccggtagcgagaaggaggaagaggcgagactcgccgccttggaagaacaacgcatggaaggtaaaaaacctcgggtgatggccggcaccttaaaactcgaggataaacaacgccttgctcaagaagaagagtccgaagcaaaaagactggcgattatgatgatgaaaaaaagagaaaagtacctctaccagaagatcatgttcggtaagagacgaaagattagagaagccaacaagctggcagaaaaaagaaaagcccatgacgaagcagttcgctccgagaagaaagctaagaaggcccggccagagtag

SEQ ID NO: 179067 - DNA, 1767 bp, Artificial Sequence
  derived and/or modified sequence
atgggcggcctggagaagaagaagtatgagcggggcagcgccaccaactacatcaccaggaacaaggccaggaagaagctgcagctgagcctggccgacttccggcggctgtgcatcctgaagggcatctacccccatgagcccaagcacaagaagaaggtgaacaagggcagcacagctgcccggaccttctacctgatcaaggacatccgcttcctgctgcacgagcccatcgtgaacaagttccgggagtacaaggtgtttgtgaggaagctgaggaaggcctacggcaagtctgagtggaacacagtggagcggctgaaggacaacaagcccaactacaagctggaccacatcatcaaggagcgctaccccaccttcattgatgccctgcgggacctggatgatgccctgtccatgtgcttcctgttcagcaccttccccaggacaggcaagtgccacgtgcagaccatccagctgtgccggcggctgactgtggagttcatgcactacatcatcgccgcccgggccctgaggaaggtgttcctgagcatcaagggcatctactaccaggccgaggtgctgggccagcccatcgtgtggatcaccccctatgccttcagccatgaccaccccacagatgtggactacagagtgatggccaccttcacagagttctacaccaccctgctgggctttgtgaacttccggctgtaccagctgctgaacctgcactacccacccaagctggagggccaggcccaggccgaggccaaggccggggagggcacctacgccctggacagcgagagctgcatggagaagctggccgccctgagcgccagcctggcccgggtggtggtgcctgccacagaggaggaggccgaggtggatgagttccccacagatggagagatgtctgcccaggaggaggacaggaggaaggagctggaggcccaggagaagcacaagaagctgtttgagggcctgaagttcttcctgaaccgggaggtgccccgggaggccctggccttcatcatccgcagctttggaggagaggtgtcctgggacaagagcctgtgcatcggggccacctatgatgtgacagacagccgcatcacccaccagatcgtggacaggcctggccagcagaccagcgtcatcggccgctgctacgtgcagccccagtgggtgtttgattctgtgaatgcccggctgctgctgcctgtggccgagtacttctctggagtgcagctgcccccccacctgagcccctttgtgacagagaaggagggggactatgtgcccccagagaagctgaagctgctggccctgcagagaggagaagatcctggcaacctgaatgaaagtgaggaggaggaggaggaggatgacaacaatgaaggagatggagatgaggagggggagaatgaggaggaggaggaggatgctgaggccggcagcgagaaggaggaggaggcccggctggccgccctggaggagcagaggatggagggcaagaagccccgggtgatggccggcaccctgaagctggaggacaagcagaggctggcccaggaggaggagagcgaggccaagaggctggccatcatgatgatgaagaagcgggagaagtacctgtaccagaagatcatgtttgggaagaggaggaagatccgggaggccaacaagctggccgagaagaggaaggcccatgatgaagctgtgcgctctgagaagaaggccaagaaggcccggcctgagtag

SEQ ID NO: 179068 - DNA, 1767 bp, Artificial Sequence
  derived and/or modified sequence
atgggcggcctggagaagaagaagtacgagcggggcagcgccaccaactatattacaagaaataaagctaggaagaaactccagctgtctcttgccgattttaggcgcctgtgtattcttaaaggtatctatcctcatgagccaaaacacaaaaaaaaggttaacaaaggctccactgccgctcgcaccttctatttaattaaggacataaggtttttgttgcatgagcctatcgtaaacaaattccgggagtataaggtctttgtaagaaagctccggaaagcctacgggaaatctgaatggaacacagtggagaggctgaaggacaacaagccaaattacaaactcgatcatattattaaagagcggtatcctactttcatcgacgctctcagagatctggacgacgccctgtctatgtgctttcttttctcaacttttcctagaacagggaagtgtcacgtgcagacaatccaattatgccgccggttgactgtggaatttatgcactatatcatcgctgctcgggctctgagaaaagtttttctttccattaagggtatatactatcaggcagaagtccttggccagccaatcgtgtggattaccccctacgcgttctctcatgatcacccgaccgatgtggattacagagtcatggccactttcaccgaattttataccaccttgctcggatttgttaactttaggctttatcaattgcttaacctacactatcccccaaagctcgaggggcaggcccaggctgaggcgaaggctggcgagggcacttacgcacttgacagcgaatcctgcatggaaaagctcgcagccctctctgcctccctcgctcgcgtggtggtgcctgccactgaggaggaggctgaggttgatgagttcccaaccgacggtgagatgagcgcacaagaagaagatcgtcgcaaagagctagaagctcaggagaaacataagaagctgtttgaagggctgaagttcttcttgaatagggaggtccctcgtgaggcactggcctttatcatccgtagttttgggggagaagtgagctgggacaagtcgctctgtatcggagccacctatgatgtgacagattctagaatcacacaccagatagtggatcggccgggtcagcaaacatctgtgatcggcaggtgctacgttcagcctcagtgggtgtttgacagcgtaaatgcacgcctgctgttacccgtggcggaatacttttcgggcgttcagcttcctcctcatctgtccccgttcgtcacagaaaaagaaggagattatgttcctccggaaaagcttaaactcctcgcactgcaaagaggagaagaccctggcaacttgaatgagtcagaagaggaggaggaggaggatgataacaatgaaggagatggcgacgaggagggagagaacgaggaagaggaggaggatgcagaggctggctctgaaaaagaggaggaggcccgcttggccgccctcgaagaacagcggatggaagggaaaaagcctcgagtgatggccggcaccctgaagctcgaagacaaacagcgtcttgcacaggaggaagagtctgaggctaagaggctggccatcatgatgatgaaaaaacgtgaaaagtacttgtaccagaagatcatgtttgggaagaggcgaaaaatccgcgaggccaacaaactcgcagaaaagagaaaggcccacgacgaagccgtcaggtctgagaagaaggccaaaaaggcacggccagagtag

SEQ ID NO: 179069 - DNA, 1767 bp, Artificial Sequence
  derived and/or modified sequence
atgggaggactcgagaagaaaaagtacgagcgaggcagtgccaccaattacatcactaggaacaaagccagaaagaagttgcaactgtctctcgcagatttccggagactgtgtatcctaaagggaatctacccacacgagccaaagcacaaaaaaaaagtaaataagggctccacggcggctagaacgttctatctgattaaagacatcagatttctgctgcacgagcctattgtgaacaagttcagggaatataaggtatttgtgaggaagctgcgcaaggcttatggcaagtccgagtggaacactgtggaacggctgaaggacaacaaacccaactacaagctagaccacattatcaaggaacgctaccctactttcattgacgcattacgtgacctcgacgatgcgctctcaatgtgcttcctcttttccacttttcctcgaactgggaagtgtcacgtgcagaccatccagctctgtaggaggcttacagtggaatttatgcattacatcatagccgcacgagccttacgtaaagtgttcctatcaatcaagggcatatattatcaggcggaggtgctggggcagcccatagtgtggatcacaccttacgccttctctcacgaccatccaaccgacgttgactatcgggtcatggcgacctttactgagttttacactaccctgttggggttcgtgaatttccggctgtaccagttgcttaacctgcactatcctcccaagttggaagggcaggcacaagccgaagccaaggccggagagggaacctacgccctagattccgagagctgcatggagaagctggctgcactgagcgcgtctctggcaagagtcgtcgtacctgctactgaggaggaagccgaagttgacgaattccctaccgacggcgagatgtcagcccaggaagaggatcgaaggaaggagctggaggctcaagaaaagcataaaaaactctttgagggcctaaagttctttctcaatcgcgaagtccctagagaagcattggcgtttattattcggtccttcggcggagaagtgagctgggataaaagcctgtgtatcggggctacttatgacgtgacggattcccgcattacccaccagatcgtggaccgccctggccagcaaacaagcgtgatcggcaggtgttacgttcagccccaatgggtctttgactcagtgaatgcaagacttctcctgcctgtcgccgagtacttttccggcgtgcagcttccccctcacctcagccctttcgttactgaaaaagagggagattacgtgcctcctgagaagctgaagctcctggccctgcagcggggagaagatccaggaaatctcaatgaatccgaagaagaagaggaagaagatgataataatgagggagatggcgacgaagaaggagagaatgaagaggaagaagaggatgcggaagcagggagcgaaaaagaagaagaagccagactagcggcactcgaggagcagcgcatggagggcaaaaagcccagggtcatggcgggaactctgaagctcgaagacaaacagcggttggcgcaggaggaggagtcagaggcaaaacgattggccattatgatgatgaaaaagcgggagaagtacctttaccagaaaatcatgtttggtaaacgaaggaagatccgagaggccaataaattagcagagaaacggaaggctcacgacgaggcggtgaggtccgagaaaaaagccaaaaaggcacggccagaatag

SEQ ID NO: 179070 - DNA, 2292 bp, Artificial Sequence
  derived and/or modified sequence
agacagcgtggggtggggagggtcctcggggtccttggcagggcacgtgcgggaggaagtggagctccctgtacgcgcggccctagtcggctcctcaacgtggagcgatgggaggccttgagaagaagaagtatgaacgaggctcggccaccaactacatcacccggaacaaagcccggaagaagctccagctgagcttggctgactttaggcggctgtgcattctgaagggcatttatccccatgaacccaaacacaagaagaaggttaacaagggttctacagcagcccgaacgttttaccttatcaaagacatcaggtttctcctccacgaacccattgtcaacaagttccgtgaatacaaggtgttcgtccggaagctccggaaggcttatgggaagagcgagtggaacactgtagagcgtttaaaggacaataagcccaactacaaactcgaccacatcatcaaggaacggtatcccacgttcatcgatgccctgcgggacctggacgatgccctctccatgtgcttcctgttttccaccttcccgcggactggcaagtgccacgtgcagaccattcagctgtgccgccggctcactgtggagttcatgcactacattatcgctgcccgtgccctgcgcaaggtcttcctgtccatcaaaggcatttactaccaggccgaggtactggggcagcccatcgtgtggatcactccctatgccttctcccatgaccacccgacagacgtggactacagggtcatggccaccttcaccgagttctacaccacgctgctgggctttgtcaacttccgcctttaccagttgctcaacctccactatcccccgaagctcgagggtcaggcccaagcagaggcaaaggccggtgagggcacctacgcgttggactccgagagttgtatggagaaactggcagccctcagtgccagcctggcccgcgtggtggtgcctgccacagaggaggaggccgaggtggatgagtttcccaccgatggggagatgtcagcgcaggaggaagaccgcaggaaggagctggaggcgcaggagaagcacaagaagctttttgagggcctgaagttcttcctgaaccgagaggtgccccgtgaggccctggccttcatcatcaggagttttggtggggaagtgtcctgggacaaatctttgtgcattggggccacctatgacgtcacagactcccgcatcacccatcagattgtcgaccggcctgggcagcagacctcagtcattggcaggtgctacgtgcagccccagtgggtgtttgactcagtgaacgccaggctccttctccccgtggcagagtacttctctggggtgcagctgcccccacacctttcaccctttgtgaccgagaaggaaggagattacgttccacctgagaagctgaagctgctggctctgcagcggggagaggacccaggaaacctgaatgagtcagaagaggaggaggaagaggacgacaacaacgaaggtgatggtgatgaagagggagaaaatgaggaggaggaggaagatgcagaggctggttcagaaaaggaggaagaggcccggctggcagccctggaagagcagaggatggaggggaagaagcccagggtgatggcaggcaccttgaagctggaggataagcagcggctggcccaggaggaggagagtgaggccaagcgcctggccattatgatgatgaagaagcgggagaagtacctgtaccagaagatcatgtttggcaagaggcgaaaaatccgagaggccaacaagctggcggagaagcggaaagcccacgatgaggcggtgaggtctgagaagaaggccaagaaggcaaggccggagtgagtgcctgcggcccctcacagggctgaggccagcccctagcagctggatgtggcagaggcaggccagaggacctaagtgtgatggaccagagtcacttctcctcctcctttctccagccagccctgacccctcatgctctctggctgggccagtgggcagccctcgcttcccttggatggagctgccctgctggtgcctggtcagagaagaggcctctgtgcccagcctgattctctgctcccaggagccagtgacatgaggtgcagaggcccacccagccccctacctactgcccccattcatcctggctttccacagccccctcccacacagttggacccgtgattctcagggtgctgtgatggggtgagggtagggggagcatttgttattaaatgactggacttttgtgccaatt

SEQ ID NO: 179071 - DNA, 2760 bp, Artificial Sequence
  derived and/or modified sequence
agggaacaaagggaggaggagggctagtgggaccatgtgagacatcttgaggccattcacgttcctgcttaaagagcccgggaccagcgcagagggcctgatgcctgatctgtcaagtctgtccgaccgtgcctgtctgctgtccccccagctgttccagtggtggattggcaggaccgggtgcctacccggtactccttaccaaaggagcccctggtagtgcccacctagcccaggacaaggagtggaacgggagctgcagctgcagtggtcacgaaggcagcctggaggaggtggccatggaggatagccttcgttatcgtcagcctctgccgcataaccgcgaatgaaccaaagagaacccgaagccggtgggaactcagcgcagtctcaccctgcccctcgggaaccgcttctcagcagcggcagccgaagtctgacgacgcttagcaaccgttaccttgacaacgcaatcctatcgcgcaccatggagtgcggcgcccctctgcatcccagaaggcaccgcgctgtccctaagccttccgcccctctccgtcccaacatgcaacgaggctcacagtcaatgaatcgtcatcaggtatgaacgaggctcggccaccaactacatcacccggaacaaagcccggaagaagctccagctgagcttggctgactttaggcggctgtgcattctgaagggcatttatccccatgaacccaaacacaagaagaaggttaacaagggttctacagcagcccgaacgttttaccttatcaaagacatcaggtttctcctccacgaacccattgtcaacaagttccgtgaatacaaggtgttcgtccggaagctccggaaggcttatgggaagagcgagtggaacactgtagagcgtttaaaggacaataagcccaactacaaactcgaccacatcatcaaggaacggtatcccacgttcatcgatgccctgcgggacctggacgatgccctctccatgtgcttcctgttttccaccttcccgcggactggcaagtgccacgtgcagaccattcagctgtgccgccggctcactgtggagttcatgcactacattatcgctgcccgtgccctgcgcaaggtcttcctgtccatcaaaggcatttactaccaggccgaggtactggggcagcccatcgtgtggatcactccctatgccttctcccatgaccacccgacagacgtggactacagggtcatggccaccttcaccgagttctacaccacgctgctgggctttgtcaacttccgcctttaccagttgctcaacctccactatcccccgaagctcgagggtcaggcccaagcagaggcaaaggccggtgagggcacctacgcgttggactccgagagttgtatggagaaactggcagccctcagtgccagcctggcccgcgtggtggtgcctgccacagaggaggaggccgaggtggatgagtttcccaccgatggggagatgtcagcgcaggaggaagaccgcaggaaggagctggaggcgcaggagaagcacaagaagctttttgagggcctgaagttcttcctgaaccgagaggtgccccgtgaggccctggccttcatcatcaggagttttggtggggaagtgtcctgggacaaatctttgtgcattggggccacctatgacgtcacagactcccgcatcacccatcagattgtcgaccggcctgggcagcagacctcagtcattggcaggtgctacgtgcagccccagtgggtgtttgactcagtgaacgccaggctccttctccccgtggcagagtacttctctggggtgcagctgcccccacacctttcaccctttgtgaccgagaaggaaggagattacgttccacctgagaagctgaagctgctggctctgcagcggggagaggacccaggaaacctgaatgagtcagaagaggaggaggaagaggacgacaacaacgaaggtgatggtgatgaagagggagaaaatgaggaggaggaggaagatgcagaggctggttcagaaaaggaggaagaggcccggctggcagccctggaagagcagaggatggaggggaagaagcccagggtgatggcaggcaccttgaagctggaggataagcagcggctggcccaggaggaggagagtgaggccaagcgcctggccattatgatgatgaagaagcgggagaagtacctgtaccagaagatcatgtttggcaagaggcgaaaaatccgagaggccaacaagctggcggagaagcggaaagcccacgatgaggcggtgaggtctgagaagaaggccaagaaggcaaggccggagtgagtgcctgcggcccctcacagggctgaggccagcccctagcagctggatgtggcagaggcaggccagaggacctaagtgtgatggaccagagtcacttctcctcctcctttctccagccagccctgacccctcatgctctctggctgggccagtgggcagccctcgcttcccttggatggagctgccctgctggtgcctggtcagagaagaggcctctgtgcccagcctgattctctgctcccaggagccagtgacatgaggtgcagaggcccacccagccccctacctactgcccccattcatcctggctttccacagccccctcccacacagttggacccgtgattctcagggtgctgtgatggggtgagggtagggggagcatttgttattaaatgactggacttttgtgccaatt

SEQ ID NO: 179072 - DNA, 2708 bp, Artificial Sequence
  derived and/or modified sequence
gcctgatgcctgatctgtcaagtctgtccgaccgtgcctgtctgctgtccccccagctgttccagtggtggattggcaggaccgggtgcctacccggtactccttaccaaaggagcccctggtagtgcccacctagcccaggacaaggagtggaacgggagctgcagctgcagtggtcacgaaggcagcctggaggaggtggccatggaggatagccttcgttatcgtcagcctctggtgagaagcagcagcatccttccagagagtcacttctgatccccaagccgcataaccgcgaatgaaccaaagagaacccgaagccggtgggaactcagcgcagtctcaccctgcccctcgggaaccgcttctcagcagcggcagccgaagtctgacgacgcttagcaaccgttaccttgacaacgcaatcctatcgcgcaccatggagtgcggcgcccctctgcatcccagaaggcaccgcgctgtccctaagccttccgcccctctccgtcccaacatgcaacgaggctcacagtcaatgaatcgtcatcaggtatgaacgaggctcggccaccaactacatcacccggaacaaagcccggaagaagctccagctgagcttggctgactttaggcggctgtgcattctgaagggcatttatccccatgaacccaaacacaagaagaaggttaacaagggttctacagcagcccgaacgttttaccttatcaaagacatcaggtttctcctccacgaacccattgtcaacaagttccgtgaatacaaggtgttcgtccggaagctccggaaggcttatgggaagagcgagtggaacactgtagagcgtttaaaggacaataagcccaactacaaactcgaccacatcatcaaggaacggtatcccacgttcatcgatgccctgcgggacctggacgatgccctctccatgtgcttcctgttttccaccttcccgcggactggcaagtgccacgtgcagaccattcagctgtgccgccggctcactgtggagttcatgcactacattatcgctgcccgtgccctgcgcaaggtcttcctgtccatcaaaggcatttactaccaggccgaggtactggggcagcccatcgtgtggatcactccctatgccttctcccatgaccacccgacagacgtggactacagggtcatggccaccttcaccgagttctacaccacgctgctgggctttgtcaacttccgcctttaccagttgctcaacctccactatcccccgaagctcgagggtcaggcccaagcagaggcaaaggccggtgagggcacctacgcgttggactccgagagttgtatggagaaactggcagccctcagtgccagcctggcccgcgtggtggtgcctgccacagaggaggaggccgaggtggatgagtttcccaccgatggggagatgtcagcgcaggaggaagaccgcaggaaggagctggaggcgcaggagaagcacaagaagctttttgagggcctgaagttcttcctgaaccgagaggtgccccgtgaggccctggccttcatcatcaggagttttggtggggaagtgtcctgggacaaatctttgtgcattggggccacctatgacgtcacagactcccgcatcacccatcagattgtcgaccggcctgggcagcagacctcagtcattggcaggtgctacgtgcagccccagtgggtgtttgactcagtgaacgccaggctccttctccccgtggcagagtacttctctggggtgcagctgcccccacacctttcaccctttgtgaccgagaaggaaggagattacgttccacctgagaagctgaagctgctggctctgcagcggggagaggacccaggaaacctgaatgagtcagaagaggaggaggaagaggacgacaacaacgaaggtgatggtgatgaagagggagaaaatgaggaggaggaggaagatgcagaggctggttcagaaaaggaggaagaggcccggctggcagccctggaagagcagaggatggaggggaagaagcccagggtgatggcaggcaccttgaagctggaggataagcagcggctggcccaggaggaggagagtgaggccaagcgcctggccattatgatgatgaagaagcgggagaagtacctgtaccagaagatcatgtttggcaagaggcgaaaaatccgagaggccaacaagctggcggagaagcggaaagcccacgatgaggcggtgaggtctgagaagaaggccaagaaggcaaggccggagtgagtgcctgcggcccctcacagggctgaggccagcccctagcagctggatgtggcagaggcaggccagaggacctaagtgtgatggaccagagtcacttctcctcctcctttctccagccagccctgacccctcatgctctctggctgggccagtgggcagccctcgcttcccttggatggagctgccctgctggtgcctggtcagagaagaggcctctgtgcccagcctgattctctgctcccaggagccagtgacatgaggtgcagaggcccacccagccccctacctactgcccccattcatcctggctttccacagccccctcccacacagttggacccgtgattctcagggtgctgtgatggggtgagggtagggggagcatttgttattaaatgactggacttttgtgcc

SEQ ID NO: 179073 - protein, 505 aa, Artificial Sequence
  derived and/or modified sequence
MSRSYNDELQFLEKINKNCWRIKKGFVPNMQVEGVFYVNDALEKLMFEELRNACRGGGVGGFLPAMKQIGNVAALPGIVHRSIGLPDVHSGYGFAIGNMAAFDMNDPEAVVSPGGVGFDINCGVRLLRTNLDESDVQPVKEQLAQAMFDHIPVGVGSKGVIPMNAKDLEEALEMGVDWSLREGYAWAEDKEHCEEYGRMLQADPNKVSARAKKRGLPQLGTLGAGNHYAEIQVVDEIFNEYAAKKMGIDHKGQVCVMIHSGSRGLGHQVATDALVAMEKAMKRDKIIVNDRQLACARIASPEGQDYLKGMAAAGNYAWVNRSSMTFLTRQAFAKVFNTTPDDLDLHVIYDVSHNIAKVEQHVVDGKERTLLVHRKGSTRAFPPHHPLIAVDYQLTGQPVLIGGTMGTCSYVLTGTEQGMTETFGTTCHGAGRALSRAKSRRNLDFQDVLDKLADMGIAIRVASPKLVMEEAPESYKNVTDVVNTCHDAGISKKAIKLRPIAVIKG

SEQ ID NO: 179074 - protein, 175 aa, Artificial Sequence
  derived and/or modified sequence
MSRSYNDELQFLEKINKNCWRIKKGFVPNMQVEGVFYVNDALEKLMFEELRNACRGGGVGGFLPAMKQIGNVAALPGIVHRSIGLPDVHSGYGFAIGNMAAFDMNDPEAVVSPGGVGFDINCGVRLLRTNLDESDVQPVKEQLAQAMFDHIPVGVGSKGDMMRAVHCPEQNLDVI

SEQ ID NO: 179075 - DNA, 1518 bp, Artificial Sequence
  derived and/or modified sequence
atgagcagaagctacaacgacgagctgcagttcctggagaagatcaacaagaactgctggagaatcaagaagggcttcgtgcccaacatgcaggtggagggcgtgttctacgtgaacgacgccctggagaagctgatgttcgaggagctgagaaacgcctgcagaggcggcggcgtgggcggcttcctgcccgccatgaagcagatcggcaacgtggccgccctgcccggcatcgtgcacagaagcatcggcctgcccgacgtgcacagcggctacggcttcgccatcggcaacatggccgccttcgacatgaacgaccccgaggccgtggtgagccccggcggcgtgggcttcgacatcaactgcggcgtgagactgctgagaaccaacctggacgagagcgacgtgcagcccgtgaaggagcagctggcccaggccatgttcgaccacatccccgtgggcgtgggcagcaagggcgtgatccccatgaacgccaaggacctggaggaggccctggagatgggcgtggactggagcctgagagagggctacgcctgggccgaggacaaggagcactgcgaggagtacggcagaatgctgcaggccgaccccaacaaggtgagcgccagagccaagaagagaggcctgccccagctgggcaccctgggcgccggcaaccactacgccgagatccaggtggtggacgagatcttcaacgagtacgccgccaagaagatgggcatcgaccacaagggccaggtgtgcgtgatgatccacagcggcagcagaggcctgggccaccaggtggccaccgacgccctggtggccatggagaaggccatgaagagagacaagatcatcgtgaacgacagacagctggcctgcgccagaatcgccagccccgagggccaggactacctgaagggcatggccgccgccggcaactacgcctgggtgaacagaagcagcatgaccttcctgaccagacaggccttcgccaaggtgttcaacaccacccccgacgacctggacctgcacgtgatctacgacgtgagccacaacatcgccaaggtggagcagcacgtggtggacggcaaggagagaaccctgctggtgcacagaaagggcagcaccagagccttccccccccaccaccccctgatcgccgtggactaccagctgaccggccagcccgtgctgatcggcggcaccatgggcacctgcagctacgtgctgaccggcaccgagcagggcatgaccgagaccttcggcaccacctgccacggcgccggcagagccctgagcagagccaagagcagaagaaacctggacttccaggacgtgctggacaagctggccgacatgggcatcgccatcagagtggccagccccaagctggtgatggaggaggcccccgagagctacaagaacgtgaccgacgtggtgaacacctgccacgacgccggcatcagcaagaaggccatcaagctgagacccatcgccgtgatcaagggctag

SEQ ID NO: 179076 - DNA, 1518 bp, Artificial Sequence
  derived and/or modified sequence
atgagccgcagctacaacgatgagttgcagtttctcgagaaaattaacaagaattgttggagaattaagaaggggtttgtgcccaatatgcaggttgagggcgtcttctatgtgaacgatgcgctggaaaagctcatgttcgaagagctgagaaatgcttgtcgaggagggggcgtggggggctttctgcctgccatgaaacagattgggaatgtggctgctctccccggtattgtgcacagatctataggattgcccgacgtgcacagcgggtacgggttcgccattgggaatatggctgcgttcgatatgaatgatccggaggctgtggtgtcgcctgggggagtgggctttgatatcaactgtggagtgcgtctgcttagaaccaacttggacgaaagtgacgttcagccagtgaaggaacagctggctcaggctatgtttgatcatatacctgtgggcgtgggtagtaaaggcgtgatccccatgaacgccaaagacctcgaggaagcactggaaatgggggtcgattggtcgttgagagagggttatgcctgggccgaagataaagaacactgtgaggaatacggacgaatgctccaagctgaccccaataaggtaagcgctagggctaagaaaaggggtctgccacagctgggaacgttaggcgccggaaaccactacgctgagatccaggtagttgacgagatcttcaacgagtatgcggctaagaagatggggattgatcataagggtcaggtgtgcgttatgatccatagtggttcgcgaggcctgggccatcaagtggccactgacgccctggtggcaatggaaaaagctatgaagcgtgataagattatagtgaatgaccggcaactggcatgcgcacgaatcgcatcacccgagggccaagattacctgaaggggatggccgcagctggtaactacgcatgggtcaaccgatcatctatgacgttcctgacccgccaagcctttgcaaaagtgttcaatacaacacctgacgatctcgacctgcacgtcatatacgatgtttcgcataatatcgcaaaggtggagcagcacgttgtggatggaaaggagcgaaccctactggtgcacagaaagggatctactcgggcatttcctccgcatcaccctcttatcgctgtggattaccaacttaccggacaacccgtgctcattgggggcacaatgggcacctgtagctatgtgctgacaggcaccgaacagggaatgactgagacgttcggcactacttgccacggtgccggaagagccctcagccgggccaagagccgacgcaatttagatttccaagacgttctagataagctggctgacatggggatagccatccgggtggcctccccaaagctcgtgatggaggaagctccagaatcctataaaaacgtcaccgatgtagtcaatacatgccacgatgccggaatttctaaaaaggctatcaaactgcgtcctatagctgtcatcaagggatag

SEQ ID NO: 179077 - DNA, 1518 bp, Artificial Sequence
  derived and/or modified sequence
atgagccgcagctacaatgatgagctgcagttcctggagaagatcaacaagaactgctggaggatcaagaagggctttgtgcccaacatgcaggtggagggcgtcttctacgtgaatgatgccctggagaagctgatgtttgaggagctgagaaatgcctgccggggcggcggcgtgggcggcttcctgcctgccatgaagcagattggaaatgtggccgccctgcccggcatcgtgcacaggagcatcggcctgcctgatgtgcacagcggctacggctttgccatcggcaacatggccgcctttgacatgaatgaccctgaggccgtggtgtccccaggaggagtgggctttgacatcaactgtggggtgcggctgctgcggaccaacctggatgaaagtgatgtgcagcctgtgaaggagcagctggcccaggccatgtttgaccacatccctgtgggcgtgggcagcaagggcgtcatccccatgaatgccaaggacctggaggaggccctggagatgggcgtggactggagcctgcgggagggctacgcctgggccgaggacaaggagcactgtgaggagtatggccgcatgctgcaggccgaccccaacaaggtgtctgcccgggccaagaagaggggcctgccccagctgggcaccctgggcgccggcaaccactatgcagagatccaggtggtggatgagatcttcaatgaatatgctgccaagaagatgggcatcgaccacaagggccaggtgtgtgtgatgatccacagcggcagccggggcctgggccaccaggtggccacagatgccctggtggccatggagaaggccatgaagagggacaagatcatcgtgaatgaccggcagctggcctgtgcccgcatcgccagccctgagggccaggactacctgaagggcatggctgctgctggcaactatgcctgggtgaacagaagctccatgaccttcctgacccggcaggcctttgccaaggtgttcaacaccaccccagatgacctggacctgcacgtgatctatgatgtgagccacaacatcgccaaggtggagcagcacgtggtggatggcaaggagaggaccctgctggtgcacaggaagggcagcacccgggccttccccccccaccaccccctgattgctgtggactaccagctgaccggccagcctgtgctgattggaggcaccatgggcacctgcagctatgtgctgactggaacagagcagggcatgacagagaccttcggcaccacctgccacggggccggccgggccctgagccgggccaagagcagaagaaacctggacttccaggatgtgctggacaagctggccgacatgggcatcgccatccgggtggccagccccaagctggtgatggaggaggcccctgagagctacaagaatgtgacagatgtggtgaacacctgccatgatgctggcatcagcaagaaggccatcaagctgcggcccatcgctgtgatcaagggctag

SEQ ID NO: 179078 - DNA, 1518 bp, Artificial Sequence
  derived and/or modified sequence
atgagccggagctacaacgacgagctgcagttcctggagaagatcaataaaaattgttggaggatcaagaagggatttgtgcccaatatgcaggtggagggcgttttctacgtgaacgacgctctggagaaattaatgttcgaagagctgaggaatgcctgcaggggcggcggcgtgggaggatttctcccagcgatgaagcagataggcaacgtagccgctcttcccggaatcgtgcatcggtcaatcggccttcccgacgttcactcaggctacggatttgccataggcaacatggctgccttcgacatgaatgatcctgaagccgtggtgtctcccggaggtgtgggatttgacattaattgcggggtgagactgctcagaacgaatttggatgagtctgacgtgcagcccgtgaaagagcagcttgcgcaggcgatgttcgaccacatccccgttggtgtgggcagtaagggagttatccctatgaatgctaaggatctcgaggaggccttagagatgggggtggactggagcctccgcgaaggatacgcgtgggccgaggacaaagaacattgcgaggaatacgggcgaatgctgcaggccgatcctaacaaggtctctgctagagcgaagaagcgcggactcccgcagttgggcacgctgggcgctggcaatcattacgcagagattcaggtggtcgacgaaatcttcaatgaatatgcagctaagaagatggggattgatcacaagggacaggtctgcgtcatgattcattccggttccagagggttagggcaccaggtggcgacagacgcactcgtcgcgatggagaaggcaatgaaacgagataaaattatcgtaaacgataggcagttagcttgcgcgcgcattgcttccccggagggacaggactacctgaagggaatggcagccgctggcaattatgcatgggtgaatcgctcttcaatgacttttttgaccaggcaggcctttgcaaaggtttttaataccaccccagacgacttggatctgcacgtgatctacgacgtgagccataatattgctaaagtagaacagcatgttgtggacggtaaagaaaggactctgctggtccatagaaaagggtccacacgagcatttcctccccaccatcccttgattgcggtggactaccaactgaccgggcagcccgtcctgatcggaggtactatgggcacatgttcctatgtgctgaccggcaccgagcaaggtatgacagaaacctttggaacaacttgtcatggagccggtcgcgctttgagtagagctaaatcccgaagaaacctcgacttccaggacgttcttgataagttggccgacatggggatcgctattagagtggccagtcctaagcttgtgatggaggaggcccccgagtcatacaaaaacgtgaccgatgttgtcaatacatgccacgacgcaggaattagcaagaaggctattaaactgcggccaatcgccgtgattaaggggtag

SEQ ID NO: 179079 - DNA, 1518 bp, Artificial Sequence
  derived and/or modified sequence
atgagccgtagttataacgatgagcttcagttcctggaaaaaatcaataagaactgttggagaatcaaaaagggttttgtacccaatatgcaggtagaaggagtgttttacgtcaatgatgcattggagaagttgatgtttgaggagttaagaaatgcatgcagaggcggaggcgtcggagggtttttgcctgctatgaaacaaattgggaacgtggctgcgctgccgggaatagtccacaggagcatcggactgcctgacgttcacagtggctatggattcgcgattgggaatatggctgcttttgacatgaacgatcctgaagctgtggtgtcgccagggggagtgggattcgatattaactgcggagtcaggcttcttcgcaccaatctggacgaaagcgacgttcagcccgtgaaggaacagctcgcccaggcgatgttcgatcacattcccgtgggagtgggctctaaaggggtgatcccaatgaacgctaaggacttagaagaagccctggagatgggagttgactggtcactgcgggaaggttatgcttgggcggaagataaggaacactgtgaggagtatggtaggatgttgcaggcagaccctaataaagtgtcagccagagctaaaaagcgcggacttccccagctgggaaccctcggcgctggaaaccattatgcagaaattcaggtggtagacgagatttttaatgaatacgcggctaagaaaatgggaatcgatcataaaggccaggtgtgtgtgatgatccattccgggtctagaggcctcggtcaccaagtcgccacagatgcccttgtcgccatggaaaaagcaatgaagcgcgataaaatcatcgttaatgacaggcagctggcgtgcgcccgtatagcgtccccagaaggacaggactacttgaagggcatggctgcagctggcaactacgcctgggttaaccgtagtagtatgaccttccttactcgccaggctttcgctaaggttttcaacacaacgccagacgatctcgatctgcatgtaatctatgatgtcagccataacatcgcgaaggtggagcagcatgttgttgacgggaaggagaggaccttgcttgtgcatcgcaaggggtccacgcgtgccttcccaccacaccatcctcttattgctgtcgattaccagctgacaggccagcctgtgctgatcggcggtacgatgggcacttgtagttacgtcctgacagggaccgagcagggcatgacagagacctttggaacaacttgtcatggagccggaagagccttatcccgcgcaaaatcccggaggaatctggatttccaagatgtcttggacaagctggccgatatggggatcgccatacgggtggcttcacccaaactcgtgatggaagaagccccagagagctataaaaatgttacggatgttgtaaacacttgccacgacgctggcatcagcaagaaagccatcaagcttcgtcccatcgcagtgattaagggttag

SEQ ID NO: 179080 - DNA, 528 bp, Artificial Sequence
  derived and/or modified sequence
atgagcagatcttacaacgatgagctgcagttcctggagaagatcaataagaactgctggaggattaagaagggattcgttcccaatatgcaagtggagggcgtgttttatgtgaacgatgccttagagaaactgatgttcgaagagctgagaaatgcttgccggggcggcggagtaggcggctttctccccgcaatgaaacaaatagggaacgtagcggctctgccgggaattgtccacaggtctattgggctccctgatgtgcacagtgggtatggatttgccatcggaaatatggccgccttcgacatgaacgaccctgaagcggtcgtaagccccgggggggtcggcttcgatatcaattgtggagtcaggctgttacgcaccaacctggacgagagcgatgttcaaccagtaaaagagcagctggctcaggctatgttcgaccatatcccagtgggggtcggttccaagggtgacatgatgagggccgttcattgtcccgagcagaacctggacgtgatctag

SEQ ID NO: 179081 - DNA, 528 bp, Artificial Sequence
  derived and/or modified sequence
atgagccgcagctacaatgatgagctgcagttcctggagaagatcaacaagaactgctggaggatcaagaagggctttgtgcccaacatgcaggtggagggcgtcttctacgtgaatgatgccctggagaagctgatgtttgaggagctgagaaatgcctgccggggcggcggcgtgggcggcttcctgcctgccatgaagcagattggaaatgtggccgccctgcccggcatcgtgcacaggagcatcggcctgcctgatgtgcacagcggctacggctttgccatcggcaacatggccgcctttgacatgaatgaccctgaggccgtggtgtccccaggaggagtgggctttgacatcaactgtggggtgcggctgctgcggaccaacctggatgaaagtgatgtgcagcctgtgaaggagcagctggcccaggccatgtttgaccacatccctgtgggcgtgggcagcaagggggacatgatgagagctgtgcactgcccagagcagaacctggatgtgatctag

SEQ ID NO: 179082 - DNA, 528 bp, Artificial Sequence
  derived and/or modified sequence
atgagccggagctacaacgacgagctgcagttcctggagaagatcaacaagaattgttggcgtatcaaaaaggggtttgttcctaatatgcaggttgagggcgtgttctacgtaaacgacgcgttagagaagctgatgttcgaagagctgagaaacgcatgtagaggcggcggtgtgggcggctttctcccggccatgaagcagataggcaacgttgctgcgcttccggggatcgtgcatcgctctattgggctgcccgacgtacatagcgggtacgggtttgctatcggcaacatggccgcctttgacatgaatgatcctgaggccgtggtctctcccggtggtgtaggtttcgatataaactgcggtgtccgactgctcagaaccaacctggatgagagcgatgtgcaacctgtgaaggagcagttggcacaggctatgtttgatcacatccccgttggagtcggttctaagggcgatatgatgcgcgccgtacattgccccgagcaaaatctcgacgttatctag

SEQ ID NO: 179083 - DNA, 528 bp, Artificial Sequence
  derived and/or modified sequence
atgtcgaggagctacaatgacgagctgcagtttcttgagaaaatcaacaagaactgctggcggatcaaaaaaggattcgtgccaaacatgcaagtcgagggagtgttttatgtgaacgacgctctggagaaactcatgtttgaagaactgcggaatgcctgtcggggaggaggtgtggggggatttctgccagccatgaagcaaattggtaacgtggcggcactgccaggcattgtccaccgaagcataggactgcccgacgttcactcgggctacggttttgcgataggtaacatggctgccttcgatatgaacgatcctgaggcagtcgttagtccaggaggagtgggcttcgacatcaactgcggtgtgagacttctgcgtaccaatttagacgaaagcgacgttcagccagtcaaagagcaactcgcccaggcgatgtttgaccatattcctgtaggggttggaagcaagggggacatgatgagggcagtgcactgtcccgaacagaacttggatgtgatatag

SEQ ID NO: 179084 - DNA, 2027 bp, Artificial Sequence
  derived and/or modified sequence
gcgctttggttcttggaaggcggtgctctgagaagccggactacgcggcagcggctcttcaaagcggagccgggagtttttgctacagttttcgccaccatgagtcgcagctataatgatgagctgcagttcttggagaagatcaataaaaactgctggaggatcaagaagggcttcgtgcccaacatgcaggttgaaggtgttttctatgtgaatgatgctctggagaaattgatgtttgaggaattaaggaatgcctgtcgaggtggtggtgttggtggcttcctgccagccatgaaacagattggcaatgtggcagccctgcctggaattgttcatcgatctattgggcttcctgatgtccattcaggatatgggtttgctattgggaacatggcagcctttgatatgaatgaccctgaagcagtagtatccccaggtggtgtcgggtttgacatcaactgtggtgtccgcttgctaagaaccaatttagatgaaagtgatgtccagcctgtgaaggagcaacttgcccaagctatgtttgaccacattcctgttggggtggggtcaaaaggtgtcatcccaatgaatgccaaagacttggaggaggccttggagatgggggtggactggtccttaagagaagggtatgcctgggctgaagacaaggagcactgcgaggagtacggaaggatgctgcaggctgaccccaataaagtttctgcaagggcgaagaaaagaggccttcctcagttggggaccctgggagcaggcaaccattatgcagaaatccaggttgtggatgagattttcaatgagtatgctgctaaaaaaatgggcatcgaccataagggacaggtgtgtgtgatgatccacagtggaagcagaggcttgggccaccaagtagccacagatgcgctggtagctatggagaaggccatgaagagagacaagattatagtcaatgatcggcagttggcttgtgctcgaatcgcttccccagagggtcaagactatctgaagggaatggcagctgctgggaactatgcctgggtcaaccgctcttccatgaccttcttaacccgtcaggctttcgccaaggtcttcaacacaacccctgatgacttggacctacatgtgatctatgatgtttctcacaacattgccaaagtggagcagcatgtggtggacggaaaggaacggacactgttagtacacaggaagggatccacccgcgctttccctcctcaccatcccctcattgctgttgattaccaactcactggacagccagtgctcattggtggcaccatgggaacctgtagttatgttcttactggcactgaacagggcatgactgagacctttggaacaacctgtcatggagcgggccgtgcattgtcccgagcaaaatctcgacgtaatttagatttccaggatgtcttagacaaattggcagatatgggaattgcgatccgtgttgcctcacccaaactggttatggaagaggctcctgagtcctataagaatgtgacagatgtggtaaatacctgccatgatgctggaatcagcaagaaagccattaaactgagaccaattgctgtgatcaaaggatagaaccttggacagcagggctgcctgacaccaccaaccctctctgaagtggaagtggactgacatgctcttctgacatcagactcaaggcgggacaagttgcaaagtgtgcagctgtaactgctcacgccaaaatggctgatggggaggctgctgctttcaggggcccgtgcttgtaaaataaccttccaggaagaggcacattgcccacctttggaaagggaggaatatgccttctccttggttgttccacagagttttaggaaaatctgttagggatgggtagatgtcaaactgccttacgcagtcatactgatctttagccatcagattgatcttcttcacaccaagctctgtttacattccgagaggtgtcatgaagaaagttctgttcaataaggttttggaatgtt

SEQ ID NO: 179085 - DNA, 1188 bp, Artificial Sequence
  derived and/or modified sequence
ggcggtgctctgagaagccggactacgcggcagcggctcttcaaagcggagccgggagtttttgctacagttttcgccaccatgagtcgcagctataatgatgagctgcagttcttggagaagatcaataaaaactgctggaggatcaagaagggcttcgtgcccaacatgcaggttgaaggtgttttctatgtgaatgatgctctggagaaattgatgtttgaggaattaaggaatgcctgtcgaggtggtggtgttggtggcttcctgccagccatgaaacagattggcaatgtggcagccctgcctggaattgttcatcgatctattgggcttcctgatgtccattcaggatatgggtttgctattgggaacatggcagcctttgatatgaatgaccctgaagcagtagtatccccaggtggtgtcgggtttgacatcaactgtggtgtccgcttgctaagaaccaatttagatgaaagtgatgtccagcctgtgaaggagcaacttgcccaagctatgtttgaccacattcctgttggggtggggtcaaaaggtgatatgatgagggccgtgcattgtcccgagcaaaatctcgacgtaatttagatttccaggatgtcttagacaaattggcagatatgggaattgcgatccgtgttgcctcacccaaactggttatggaagaggctcctgagtcctataagaatgtgacagatgtggtaaatacctgccatgatgctggaatcagcaagaaagccattaaactgagaccaattgctgtgatcaaaggatagaaccttggacagcagggctgcctgacaccaccaaccctctctgaagtggaagtggactgacatgctcttctgacatcagactcaaggcgggacaagttgcaaagtgtgcagctgtaactgctcacgccaaaatggctgatggggaggctgctgctttcaggggcccgtgcttgtaaaataaccttccaggaagaggcacattgcccacctttggaaagggaggaatatgccttctccttggttgttccacagagttttaggaaaatctgttagggatgggtagatgtcaaactgccttacgcagtcatactgatctttagccatcagattgatcttcttcacaccaagctctgtttacattccgagaggtgtcatgaagaaagttctgttc

SEQ ID NO: 179086 - DNA, 528 bp, Artificial Sequence
  derived and/or modified sequence
atgagcagaagctacaacgacgagctgcagttcctggagaagatcaacaagaactgctggagaatcaagaagggcttcgtgcccaacatgcaggtggagggcgtgttctacgtgaacgacgccctggagaagctgatgttcgaggagctgagaaacgcctgcagaggcggcggcgtgggcggcttcctgcccgccatgaagcagatcggcaacgtggccgccctgcccggcatcgtgcacagaagcatcggcctgcccgacgtgcacagcggctacggcttcgccatcggcaacatggccgccttcgacatgaacgaccccgaggccgtggtgagccccggcggcgtgggcttcgacatcaactgcggcgtgagactgctgagaaccaacctggacgagagcgacgtgcagcccgtgaaggagcagctggcccaggccatgttcgaccacatccccgtgggcgtgggcagcaagggcgacatgatgagagccgtgcactgccccgagcagaacctggacgtgatctag

SEQ ID NO: 179087 - protein, 880 aa, Artificial Sequence
  derived and/or modified sequence
MQPGATTCTEDRIQHALERCLHGLSLSRRSTSWSAGLCLNCWSLQELVSRDPGHFLILLEQILQKTREVQEKGTYDLLTPLALLFYSTVLCTPHFPPDSDLLLKAASTYHRFLTWPVPYCSICQELLTFIDAELKAPGISYQRLVRAEQGLPIRSHRSSTVTVLLLNPVEVQAEFLAVANKLSTPGHSPHSAYTTLLLHAFQATFGAHCDVPGLHCRLQAKTLAELEDIFTETAEAQELASGIGDAAEARRWLRTKLQAVGEKAGFPGVLDTAKPGKLHTIPIPVARCYTYSWSQDSFDILQEILLKEQELLQPGILGDDEEEEEEEEEVEEDLETDGHCAERDSLLSTSSLASHDSTLSLASSQASGPALSRHLLTSFVSGLSDGMDSGYVEDSEESSSEWPWRRGSQERRGHRRPGQKFIRIYKLFKSTSQLVLRRDSRSLEGSSDTALPLRRAGSLCSPLDEPVSPPSRAQRSRSLPQPKLGTQLPSWLLAPASRPQRRRPFLSGDEDPKASTLRVVVFGSDRISGKVARAYSNLRRLENNRPLLTRFFKLQFFYVPVKRSHGTSPGACPPPRSQTPSPPTDSPRHASPGELGTTPWEESTNDISHYLGMLDPWYERNVLGLMHLPPEVLCQQSLKAEAQALEGSPTQLPILADMLLYYCRFAARPVLLQVYQTELTFITGEKTTEIFIHSLELGHSAATRAIKASGPGSKRLGIDGDREAVPLTLQIIYSKGAISGRSRWSNLEKVCTSVNLNKACRKQEELDSSMEALTLNLTEVVKRQNSKSKKGFNQISTSQIKVDKVQIIGSNSCPFAVCLDQDERKILQSVVRCEVSPCYKPEKSDLSSPPQTPPDLPAQAAPDLCSLLCLPIMTFSGALP

SEQ ID NO: 179088 - DNA, 2643 bp, Artificial Sequence
  derived and/or modified sequence
atgcagcccggcgccaccacctgcaccgaggacagaatccagcacgccctggagagatgcctgcacggcctgagcctgagcagaagaagcaccagctggagcgccggcctgtgcctgaactgctggagcctgcaggagctggtgagcagagaccccggccacttcctgatcctgctggagcagatcctgcagaagaccagagaggtgcaggagaagggcacctacgacctgctgacccccctggccctgctgttctacagcaccgtgctgtgcaccccccacttcccccccgacagcgacctgctgctgaaggccgccagcacctaccacagattcctgacctggcccgtgccctactgcagcatctgccaggagctgctgaccttcatcgacgccgagctgaaggcccccggcatcagctaccagagactggtgagagccgagcagggcctgcccatcagaagccacagaagcagcaccgtgaccgtgctgctgctgaaccccgtggaggtgcaggccgagttcctggccgtggccaacaagctgagcacccccggccacagcccccacagcgcctacaccaccctgctgctgcacgccttccaggccaccttcggcgcccactgcgacgtgcccggcctgcactgcagactgcaggccaagaccctggccgagctggaggacatcttcaccgagaccgccgaggcccaggagctggccagcggcatcggcgacgccgccgaggccagaagatggctgagaaccaagctgcaggccgtgggcgagaaggccggcttccccggcgtgctggacaccgccaagcccggcaagctgcacaccatccccatccccgtggccagatgctacacctacagctggagccaggacagcttcgacatcctgcaggagatcctgctgaaggagcaggagctgctgcagcccggcatcctgggcgacgacgaggaggaggaggaggaggaggaggaggtggaggaggacctggagaccgacggccactgcgccgagagagacagcctgctgagcaccagcagcctggccagccacgacagcaccctgagcctggccagcagccaggccagcggccccgccctgagcagacacctgctgaccagcttcgtgagcggcctgagcgacggcatggacagcggctacgtggaggacagcgaggagagcagcagcgagtggccctggagaagaggcagccaggagagaagaggccacagaagacccggccagaagttcatcagaatctacaagctgttcaagagcaccagccagctggtgctgagaagagacagcagaagcctggagggcagcagcgacaccgccctgcccctgagaagagccggcagcctgtgcagccccctggacgagcccgtgagcccccccagcagagcccagagaagcagaagcctgccccagcccaagctgggcacccagctgcccagctggctgctggcccccgccagcagaccccagagaagaagacccttcctgagcggcgacgaggaccccaaggccagcaccctgagagtggtggtgttcggcagcgacagaatcagcggcaaggtggccagagcctacagcaacctgagaagactggagaacaacagacccctgctgaccagattcttcaagctgcagttcttctacgtgcccgtgaagagaagccacggcaccagccccggcgcctgccccccccccagaagccagacccccagcccccccaccgacagccccagacacgccagccccggcgagctgggcaccaccccctgggaggagagcaccaacgacatcagccactacctgggcatgctggacccctggtacgagagaaacgtgctgggcctgatgcacctgccccccgaggtgctgtgccagcagagcctgaaggccgaggcccaggccctggagggcagccccacccagctgcccatcctggccgacatgctgctgtactactgcagattcgccgccagacccgtgctgctgcaggtgtaccagaccgagctgaccttcatcaccggcgagaagaccaccgagatcttcatccacagcctggagctgggccacagcgccgccaccagagccatcaaggccagcggccccggcagcaagagactgggcatcgacggcgacagagaggccgtgcccctgaccctgcagatcatctacagcaagggcgccatcagcggcagaagcagatggagcaacctggagaaggtgtgcaccagcgtgaacctgaacaaggcctgcagaaagcaggaggagctggacagcagcatggaggccctgaccctgaacctgaccgaggtggtgaagagacagaacagcaagagcaagaagggcttcaaccagatcagcaccagccagatcaaggtggacaaggtgcagatcatcggcagcaacagctgccccttcgccgtgtgcctggaccaggacgagagaaagatcctgcagagcgtggtgagatgcgaggtgagcccctgctacaagcccgagaagagcgacctgagcagccccccccagaccccccccgacctgcccgcccaggccgcccccgacctgtgcagcctgctgtgcctgcccatcatgaccttcagcggcgccctgccctag

SEQ ID NO: 179089 - DNA, 2643 bp, Artificial Sequence
  derived and/or modified sequence
atgcagcctggggccacgacctgcactgaagatcgcattcaacacgccctggagcgctgtctgcacggcctgagcctgagtcgccggtctactagctggtccgccggtttgtgtttgaattgctggagcctgcaggagctcgtgtccagagatcccggtcattttctgattttgttagagcaaatccttcaaaaaacaagagaggttcaggagaaggggacatatgatcttctcacaccgctggcactcctgttctattcgaccgtcctttgcacaccccatttcccacccgatagtgatctcttgttgaaggccgcatccacttaccacagattcttgacatggccagttccctactgttcaatatgccaggaactgcttacattcatcgacgcagaattgaaggccccaggcatttcataccagcggctggtgcgagcagaacagggtctccctatccggtctcaccgcagtagtactgttacggtcctgttgctgaaccccgttgaggtacaggccgaattcctggctgtggccaacaagctctctacgccagggcacagtccacactctgcctataccactctgctcctgcacgcatttcaggcaacctttggcgcgcactgcgacgtccctggcttgcactgcaggctgcaggcgaaaaccttggcggaattagaggacattttcaccgagaccgcagaagcccaggaactcgcatcaggcatcggagatgccgccgaggcccgccgctggcttcggacgaaactccaggccgttggcgaaaaggctggattccccggagtgctcgacacagcaaagcctggcaagctccacaccattcccatcccggtcgctaggtgttatacatatagttggtcccaggattcttttgatatcttgcaggaaattttgcttaaagagcaggaattactacagcctgggatcctcggcgatgacgaggaagaagaggaggaagaagaagaagttgaggaggatctggagaccgacggtcattgtgcggaacgagactccctgctcagcactagctccctggcgtctcatgatagcaccttgtctctggcaagtagccaggcaagtggacccgcattatcccgccacttgctaacgtcattcgtgtcaggtttatccgatgggatggatagcggctacgtagaggatagcgaagagtctagcagtgagtggccctggcgaaggggcagccaagagcgcaggggccacagacggccggggcagaagttcatcaggatctataaactgttcaagagcactagccagctggtactcagaagagacagccgcagcctggaaggcagctcagatacagcactgccattacgtcgggcaggttcattatgcagccccctcgatgagcctgtcagccccccctcacgcgcgcagaggagtagaagccttcctcagcccaaactcggaactcagttaccctcgtggctactagcgccggccagccgcccgcagcgtagacgaccgttcctgtccggagatgaggatccaaaagctagtaccctgagagttgtggtttttggctctgatagaatctcaggcaaggtcgcaagggcctacagcaacctgcgacggctggaaaacaaccgtcctctgcttactcggtttttcaagctccagtttttctatgtgccggtcaaaagaagccatggtaccagtcccggtgcctgcccgccgccacggtcccagactcccagtccaccgacagatagcccccgacacgcgtctccaggagagctgggaactaccccatgggaggagtcgactaacgacatcagccattatctcgggatgctcgacccatggtacgagcgtaacgtgcttggcctgatgcatcttccccccgaggtcctctgccagcagagcctcaaggcagaggcacaggccttggagggttctcccactcagctccccattctggcagatatgctgctgtactattgtcgattcgctgcgcgcccagtgcttctccaggtataccagaccgagctgacctttattaccggggagaagacgacagagattttcatccattcgctagagctcggtcacagtgccgctacaagagctatcaaggcaagtgggcctggttccaagcgattgggaatagatggggaccgcgaggctgttcctttgactctccagatcatctactctaagggagctatttctggcagatctcgttggtcaaatcttgagaaggtctgcacgtccgtgaacttaaataaggcctgcagaaaacaagaggaactggatagctccatggaggccttgaccctgaatttgacagaggtagtgaaacggcagaacagcaagagcaagaagggcttcaaccagatttctacttcacagattaaggttgataaagtgcagataattggctcaaactcctgtcctttcgctgtgtgcctggatcaggacgaaaggaaaatcctccagagcgttgttcggtgtgaggtgagtccttgctacaagcctgaaaaaagcgacctctcttcacctccacagacccctccagacctccccgcacaggctgcccccgatctgtgttcactgttatgtctgcccattatgaccttctctggcgctttgccctag

SEQ ID NO: 179090 - DNA, 2643 bp, Artificial Sequence
  derived and/or modified sequence
atgcagccaggcgcaaccacttgcaccgaggaccgcatccaacacgcgctggaacgctgcctgcacggcctttccctgagccgcagaagcacatcttggagcgctgggctctgtcttaattgctggagcttgcaggagctggtaagcagagatccgggtcacttccttatattactggaacagatcctacagaaaacacgggaggttcaggagaaaggaacttatgatctcctgacacccttggccctcctgttttacagcactgtgctatgcaccccacattttccacctgacagcgacctgttacttaaggctgcttcaacgtatcacagattccttacctggcccgtcccatactgcagtatctgccaggaactgttgacctttattgatgccgagctgaaagcacctggaatttcctaccagaggttggtgcgcgcagaacagggattgccaatccgatcacatagatcctctacagttacggttctcctcttaaatcccgtggaagttcaggctgagttccttgccgtcgctaataaactgtcaacccccggccattccccgcactcagcctataccacactgctgctgcatgcattccaggcaacttttggagcgcattgtgatgttccaggactgcactgtcggttgcaggccaagacactcgccgagctggaggacattttcaccgaaacagctgaggctcaggagttagccagcggtatcggggacgctgccgaggccagacgctggttacgaactaaactccaggccgtaggggagaaggctggctttcctggcgtgttagataccgctaagcctgggaagctgcacacaataccgatccctgtggcccgatgctatacatattcgtggagtcaggactcgttcgacatactccaggaaatcctgcttaaagagcaggaacttttacagcccggaatcctcggtgatgatgaagaggaagaagaggaagaggaggaggttgaggaagacttggagactgacggacactgcgctgagcgcgatagcctgctgtcgacttcgtctcttgcctcccatgatagtacattgtctcttgcatcaagccaggcgtcaggacctgcgctgtcccggcacttgcttacatcattcgtgagcggcctgagtgacgggatggattcaggctatgtagaggacagtgaggaaagcagcagcgagtggccttggaggagaggctcacaggaaagacggggccaccgcagaccagggcagaagtttatcagaatttataaactgtttaaatctacatctcagctggtgctgcgcagagactctcgctctctggaggggagcagcgatactgcattacctctgcgtcgagccggttctctctgctcaccactggatgaaccagtgtctcctcctagccgagcccagaggtcccggtcactgcctcagcccaagcttggcacgcagttgcctagctggttactagcgcccgctagtcgtccccagaggaggaggcctttcctgagcggcgatgaggaccccaaggcctccactctacgcgtcgtggttttcggatctgatcgtataagcggaaaggtggctagggcatacagtaacctgcggcgcctcgaaaataaccgccctcttttgaccagattcttcaaattgcagtttttctacgttcctgtgaagcgatcacatgggactagccctggagcctgcccacctcctaggtcccagacgccaagcccccctactgactcacctcgccatgctagcccaggcgaactgggcaccactccatgggaggagtcaaccaatgacatctctcactacctcggcatgctggatccctggtacgagagaaatgtgctcggcttgatgcacttgccgcctgaggtcctctgtcagcagtctttgaaggccgaggctcaagccctggaggggtctccaactcagctgcctatcctggccgacatgttgttgtactattgtagatttgcggccaggcctgttctactgcaggtgtatcaaacagagctgacttttattacaggtgagaagaccaccgagatctttatacacagtctggagcttggccacagcgctgccacccgggcaataaaggcctccgggccgggttccaagcgccttggcatcgacggggatcgtgaagctgtgcctctgactctccagatcatttatagcaagggtgccatctccggtcgatcccgctggagtaatttggagaaggtgtgcactagcgtgaatttgaacaaggcctgccgaaagcaggaagagctcgactctagtatggaggccctgacacttaatttgactgaagtggtaaaacgccaaaactcaaaaagcaaaaaagggttcaatcagatctccacctctcaaatcaaggtagataaggttcagatcattggctccaactcatgtccatttgccgtgtgcctggatcaagatgagagaaaaatcctgcagtcagtcgtgaggtgcgaggtttccccttgttataagcccgagaaaagcgacctatctagcccaccccagacccctcccgatttgcccgcccaggccgcacccgatctctgctcactcctctgtctccccattatgacgttcagtggagccctgccctag

SEQ ID NO: 179091 - DNA, 2643 bp, Artificial Sequence
  derived and/or modified sequence
atgcagcccggggccaccacctgcacagaggaccgcatccagcacgccctggagcgctgcctgcacggcctgagcctgagccgccgcagcacctcctggagcgctggcctgtgcctgaactgctggagcctgcaggagctggtgtcccgggaccccggccacttcctgatcctgctggagcagatcctgcagaagacccgggaggtgcaggagaagggcacctatgacctgctgacccccctggccctgctcttctacagcacagtgctgtgcaccccccacttccccccagacagcgacctgctgctgaaggccgccagcacctaccaccgcttcctgacctggcctgtgccctactgcagcatctgccaggagctgctgaccttcattgatgctgagctgaaggcccctggcatctcctaccagaggctggtgcgggcagagcagggcctgcccatccgcagccacaggagcagcacagtgacagtgctgctgctgaaccctgtggaggtgcaggccgagttcctggccgtggccaacaagctgagcaccccaggccacagcccccacagcgcctacaccaccctgctgctgcacgccttccaggccacctttggagcccactgtgatgtgcccggcctgcactgccgcctgcaggccaagaccctggccgagctggaggacatcttcacagaaacagctgaggcccaggagctggccagcggcattggagatgctgctgaggcccggcgctggctgcggaccaagctgcaggccgtgggggagaaggccggcttccctggggtgctggacacagccaagccaggcaagctgcacaccatccccatccctgtggcccgctgctacacctacagctggagccaggacagctttgacatcctgcaggagatcctgctgaaggagcaggagctgctgcagcccggcatcctgggagatgatgaggaggaggaggaggaggaggaggaggtggaggaggacctggagacagatggccactgtgccgagcgggacagcctgctgagcaccagcagcctggccagccatgacagcaccctgagcctggccagcagccaggccagcggccctgccctgagccgccacctgctgaccagctttgtgtctggcctgagtgatggcatggattctggctacgtggaggacagcgaggagagcagcagcgagtggccctggaggcggggcagccaggagcggcggggccacagaagacctggccagaagttcatccgcatctacaagctgttcaagagcaccagccagctggtgctgcggcgggacagccgcagcctggagggcagcagtgacacagccctgcccctgcggcgggccggcagcctgtgcagccccctggatgagcctgtgtccccacccagccgggcccagaggagccgcagcctgccccagcccaagctgggcacccagctgcccagctggctgctggccccagccagccggccccagaggcggcggcccttcctgtctggagatgaggaccccaaggccagcaccctgcgggtggtggtgtttggaagtgaccgcatcagcggcaaggtggcccgggcctacagcaacctgcggcggctggagaacaaccggcccctgctgacccgcttcttcaagctgcagttcttctacgtgcctgtgaagaggagccacggcaccagccctggggcctgccccccacccaggagccagacccccagccccccaacagacagccccaggcatgccagccctggagagctgggcaccaccccctgggaggagagcaccaatgacatcagccactacctgggcatgctggacccctggtatgaaagaaatgtgctgggcctgatgcacctgcccccagaggtgctgtgccagcagagcctgaaggccgaggcccaggccctggagggcagccccacccagctgcccatcctggccgacatgctgctgtactactgccgctttgctgcccggcctgtgctgctgcaggtgtaccagacagagctgaccttcatcactggagagaagaccacagagatcttcatccacagcctggagctgggccacagcgctgccacccgggccatcaaggccagcggccctggcagcaagaggctgggcattgatggagaccgggaggccgtgcccctgaccctgcagatcatctacagcaaaggagccatcagcggccgcagccgctggagcaacctggagaaggtgtgcacctctgtgaacctgaacaaggcctgcaggaagcaggaggagctggacagctccatggaggccctgaccctgaacctgacagaggtggtgaagaggcagaacagcaagagcaagaagggcttcaaccagatcagcaccagccagatcaaggtggacaaggtgcagatcatcggcagcaacagctgcccctttgctgtgtgcctggaccaggatgagaggaagatcctgcagagcgtggtgcgctgtgaggtgagcccctgctacaagccagagaagagtgacctgagcagccccccccagaccccaccagacctgcctgcccaggccgccccagacctgtgcagcctgctgtgcctgcccatcatgaccttcagcggggccctgccctag

SEQ ID NO: 179092 - DNA, 2643 bp, Artificial Sequence
  derived and/or modified sequence
atgcagcccggcgccaccacctgcaccgaggaccggatccagcacgccctcgagcgttgcctccacggactatctctgagtcgccgcagcacctcatggagtgccggcctctgtctgaactgctggagtctgcaggagttggtgagcagggatcctggccacttcctcatcttactcgagcagattttgcagaaaaccagggaggtgcaggagaaagggacatacgatctactgactcccctggccctgttgttctatagcaccgtgctatgcacgcctcacttcccgcccgattctgacttactgttaaaggccgcttcgacctatcaccgtttcctcacctggcctgttccctattgtagcatttgtcaggagcttctgacgttcattgacgccgaactgaaggcacctggcatatcttaccagagactggttagggccgagcagggacttcccatccgatcccacaggtccagtactgtgaccgtactgctcctgaatcccgtcgaagtccaagccgagtttctggctgtagcgaataagctctctacacctggacactccccccactctgcatacactacactgttactgcacgcatttcaagctactttcggggcccactgcgatgtgcccggactgcattgcagactccaggcgaaaaccttggcagagctggaagatatatttactgaaactgcggaggcccaagagctagcctcaggcatcggggacgctgcagaggcgcggcgctggttacgaactaagttgcaggcagtgggggagaaggctggattcccaggtgtgctggacaccgccaaaccagggaagttacataccattcccatacctgtggctcgttgctacacctacagctggagtcaggacagcttcgacatactccaggagattcttctcaaagaacaggagctgctgcaacctggaattctcggggatgatgaagaggaggaggaagaagaagaggaagtggaagaggacttagagacagacgggcattgtgcggagagagatagtctgctgtctacatcctccctggcaagccacgatagtacgctcagccttgcatcatcgcaggctagcggcccagccctcagccggcatttgctgacatcttttgtcagcggcctgtcagacgggatggatagtggttatgtcgaagacagcgaggagtcatcgagtgaatggccctggcggcggggctcccaggaacggagaggccatagaagacccggccagaagtttattcgcatctacaagctgttcaagagcacaagtcagctcgtacttcgcagggattcccgatcgttagagggaagcagtgatactgccctgcccctgcggcgcgccggctccctatgcagccctctcgatgaacccgtatcccctcccagccgcgcacaaagatcccggtctctgccccaacccaagctgggcacccaactccctagttggctgctggctccggctagccggcctcagagacgtagacccttcctgtcaggcgacgaggaccctaaggcttccactcttcgggtggtggtttttggctctgaccgtataagcggaaaggtcgcccgggcctacagcaacctgcgccgcttggaaaacaatcgaccactattgactagatttttcaaactgcaatttttctatgtgccggtgaaacgtagccacggaacatcccctggtgcgtgcccacctccaaggtcccagacccccagtccacctaccgacagcccgcgccacgcttcccctggcgaattaggaacaactccatgggaagagtccactaacgacatttctcactacctgggtatgcttgatccttggtacgaaagaaatgtgctgggtctgatgcatctcccacccgaagtcttgtgtcagcagtcactgaaggcagaggctcaggccctggaggggagcccaactcagctgcccattttagccgatatgctcctgtattactgtcgatttgctgcacggcccgtgctccttcaggtttatcagactgagttgacattcattactggcgaaaagactactgaaatcttcatccacagtctcgagcttggtcactctgccgctactagagctatcaaagcatccggccccggtagtaagaggctcggaattgacggtgacagggaggcagtgccgcttactttacagattatctactctaagggtgccatctcaggtaggagccgttggtctaacctggaaaaagtctgcacatctgtcaacctgaacaaggcatgccggaaacaggaagaactcgattcaagtatggaagcactgaccctcaatctcacagaagtggtgaagcggcagaactcgaagtcaaagaaagggtttaaccagatatccacaagccagatcaaggtggacaaggtacagatcatcggaagtaatagctgcccctttgccgtctgcttagaccaggacgagagaaagatccttcaatctgtggtgcgctgcgaggttagcccatgctataaaccagagaagagtgatctgagctctccccctcagaccccaccggatctgcctgcacaggccgcccctgatctatgctctttactctgtctcccaattatgactttcagtggtgcattgccatag

SEQ ID NO: 179093 - DNA, 2643 bp, Artificial Sequence
  derived and/or modified sequence
atgcagcccggcgccaccacctgcaccgaggaccggatccagcacgcacttgaacgctgccttcacggactgtctttgtccagaaggtccaccagctggtccgcaggcctgtgtctgaactgctggagcctccaggaactggttagccgagatcccggacatttcctgattctgctagaacagatcttacagaagacaagggaggtgcaggagaaaggaacctacgacttactgacccctttggctcttctcttttacagcaccgttctctgtacccctcacttcccccctgacagtgacctgctgctgaaggccgccagcacctatcatcggttcctaacgtggcccgtgccttattgtagcatatgtcaggagctgctcacttttattgacgcggagctaaaggcgccaggaattagttatcaaaggttggttagagcagagcagggactgcccatcagatctcacagatcttctaccgtcaccgtgttgttgctgaatccagtggaagttcaggcagagtttctggcagttgctaacaaactgtccacaccagggcactcaccacattcagcctacacaactttacttctccatgcctttcaggcaacatttggtgcccattgtgatgtacctgggttgcactgccggctacaggcaaaaacactggcggaactagaggatattttcacagagacggctgaagcccaggaactggcctcaggcataggcgacgccgccgaggcaaggaggtggttgagaaccaagctgcaagctgtcggagaaaaagctggttttcctggagtactagacactgcgaaacctgggaagttgcataccattcccataccagtcgcccgctgctatacctattcctggtcccaagattctttcgatatattacaggaaattctcctgaaagaacaggaattattgcagcccgggatcttaggtgatgacgaggaggaggaagaggaagaggaggaggtagaggaggacctggaaactgatggacactgcgcagagcgggattcactgctgtccacctcctcactggccagccatgactctacactgtctctggcatcgtctcaggcaagcggacctgccctgtcacgacatctgctcacgtcgtttgtgagcggcctatctgacggcatggacagtgggtatgtggaggactcagaggaaagctcttcggagtggccatggaggaggggcagtcaggaacgcaggggccaccgcaggccagggcagaaatttatccggatttataaacttttcaagtctacatcacagttggtgctccggagagacagtagatcgcttgaaggatcaagcgacacggcactgccactccggcgggccggatccctatgttctccactcgacgaacctgtgagtcctccttcacgggcacagagaagcagatccctgccacagcccaagcttggcacacagctcccatcatggctgttagcacccgccagtcggccccaacggcgacgcccatttttaagtggtgacgaggacccaaaggcctctacactccgtgtagttgtatttggctccgaccgcattagcggaaaggtggcccgggcctatagtaatcttcgtcgtctggagaataatagacccctgctgacaaggttctttaagctgcagttcttctatgtacccgtaaagagatcacatggaacatcacctggagcgtgtccaccgcccaggtcccagactccatcacccccgacggatagccctcgccatgcttcacccggtgagctcggtactacaccatgggaggagtcaacaaacgacataagccattatcttggaatgctcgatccatggtatgaacgcaacgtactgggcctaatgcatcttccaccagaagtgctgtgccagcagtctttaaaggcagaggcacaggctttggaaggctccccaactcagctcccaattctggccgatatgctgctgtattactgccgattcgcagcgcgacccgtgctcctgcaggtgtaccagacggaactgacgttcatcaccggagaaaagactacggagatctttatccattccctggagctgggacattcagccgctacgagggcaattaaggcctctggtcctgggagtaagcggctgggcatcgacggcgatcgcgaagcagtcccacttaccctgcaaatcatttatagcaaaggggccatttccgggcggagtcgatggtcgaacctcgagaaggtgtgtaccagtgttaacttgaataaggcctgtcgtaagcaagaggagctggactcctccatggaagcgcttactttaaacctgacagaggtagttaagcggcagaattctaagtcgaagaaagggttcaaccaaataagcactagccaaataaaagtcgataaggttcagatcatcggcagcaattcatgccctttcgcagtgtgcctcgatcaggatgagcgaaagatcctgcagtctgtggtgcgttgcgaagtgtccccatgttacaagcctgaaaagtctgatctgtcaagccctccacaaaccccacctgacctgcctgcacaggctgcgcccgatctgtgttcactactctgcctacccatcatgaccttctccggagcccttccttag

SEQ ID NO: 179094 - DNA, 2643 bp, Artificial Sequence
  derived and/or modified sequence
atgcaaccaggtgctaccacatgtaccgaggatcggatccagcacgccctcgagcgatgtctgcatggactgtccttaagtcgaagatccacatcctggagtgcgggtctgtgcctgaattgttggagcttgcaggagctcgtaagccgggacccgggtcacttccttatactgctggagcagatcctccagaagaccagagaagttcaggaaaagggcacttatgatttactcaccccactagccctgctcttttattctaccgtgctttgcacaccccatttcccccctgattctgacctgctgctgaaggccgcatccacttatcacagatttcttacctggccagtcccttactgttctatctgccaggaattactgacattcatcgacgccgaactaaaggcgcctggcatatcttatcagagactggttagagctgagcagggcctacctatccgcagccatagaagctcaaccgtgaccgttctgctgttaaatcctgttgaggtacaagcggagttccttgcagtcgccaacaagctgagcactcccggtcacagtccacactccgcctatacaaccctgttgctccatgccttccaagctacattcggagctcactgtgatgtgcctgggcttcactgtcggttacaggcgaagactctcgctgaactggaggacattttcacagaaacagccgaggcacaggaattggcctccgggatcggtgacgccgcagaggctagaaggtggctgcgtacgaaactgcaggccgttggcgaaaaggccggatttccgggtgtgttagatactgcgaagccgggaaagctccacacaatcccaatccccgttgctaggtgttatacctactcctggtcccaggatagcttcgatatcctacaagagatcctgctgaaggagcaagaattactgcaacctggaattcttggggacgacgaggaggaggaagaagaagaagaggaggttgaagaggacctggaaacagatggacattgcgctgagagggatagtcttctgtccacgagcagcctcgctagccacgacagtaccctgtctctggcttccagccaggcttctggcccagcactcagcaggcatttgcttacttccttcgtgtccggcctgagcgatggaatggactcagggtacgtggaggattcggaggagagctcatcagagtggccttggcgccgtggctcgcaagagaggcggggtcatcgtcgacctggccaaaagtttatacgcatctacaagctgtttaagtccacatctcagctggtccttagaagagactccagatccttggaagggagtagcgataccgcccttccccttagaagagctggaagtctgtgcagccctttagatgaaccagtgagcccgccttcccgtgcacagaggtctaggagtttgccccagccaaagctgggaacccagctgccttcttggctactggccccagcctctcggccacaaaggcgacgcccatttctcagtggcgacgaggaccccaaggcctctactctccgcgttgttgtctttggttcagaccggatttccggaaaggttgccagggcctactctaatctgaggaggttggagaataacagaccactccttactcgtttctttaaactgcagttcttttatgtgccagtgaaacgctcccatggaacttcccctggcgcttgtcccccacctcggagccagaccccctcccctccaacagattctccgagacacgcaagccctggcgagctgggcacaaccccttgggaggagtccacaaacgacatctctcactacctgggcatgcttgacccctggtatgaacgcaatgtgctgggcctgatgcatctgcctcctgaagttctctgccaacagtctctgaaggctgaagcgcaggcactagagggttccccgactcagctacctattctggccgatatgctgttgtactattgtcgatttgccgcacgtccggtgctcctgcaagtgtatcagaccgaactgacttttattacaggagagaagacaactgaaatcttcatccatagcctcgagttgggccacagcgcagccactagggctatcaaggcttcaggtccgggatctaaacgactggggatcgacggggaccgggaggctgtgcctctcaccctgcaaataatctactccaagggagcaatcagtggtagatcccgatggtcaaacctggagaaggtgtgtacttcggtcaatctgaacaaggcctgtaggaaacaagaagaactggactccagcatggaggccttgacccttaatttgacggaggtcgttaagcggcagaattcgaagagcaagaaggggttcaatcagataagcacgtcgcaaatcaaggtggacaaagtgcagataattggctctaatagttgcccgttcgccgtttgcctggaccaggacgaacgcaaaatcttgcagagcgtggtgcgctgcgaagtctcaccctgttataaaccagagaagagcgacctgtcaagccctcctcagactcctccagacttgcccgctcaggcagctccagatctctgttcactgttgtgccttcccatcatgactttttctggggctctgccctag

SEQ ID NO: 179095 - DNA, 2643 bp, Artificial Sequence
  derived and/or modified sequence
atgcagccaggagctactacctgcaccgaagacagaatacagcacgcactggagcgctgtctacatggactatcattgtcaagacgaagtacctcctggagcgccggactgtgccttaactgctggtcactgcaagaacttgtatcccgggatcctggtcacttcctgattttgctggagcagattctgcaaaaaacccgcgaagtccaggagaaggggacctatgatctgcttactcctctcgccctcctgttttactctactgtgttgtgtaccccccacttcccccctgatagtgacttactgctcaaggctgcttcaacctaccatcggtttctgacctggcctgtgccttactgtagcatctgccaagaactcctcaccttcatagacgccgagctaaaggctccaggaatctcctaccagcgcctggtgcgcgcagagcagggtttgcccattcggagtcataggagttcaaccgtgactgtcctcctccttaaccctgtcgaagttcaggcagaatttctcgccgttgccaataaactgtctacaccgggtcacagcccccactcagcctataccacactcctcctgcatgccttccaggctaccttcggggctcactgtgacgtgcccggtctgcactgccggctccaggctaaaacgctagctgaactggaagacatttttactgaaactgccgaggcccaggagctggctagcggtatcggagatgccgcagaggcaagacgctggttgcgcaccaaacttcaggccgtgggagaaaaggccggatttccaggggtgctggatactgccaagcctggaaaacttcatactatacccatacctgtggccagatgctacacttatagctggtcacaggatagcttcgatatcttacaggagatcctgttgaaggaacaggagttgcttcagcctggaattctaggcgacgacgaggaggaggaggaggaagaggaggaggtggaggaggatctggaaacagacggtcattgcgcagagcgggactcactgctgtctacatcttcactcgcgtcacatgactccaccttgtcactggcgagctcacaggcctccgggccagctctatctcgccatctattgacatcttttgtctcgggactgtcggatgggatggattccgggtatgtcgaggattcggaggagtcgagctctgaatggccctggaggcgaggtagtcaggagcgacgaggccaccggagaccgggtcaaaagttcatccggatttacaaactatttaaatcaactagccagctggtgctccgtcgtgatagccgatccctcgagggttctagtgataccgcgctgccactccgtcgcgcagggtccctgtgcagcccactggatgagccagtgtcaccaccctcacgagctcaacgcagccggtcactgcctcagcctaaactgggcacacagctgccatcatggctattagcccctgcatcccgccctcagcggcgtagaccctttctgtctggagacgaagacccaaaagccagcaccctccgtgtagtggtttttggaagcgacaggatcagcggaaaggttgccagagcctactcaaatctgaggcgcctcgagaataataggccccttctcactcggttcttcaagctccagttcttttacgtgcctgtgaaaagatcacacgggacctcccccggtgcatgtccacctcccagatcccaaactcctagcccccctacagatagcccaagacacgctagccccggagagctcggaacgaccccgtgggaagagagcacgaatgacatttcccactaccttggaatgctggatccatggtatgaacgtaacgtgctgggactgatgcacttgccacctgaagtgctgtgccagcagagcctgaaagccgaggcccaagccctggagggatcccccacccagctgccaatcctcgccgatatgttgctatactattgtcgcttcgccgctaggcccgtgttgcttcaggtgtatcaaacagaactaactttcataaccggtgagaagactaccgagattttcatacactccctggagctgggacactctgccgctacacgggctatcaaggcttctggacctggaagcaagaggctggggattgatggggaccgtgaggctgttcccctcaccttgcagattatttactcgaagggcgcaatatctggtagatctcgatggtctaatttagagaaggtctgtacctccgtaaatctcaacaaggcctgcaggaagcaagaggagttggattctagcatggaagcgttgacgctgaacctcacagaagtcgttaagaggcagaactccaagagcaaaaaaggcttcaatcagatttccacatcccagatcaaagttgataaagtgcagatcatcggaagtaactcctgcccatttgccgtttgcttggaccaagatgaacggaaaatccttcaaagcgttgttcgctgtgaagtgtctccctgctacaagcccgagaagtctgacctcagctcacccccacaaaccccacctgacttgcctgctcaagctgccccagacttatgttctttactgtgtctcccaatcatgacgttctctggcgctctcccatag

SEQ ID NO: 179096 - DNA, 4438 bp, Artificial Sequence
  derived and/or modified sequence
aagcttactcagcgcatctgctacagcattttatcttcccaagagccccatgaggcgatgacccaggatgcagccaggggccacgacatgcacggaggaccgcatccagcatgccctggaacgctgcctgcatggactcagcctcagccgccgctccacctcctggtcagctgggctgtgtctgaactgctggagcctgcaggagctggtcagcagggacccgggccacttccttatcctccttgagcagatcctgcagaagacccgagaggtccaggagaagggcacctacgacctgctcaccccgctggccctgctcttctattccactgttctttgtacaccacacttcccaccagactcggatctccttctgaaggcagccagcacctaccaccggttcctgacctggcctgttccttactgcagcatctgccaggagctgctcaccttcattgatgctgaactcaaggccccagggatctcctaccagagactggtgagggctgagcagggcctgcccatcaggagtcaccgcagctccaccgtcaccgtgctgctgctgaacccagtggaagtgcaggccgagttccttgctgtagccaataagctgagtacgcccggacactcgcctcacagtgcctacaccaccctgctcctgcacgccttccaggccacctttggggcccactgtgacgtcccgggcctgcactgcaggctacaggccaagaccctggcagagcttgaggacatcttcacggagaccgcagaggcacaggagctggcatctggcatcggggatgctgcagaggcccggcggtggctcaggaccaagctgcaggcggtgggagaaaaagctggcttccctggggtgttagacactgcaaaaccagggaagctccacaccatccccatccctgtcgccaggtgctacacctacagctggagccaggacagctttgacatcctgcaggaaatcctgctcaaggaacaggagctactccagccagggatcctgggagatgatgaagaggaggaagaggaggaggaggaggtggaggaggacttggaaactgacgggcactgtgccgagagagattccctgctctccaccagctctttggcgtcccatgactccaccttgtcccttgcatcctcccaggcctcggggccggccctctcgcgccatctgctgacttcctttgtctcaggcctctctgatggcatggacagcggctacgtggaggacagcgaggagagctcctccgagtggccttggaggcgtggcagccaggaacgccgaggccaccgcaggcctgggcagaagttcatcaggatctataaactcttcaagagcaccagccagctggtactgcggagggactctcggagcctggagggcagctcggacacggccctgcccctgaggcgggcagggagcctctgcagccccctggacgaaccagtatcacccccttcccgggcccagcgctcccgctccctgccccagcccaaactcggtacccagctgcccagctggcttctggcccctgcttcacgcccccagcgccgccgccccttcctgagtggagatgaggatcccaaggcttccacgctacgtgttgtggtctttggctccgatcggatttcagggaaggtggctcgggcgtacagcaaccttcggcggctggagaacaatcgcccactcctcacacggttcttcaaacttcagttcttctacgtgcctgtgaagcgaagtcatgggaccagccctggtgcctgtccaccccctcggagccagacgccctcacccccgacagactcccctaggcacgccagccctggagagctgggcaccaccccatgggaggagagcaccaatgacatctcccactacctcggcatgctggacccctggtatgagcgcaatgtactgggcctcatgcacctgccccctgaagtcctgtgccagcagtccctgaaggctgaagcccaggccctggagggctccccaacccagctgcccatcctggctgacatgctactctactactgccgctttgccgccagaccggtgctgctgcaagtctatcagaccgagctgaccttcatcactggggagaagacgacagagatcttcatccactccttggagctgggtcactccgctgccacacgtgccatcaaggcgtcaggtcctggcagcaagcggctgggcatcgatggcgaccgggaggctgttcctctaacactacagattatttacagcaagggggccatcagtggacgaagtcgctggagcaacctggagaaggtctgtacctccgtgaacctcaacaaggcctgccggaagcaggaggagctggattccagcatggaggccctgacgctaaacctgacagaagtggtgaaaaggcagaactccaaatccaagaagggctttaaccagattagcacatcgcagatcaaagtggacaaggtgcagatcatcggctccaacagctgcccctttgctgtgtgcctggaccaggatgagagaaagatcctgcagagtgtagtcagatgtgaggtctcaccgtgctacaagccagagaagagcgacctctcctcaccaccccagacgcctcctgacctgccggcccaggccgcacctgatctctgctcccttctctgcctgcccatcatgactttcagtggagctctgccctagtgtgggcccagcgccagactggacagaagccctggggcaacctcctcggccacccctccaggacagtccctctctgtggagaactgaatggccctgtgcagagccatagtcccactgtgggtcctgcaatgagcaggggctgggagtagagggtttctggggcctcagggttctgggaaagcaacagctatcagagagagaagggccagaccccatagcctcttagattcctggcagtagaaggagaaggatgggtaaattgacctctgaagtccctgaccattagcatggtctaggatcctttctagaaggaagatctgaggctctggtgctcagggggatggcttgggccttttctctcaaccttggctgagcctaccccttactttgccaaagacttgaggaccctgtatgtctggagttcagtcccctcctctgtggggctcaggtgattgaaatgtggatgaaacatttctctacttcaagaccacctctccctgcaaacaccacacacacatggcatgcatgtacgcacatgcgcacacacacacgcacacacctcaataatttctctcaagtttcctgagtctccagaaaaacagcactaacgctggacctgtctactctcagaacccggcacagattctctcttgatctccttttggaatctgagattcttagaagacaggatagggttaaatttagtagcagctcagttctagctaaatcactagaggaagttaattaactttaagccttcatttctccagcactaaaatggagtggagagttggggtggaaataagacatccttaaaaggttaaattgtctgcaaagcacctagcccagtgccgagctcccagtaggtgttcagtaaagcttagtgcctgactttctgaacactgattcctcctgtttggagtcactgggatactctcattgccgttgggatgttcctcactccttcccagttcgtggctgaggcagaacccagactgaagagggaagagacattccagaggaggattgccttcgtcagggtaaggggtgggctgctcaggggccctacccttcacccccttctgtatcagattggccctcccactcccatctcactctgcgtgtacaatcttccatatccgcaagttcactggcactcttctggcacctgggcaagatcccagaacagaggatggagtgactggcctcacagagcttagtgcccgactcaggggaaatgggactggtgcatgggaaatggtcagcctaggataggacacgagagtctgaaattcaaagcaaccagcttgaagtggtttgagaagctggaagcaaacatgggctagagagatagggcagaagtcaagacgaggatctggactgatgtggagaaagtagccacggaagcatgaactgtatcctgcacaaagtccctcttccccgcctcctaattcattatgcccaaaaggccttacgtgaaattccagcccagagtactcatgacttgagagacgtggacagagccagcttctaccttgcctggccgtctctcccctgtcttaatgtctgctcttgctctaagctccagaagagtggcgggccatgtatcttcaatatgtttttgctgtatgggcaggttgtcttattatgtgatcaacagatgtccaggaactaatgagtggaatttaatattattgtcaaataaaacttgatttgtcctatatttaa

SEQ ID NO: 179097 - DNA, 4488 bp, Artificial Sequence
  derived and/or modified sequence
agatgctgcggctcgccgcgcggctccagctggggcgcggtggtcccgacggtcacccgaatcgcagggagtcgccgctggagaggggctcggcgcccggcggggactgcaggcgatgacccaggatgcagccaggggccacgacatgcacggaggaccgcatccagcatgccctggaacgctgcctgcatggactcagcctcagccgccgctccacctcctggtcagctgggctgtgtctgaactgctggagcctgcaggagctggtcagcagggacccgggccacttccttatcctccttgagcagatcctgcagaagacccgagaggtccaggagaagggcacctacgacctgctcaccccgctggccctgctcttctattccactgttctttgtacaccacacttcccaccagactcggatctccttctgaaggcagccagcacctaccaccggttcctgacctggcctgttccttactgcagcatctgccaggagctgctcaccttcattgatgctgaactcaaggccccagggatctcctaccagagactggtgagggctgagcagggcctgcccatcaggagtcaccgcagctccaccgtcaccgtgctgctgctgaacccagtggaagtgcaggccgagttccttgctgtagccaataagctgagtacgcccggacactcgcctcacagtgcctacaccaccctgctcctgcacgccttccaggccacctttggggcccactgtgacgtcccgggcctgcactgcaggctacaggccaagaccctggcagagcttgaggacatcttcacggagaccgcagaggcacaggagctggcatctggcatcggggatgctgcagaggcccggcggtggctcaggaccaagctgcaggcggtgggagaaaaagctggcttccctggggtgttagacactgcaaaaccagggaagctccacaccatccccatccctgtcgccaggtgctacacctacagctggagccaggacagctttgacatcctgcaggaaatcctgctcaaggaacaggagctactccagccagggatcctgggagatgatgaagaggaggaagaggaggaggaggaggtggaggaggacttggaaactgacgggcactgtgccgagagagattccctgctctccaccagctctttggcgtcccatgactccaccttgtcccttgcatcctcccaggcctcggggccggccctctcgcgccatctgctgacttcctttgtctcaggcctctctgatggcatggacagcggctacgtggaggacagcgaggagagctcctccgagtggccttggaggcgtggcagccaggaacgccgaggccaccgcaggcctgggcagaagttcatcaggatctataaactcttcaagagcaccagccagctggtactgcggagggactctcggagcctggagggcagctcggacacggccctgcccctgaggcgggcagggagcctctgcagccccctggacgaaccagtatcacccccttcccgggcccagcgctcccgctccctgccccagcccaaactcggtacccagctgcccagctggcttctggcccctgcttcacgcccccagcgccgccgccccttcctgagtggagatgaggatcccaaggcttccacgctacgtgttgtggtctttggctccgatcggatttcagggaaggtggctcgggcgtacagcaaccttcggcggctggagaacaatcgcccactcctcacacggttcttcaaacttcagttcttctacgtgcctgtgaagcgaagtcatgggaccagccctggtgcctgtccaccccctcggagccagacgccctcacccccgacagactcccctaggcacgccagccctggagagctgggcaccaccccatgggaggagagcaccaatgacatctcccactacctcggcatgctggacccctggtatgagcgcaatgtactgggcctcatgcacctgccccctgaagtcctgtgccagcagtccctgaaggctgaagcccaggccctggagggctccccaacccagctgcccatcctggctgacatgctactctactactgccgctttgccgccagaccggtgctgctgcaagtctatcagaccgagctgaccttcatcactggggagaagacgacagagatcttcatccactccttggagctgggtcactccgctgccacacgtgccatcaaggcgtcaggtcctggcagcaagcggctgggcatcgatggcgaccgggaggctgttcctctaacactacagattatttacagcaagggggccatcagtggacgaagtcgctggagcaacctggagaaggtctgtacctccgtgaacctcaacaaggcctgccggaagcaggaggagctggattccagcatggaggccctgacgctaaacctgacagaagtggtgaaaaggcagaactccaaatccaagaagggctttaaccagattagcacatcgcagatcaaagtggacaaggtgcagatcatcggctccaacagctgcccctttgctgtgtgcctggaccaggatgagagaaagatcctgcagagtgtagtcagatgtgaggtctcaccgtgctacaagccagagaagagcgacctctcctcaccaccccagacgcctcctgacctgccggcccaggccgcacctgatctctgctcccttctctgcctgcccatcatgactttcagtggagctctgccctagtgtgggcccagcgccagactggacagaagccctggggcaacctcctcggccacccctccaggacagtccctctctgtggagaactgaatggccctgtgcagagccatagtcccactgtgggtcctgcaatgagcaggggctgggagtagagggtttctggggcctcagggttctgggaaagcaacagctatcagagagagaagggccagaccccatagcctcttagattcctggcagtagaaggagaaggatgggtaaattgacctctgaagtccctgaccattagcatggtctaggatcctttctagaaggaagatctgaggctctggtgctcagggggatggcttgggccttttctctcaaccttggctgagcctaccccttactttgccaaagacttgaggaccctgtatgtctggagttcagtcccctcctctgtggggctcaggtgattgaaatgtggatgaaacatttctctacttcaagaccacctctccctgcaaacaccacacacacatggcatgcatgtacgcacatgcgcacacacacacgcacacacctcaataatttctctcaagtttcctgagtctccagaaaaacagcactaacgctggacctgtctactctcagaacccggcacagattctctcttgatctccttttggaatctgagattcttagaagacaggatagggttaaatttagtagcagctcagttctagctaaatcactagaggaagttaattaactttaagccttcatttctccagcactaaaatggagtggagagttggggtggaaataagacatccttaaaaggttaaattgtctgcaaagcacctagcccagtgccgagctcccagtaggtgttcagtaaagcttagtgcctgactttctgaacactgattcctcctgtttggagtcactgggatactctcattgccgttgggatgttcctcactccttcccagttcgtggctgaggcagaacccagactgaagagggaagagacattccagaggaggattgccttcgtcagggtaaggggtgggctgctcaggggccctacccttcacccccttctgtatcagattggccctcccactcccatctcactctgcgtgtacaatcttccatatccgcaagttcactggcactcttctggcacctgggcaagatcccagaacagaggatggagtgactggcctcacagagcttagtgcccgactcaggggaaatgggactggtgcatgggaaatggtcagcctaggataggacacgagagtctgaaattcaaagcaaccagcttgaagtggtttgagaagctggaagcaaacatgggctagagagatagggcagaagtcaagacgaggatctggactgatgtggagaaagtagccacggaagcatgaactgtatcctgcacaaagtccctcttccccgcctcctaattcattatgcccaaaaggccttacgtgaaattccagcccagagtactcatgacttgagagacgtggacagagccagcttctaccttgcctggccgtctctcccctgtcttaatgtctgctcttgctctaagctccagaagagtggcgggccatgtatcttcaatatgtttttgctgtatgggcaggttgtcttattatgtgatcaacagatgtccaggaactaatgagtggaatttaatattattgtcaaataaaacttgatttgtcct

SEQ ID NO: 179098 - protein, 367 aa, Artificial Sequence
  derived and/or modified sequence
MEKKKMVTQGNQEPTTTPDAMVQPFTTIPFPPPPQNGIPTEYGVPHTQDYAGQTGEHNLTLYGSTQAHGEQSSNSPSTQNGSLTQTEGGAQTDGQQSQTQSSENSESKSTPKRLHVSNIPFRFRDPDLRQMFGQFGKILDVEIIFNERGSKGFGFVTFENSADADRAREKLHGTVVEGRKIEVNNATARVMTNKKMVTPYANGWKLSPVVGAVYGPELYAASSFQADVSLGNDAAVPLSGRGGINTYIPLIIPGFPYPTAATTAAAFRGAHLRGRGRTVYGAVRAVPPTAIPAYPGVDMQPTDMHSLLLQPQPPLLQPLQPLTVTVMAGCTQPTPTMPLPLPLAMELALWRVYTEVATADLPPTEVT

SEQ ID NO: 179099 - DNA, 6932 bp, Artificial Sequence
  derived and/or modified sequence
attctccagcaggcctgcttctggagttgggagatgtcagcctgctgggagggggtggggggaggaggaagaggtggggctctactctgattaattaccttaggcattcaggggtggggcttccttcagccatctgcctgagatatgggagggagctggagaaagaaggagggggagagactgccagagaggaagagaaaagaaaggaagaaacattagaaagaaaaaggaaggaaaacggtataaagagagatcaattacccacccttaaatagctagattggggggggaggggggtggaaaagaaagctgtggaggtgtgccccagcacggctgctttgaaaggtttatcatctatccgtttggtttatggagaaaaagaaaatggtaactcagggtaaccaggagccgacaacaactcctgacgcaatggttcagccttttactaccatcccatttccaccacctccgcagaatggaattcccacagagtatggggtgccacacactcaagactatgccggccagaccggtgagcataacctgacactctacggaagtacgcaagcccacggggagcagagcagcaactcacccagcacacaaaatggatctcttacgcagacagaaggtggagcacagacagacggccagcagtcacagacacaaagtagtgaaaattcagagagtaaatctaccccgaaacggctgcatgtctctaatattcctttccgcttccgggaccctgacctccggcagatgtttgggcagtttggcaaaatcctagatgtagaaataatctttaatgaacgtggctctaagggattcgggttcgtaactttcgagaatagtgctgatgcagacagggccagggagaaattacacggcaccgtggtagagggccgtaaaatcgaggtgaataatgctacagcacgtgtaatgaccaataagaagatggtcacaccatatgcaaatggttggaaattaagcccagtagttggagctgtatatggtccggagttatatgcagcatccagctttcaagcagatgtgtccctaggcaatgatgcagcagtgcccctatcaggaagagggggtatcaacacttacattcctttaatcattcctggcttcccttaccctactgcagccaccacggcagccgctttcagaggagcccatttgaggggcagagggcggacagtatatggtgcagtccgagcggtacctccaacagccatccccgcctatccaggggtggatatgcagcctacagatatgcacagcctgctactgcaaccgcagccaccgctgctgcagccgctgcagccgcttacagtgacggttatggcagggtgtacacagccgacccctaccatgcccttgcccctgccgctagctatggagttggcgctgtggcgagtttataccgaggtggctacagccgatttgccccctactgaagtgacgtgagacccctgcaaatgggacagccccccagttcatgaggcctggctattgcaatatttactagtagaggaactctatagcaagatgaagaggaaaaacaaacaaacaaacaaaaaaaaacacaaaaaaagaaagaatacttttttatacctcactatgttctttgaatatgtatttttcctttaaatttctgcctttaattcttttgttccaaagattgtgcatttttttctttttttttttaaactgtggtaaaaaaaaaaaaaataatgcatttccatgtctgtatgtccgtgcttagcttattctatcaatcacggaagaggcagtcaaggaggaaggagagacattaggagccgataaatgcatctgatcagaaatcagcagacagaattaccaaagtgtatctggtgctgaatgactgggggacaagcagaagtggaagagatctttctgcaacaggatattcttctagtcttctgagtttctggtctttgacaggcaattctggttggctgtggctggaatccacatgctgatagataggaatttgtgcttacaaagcaggagaattaaaaagacgctttcctctcctcttccctcctgtcttctccgttctttttacaatcatcttacacgcacagcctgagacagctggcatagtttttggaattatagtattgatatttccaaacgtgctctcagacagtggataataaacacctcattaggaaaccgatctcagaatgaactctggagtatgaaaaagatcatttctttttgttcctgtaacctagcattccttctaggcttcttctcctttaattgaaccacagcttagctcatgtattcttttattaacaccctgctctcatgtccataagattcaggaatttaggacccagggacagaaaagtgaataagccagtgaccagatttcccccagatgtcttgaggattagaagtacaaattgttgacagccattaaagagggtgaggaagggaaaaggaatattagaagatctggtatttcttacttttttcttgcctcagaaagtacaaagtttaaaaaatagaataaagaatctgctggggaaagatagagtaccaggtcctaggtcagtagtccctggaagttttggtgatgaggacatggaagggcaggcagaggcactttgtacttgctccaaagccataggaattttcatcttccagagcctttatgagtcacttctctatccacagtcttgagcctgtggctatcccgctgagcttctcactgtcctccaaaaacaccccgctgagcacccggaccactttgtacacattaacactacaggacataaaatgcagaggccctgagattgctgccctcccatattggaaggagggtctgcgatggcaagggtcttctatatcaccagaaagagtcgcgcagtgagtcactgccgttgccatctggctgtaattttctatgttatcaaggtaggagggagtgtttctcttctagctgttagatagaactgataaaagcaagtgtcctacagcatttcccaaatgaaggcattaggaaatagaaaagcacggtctttttggctccctggtctagtcacattggtactagggtgacctttcacccaagggacagctgctaaagggagtaattcagagacatggagcttctggttatgggtttgttttgggtttgtttttaactcctgcctccacacatgttcttgactgataactgactcatgtccctgaattaaaatgactgacctatgacagcatcaagcattctttgtaagcagagtgatatatctgagagggcgttgacctgttgtgtagaatacatatcctttcccccttcagaatcctgtctcgcctcgtaactgggagagaggctgtgcctgaaactaggggcgatgtcaaggaagctagaggcctcgatgcaattattactgactctggggaggaagacagagaataaggggacaccaactgcccagtccactggccatttttaagggtccccccaccccaagccaaagtttggtttgttgctgttaagacaatttttgttgtatgtatataaatattttagttagaggagcggggaatgggatgcgggctttcacagttctagggaatgggggcagggaggattttgcttttgcttttgctttgagggagaactttagctgactaaaaaaacagaagtttggggtcatgatcacaaaggggccattcccaaaagatggcaagccacgtattcagtggagactaggccaaattctaaatggttttatccatagcaggggagaataggagaatgagtttaagagtttttctcttcttttttcctagaaagaggtaaggataatgggaaaggtagagaaggcggctcccacagaccttttaagagaggcagaatcttgagcttgaggcaccttgagtgcatctcagttcagctggttctggctgaggcctccaaaggcaagctctgtgctttccagtggtttctgctgcatttccagggatggtgtttaacaccgcttcctccagctcccttttctaagaaagaataaatggagttctgctttttatgaaagggtctttggttttcagtgtcaacactgagaattggggctcttgcaagcatctggatttcacagtatcaacctccccgtcaccttttgaactttgagactccgtacggtcaacttcaccagaggcaggttgctcgaagcagcactgcttgtctgttcctgactctggttctcactgtattaaaaaagagagtcagaggagtctggcatttcgtgagtttgttagaggatgctggctgataattccagaaaacttactgatgctaaatcacagtacatgcatgattctttttcagctttactatagttcatgacctggactttctgtactcttggaagctgggctccttaaaggaggcctctagtgaacacctttatctccatgtccctcttagagcccagagagctgcccataggcattttccagaattcctcatgtcacctagttcaatttccattaactcagatcagccattgtgattcaccatttgtcaggctctcaggtttaacaaaacctactatcaccatcatccttcaacagccacagtctgaattgagccaacatttttttttctttgagaaagaagtggactggggcacaacttttagtctgaggggagctagtggaaatctagacaatagaagtcatcgatagcagcttttcctcaaatgtgtgactcctcaggggctaaactgctcttagcttagaattatgctttactagagatctagcagataagtgggttaatcactaccatcctgtaactagttatatagcttccagacatgagggagacatcaaacagggatggaagcaaccccaaggatatgcaagaagggcatgatgaacccccttccctctggcaggagaacaaggccaaccaagggacagactggaaagcacttagatgtttaaggaggagaaaggggaagctttgaccagtccttgccttttgccaagttcagccagttctccgctgcttgcaacctctagcgcagtaacatttgcagaattgcagattttcccccagatactaggaggaaagggactttggggggtggggaaggggtcgtggtgttttaaaagcataagttacctgtttgcactgttttaagataggaaaaaaaaatagtgggcaaggtgaacatcagacgtaaatttgtgtgtttttattttgtcatgctcttgaaaatgtttgaccatttgtagtatacacagtgaaacttgattctctgttgcataaaacactatatttttttggaaatgttactgtccaaaagcctcttccctccctttccttttcctatgtacttccttcatacttgctttactgatcagccaggcaatagccatccaagagctagagcatgaaacagggccctttccaagtaggctctgggtgtcctaagccagcgtgtgccctctggtttagtgagtgtaatagagtccctggcacctttctttgcaaatgaggctaacagaccagactgcagcaagttatcagattcctcaatcagatgcactaggagtgaggagcccagggatggagggggttcctgaagtattgcagttggctgtagtagctgagttcttttccatgttaccgaaactgtagccagttacagtttactcaggaaaacggtagatcaattcagccatggtagtgctggttggcagggattggtaacggagagaactgctcatcagccaaaactcaagccttgccttttaggaggccaccagcagagggacttggtcctccttgtctggtacttgtgtacatgccggtgacctgaggactccactcacactggcgagcaaaaagggagcagtgattctcttttctctccccaccccctgccctttgttaccaacaccagtttcccagggggtacatgagtttctgaatttttaaaaaatgtttttggtttggtttttctggggactgataagtgctttaagcaatgtccataccccgtcaagactcccagcttagtcattttcttgtatttttctgttcacagtatttgtgtgtgtgcttgttttggcagctcattttggctgtattatatattgagtgatgaattgatcctcttttttccctaagggatatgaattgtttttcttgtgttatattctgcttgtgaatagctggagcaaacctggggctgacacgcgtaagctagggctgcaaagcgagaagagagccggtggagtgtacttgtccctgacaggctgacctacctgagtctctgagcttttcagtccaaatctttgcaaggctcaaaatgccacagaacctctcctcttctccccactccccatggcagggaccggaccatccctacatgcaacatgctgttcctccagcccctcccattgccatggcaaaacaggtacctttggggcatgggggcattacatgggatgcttgtgtaatcgaccacctagccttctctctcccctcccgtcctcccccagaatcacttcctaggacacccgagctgcttgcccagggtcctgtttccctgctaactccagagaagcatcccagggctttgtgacagtctctaattcccttcccttctcgttaagaatcatattgtatagtagctttcagaccatacagtattcattgggttactcctattattatcaagtagctggaattgtgaaggtcggagtagttagatctttagcttttattccttatttttttgtattactctccatgtgtataaattattgatcatgttgctggcttttataaactctaagcgaaggaggagcactgcctcagcctttgcacatggtaatgaagcactgtttttaaataaaagagagaaacacca

SEQ ID NO: 179100 - DNA, 1104 bp, Artificial Sequence
  derived and/or modified sequence
atggagaagaagaagatggtgacccagggcaaccaggagcccaccaccacccccgacgccatggtgcagcccttcaccaccatccccttccccccccccccccagaacggcatccccaccgagtacggcgtgccccacacccaggactacgccggccagaccggcgagcacaacctgaccctgtacggcagcacccaggcccacggcgagcagagcagcaacagccccagcacccagaacggcagcctgacccagaccgagggcggcgcccagaccgacggccagcagagccagacccagagcagcgagaacagcgagagcaagagcacccccaagagactgcacgtgagcaacatccccttcagattcagagaccccgacctgagacagatgttcggccagttcggcaagatcctggacgtggagatcatcttcaacgagagaggcagcaagggcttcggcttcgtgaccttcgagaacagcgccgacgccgacagagccagagagaagctgcacggcaccgtggtggagggcagaaagatcgaggtgaacaacgccaccgccagagtgatgaccaacaagaagatggtgaccccctacgccaacggctggaagctgagccccgtggtgggcgccgtgtacggccccgagctgtacgccgccagcagcttccaggccgacgtgagcctgggcaacgacgccgccgtgcccctgagcggcagaggcggcatcaacacctacatccccctgatcatccccggcttcccctaccccaccgccgccaccaccgccgccgccttcagaggcgcccacctgagaggcagaggcagaaccgtgtacggcgccgtgagagccgtgccccccaccgccatccccgcctaccccggcgtggacatgcagcccaccgacatgcacagcctgctgctgcagccccagccccccctgctgcagcccctgcagcccctgaccgtgaccgtgatggccggctgcacccagcccacccccaccatgcccctgcccctgcccctggccatggagctggccctgtggagagtgtacaccgaggtggccaccgccgacctgccccccaccgaggtgacctag

SEQ ID NO: 179101 - DNA, 1104 bp, Artificial Sequence
  derived and/or modified sequence
atggagaaaaagaagatggtcacacaaggaaaccaagagcccacaaccactccagatgccatggtccagccattcaccacaatacccttccctccccccccccaaaatggcatccccaccgagtacggagtgccccacacacaggattacgctgggcaaactggtgagcataatctcacgctgtatggctctactcaagcccacggcgagcagagtagcaactcaccgtcaacccaaaatggaagccttacacagaccgaaggaggcgcacagacagatggccagcagtctcaaactcagtcgtctgagaattccgagtcaaagtcgactcctaagagacttcatgtgagcaacattcctttccgattcagagaccctgacctaagacaaatgttcggccagttcggcaagatcctcgacgtcgagattattttcaatgaacgagggagtaagggcttcggcttcgtcacgttcgagaactcagctgatgctgatcgggcaagagaaaagctgcatgggacagtcgtcgaggggaggaagatcgaagttaataacgccacggcgagggtaatgacaaataaaaaaatggtgacaccatatgctaacggatggaaactcagccctgtcgtcggcgccgtatacggccctgaactgtatgccgctagctccttccaagctgacgtgtccctgggcaacgatgctgcagtgcccctttctggccgaggcggcataaacacctacattccattaataatccccggtttcccatacccgaccgccgctacgactgccgcagccttcaggggggcccatctgcgggggaggggccgcacagtgtatggcgccgttagggctgtgcctccaacagctatcccagcctaccccggtgttgacatgcagccaaccgatatgcattccctactgctccagcctcagccccctctgctgcagcccttgcaacctttgacagtcaccgtcatggctgggtgtacacaacctacccctaccatgcccctgcccctgccgttggccatggagctggccctgtggagggtctatacggaagtagccacggccgacctgccacctacagaggtgacctag

SEQ ID NO: 179102 - DNA, 1104 bp, Artificial Sequence
  derived and/or modified sequence
atggagaagaagaagatggtgacccagggcaaccaggagcccaccaccaccccagatgccatggtgcagcccttcaccaccatccccttccccccaccaccccagaatggcatccccacagaatatggagtgccccacacccaggactatgccggccagacaggagagcacaacctgaccctgtatggcagcacccaggcccacggggagcagagcagcaacagccccagcacccagaatggcagcctgacccagacagagggcggggcccagacagatggccagcagagccagacccagagcagtgaaaattctgagagcaagagcacccccaagaggctgcacgtgagcaacatccccttccgcttccgggaccctgacctgcggcagatgtttggccagtttgggaagatcctggatgtggagatcatcttcaatgaaagaggcagcaaaggatttggatttgtgacctttgaaaattctgcagatgctgaccgggcccgggagaagctgcacggcaccgtggtggagggcaggaagattgaggtgaacaatgccacagcccgggtgatgaccaacaagaagatggtgaccccctatgccaacggctggaagctgagccctgtggtgggcgctgtgtatggccctgagctgtatgctgccagcagcttccaggctgatgtgtccctgggcaatgatgctgctgtgcccctgagcggccggggcggcatcaacacctacatccccctcatcatccctggcttcccctaccccacagctgccaccacagctgctgccttccggggggcccacctgcggggccggggccgcacagtgtatggagctgtgcgggctgtgcccccaacagccatcccagcctacccaggagtggacatgcagcccacagacatgcacagcctgctgctgcagccccagccccccctgctgcagcccctgcagcccctgactgtgacagtgatggccggctgcacccagcccacccccaccatgcccctgcccctgcccctggccatggagctggccctgtggagggtgtacacagaggtggccacagctgacctgcccccaacagaggtgacctag

SEQ ID NO: 179103 - DNA, 1104 bp, Artificial Sequence
  derived and/or modified sequence
atggagaagaagaagatggtgacccagggcaaccaggagcccaccacaacacctgacgccatggtccagcctttcaccaccatccccttccctcctccacctcagaacgggatcccgactgagtacggtgttcctcacacccaggactatgctgggcagaccggagagcacaacctcactctctatgggtccacccaggcgcatggggagcagagttctaatagcccaagtactcaaaacggttccctgacacagaccgagggaggtgcacagactgacgggcaacagtcccagactcagagcagtgagaatagtgaaagcaaatctacacctaagcggctgcacgtgagtaatatccctttcaggttccgggatccagatctgcgccagatgttcggccagttcgggaaaattctcgacgttgaaattatttttaacgagcgaggttccaagggcttcgggttcgtgacatttgaaaatagcgctgatgcagatagagctagagagaagctgcatggaaccgtcgtggagggccgcaagatcgaagttaacaacgctaccgctcgggtcatgacaaacaagaaaatggtcacaccctacgctaacgggtggaaactcagtccagttgtgggagctgtatacggccccgagctttacgcggcctcatcatttcaagccgatgtcagcttaggtaacgacgccgcagtaccactgtccggaaggggtggcataaacacatatattcctctgataatccctgggtttccgtacccaacagcagcaactaccgcggccgcttttcgcggtgcccacctccggggcagggggcggaccgtgtacggggcggtccgcgccgtgccccccacagctatacccgcctaccccggggttgatatgcagcctacggacatgcattcactgctgctgcagcctcagccacctctgctacagccgcttcagccgctgacggtgacggtaatggctggttgcactcaacccactccaaccatgcctctaccccttccccttgcaatggagcttgcactctggcgggtatacacggaggtcgcgactgcagacctgcccccaaccgaggttacctag

SEQ ID NO: 179104 - DNA, 1104 bp, Artificial Sequence
  derived and/or modified sequence
atggaaaagaagaaaatggtgacacagggcaatcaggaacctacaaccacccctgatgccatggtgcagccatttaccacaatcccttttcctcccccaccccaaaacggcattcccacagagtatggcgtgccacacacgcaggactacgccggacagacgggagaacataacctcaccctgtatggttcaacccaggcccacggggagcagtcctcgaatagtccttccacccagaatggaagcctgactcagacagagggtggcgcacaaaccgacgggcaacagagccaaacccagagtagcgaaaactctgagtccaagtcaacgcccaaacggctccacgtatcaaacattccttttagattccgagatccagatctgcgtcagatgtttggacagttcggaaagatccttgatgtggaaatcatcttcaacgaaaggggctccaaagggtttggattcgtgacttttgaaaatagcgccgatgcagatagggcccgtgaaaaactccacggtaccgttgtggagggaagaaagattgaggtgaacaatgctactgcaagggttatgactaataagaaaatggtaacgccatacgctaatggatggaaattaagtccagtagtgggggctgtttatggcccagaactatatgctgcttcgtctttccaggctgatgtgagtttagggaacgacgccgctgtcccactgagcggcagggggggtattaacacttatataccccttataatcccaggatttccatacccaacggcagccaccactgcggctgccttccgcggtgcacatttacgtggaagaggaagaactgtatatggcgctgtccgggctgtaccacccacagccatccctgcataccctggagttgacatgcagcctaccgatatgcactcacttctactacaaccgcaacccccacttctgcagcccctgcagcccctgactgtcacagttatggcgggttgcacacagccgactcccacgatgcctctgccactgcctctcgccatggagctggctctttggagggtgtacacggaggtagccaccgcggacctgccaccaacagaggttacttag

SEQ ID NO: 179105 - protein, 266 aa, Artificial Sequence
  derived and/or modified sequence
MMKTLSSGNCTLSVPAKNSYRMVVLGASRVGKSSIVSRFLNGRFEDQYTPTIEDFHRKVYNIRGDMYQLDILDTSGNHPFPAMRRLSILTGDVFILVFSLDNRESFDEVKRLQKQILEVKSCLKNKTKEAAELPMVICGNKNDHGELCRQVPTTEAELLVSGDENCAYFEVSAKKNTNVDEMFYVLFSMAKLPHEMSPALHRKISVQYGDAFHPRPFCMRRVKEMDAYGMVSPFARRPSVNSDLKYIKAKVLREGQARERDKCTIQ

SEQ ID NO: 179106 - DNA, 801 bp, Artificial Sequence
  derived and/or modified sequence
atgatgaagaccctgagcagcggcaactgcaccctgagcgtgcccgccaagaacagctacagaatggtggtgctgggcgccagcagagtgggcaagagcagcatcgtgagcagattcctgaacggcagattcgaggaccagtacacccccaccatcgaggacttccacagaaaggtgtacaacatcagaggcgacatgtaccagctggacatcctggacaccagcggcaaccaccccttccccgccatgagaagactgagcatcctgaccggcgacgtgttcatcctggtgttcagcctggacaacagagagagcttcgacgaggtgaagagactgcagaagcagatcctggaggtgaagagctgcctgaagaacaagaccaaggaggccgccgagctgcccatggtgatctgcggcaacaagaacgaccacggcgagctgtgcagacaggtgcccaccaccgaggccgagctgctggtgagcggcgacgagaactgcgcctacttcgaggtgagcgccaagaagaacaccaacgtggacgagatgttctacgtgctgttcagcatggccaagctgccccacgagatgagccccgccctgcacagaaagatcagcgtgcagtacggcgacgccttccaccccagacccttctgcatgagaagagtgaaggagatggacgcctacggcatggtgagccccttcgccagaagacccagcgtgaacagcgacctgaagtacatcaaggccaaggtgctgagagagggccaggccagagagagagacaagtgcaccatccagtag

SEQ ID NO: 179107 - DNA, 801 bp, Artificial Sequence
  derived and/or modified sequence
atgatgaagactctgagctcaggcaactgtaccctgtccgtcccagctaaaaattcgtaccggatggtagtgttaggcgcaagccgggttgggaagagtagcattgtatcccgtttcctcaacggaaggttcgaagatcagtatacccccactatcgaagattttcataggaaagtgtataacatccgaggggatatgtatcagttggacatcctagacaccagcggcaaccatccctttcctgctatgcggaggttgagtatccttaccggggacgtgttcatactggtgttttccctggacaaccgggagtcttttgacgaggtaaaacggctgcagaaacagattttagaggtcaaaagctgcctgaaaaacaaaacaaaggaagcagccgaactgccaatggtcatttgcggaaacaagaacgatcatggcgaactgtgtcgtcaggtacctaccaccgaggccgagctactggtcagtggggatgagaattgcgcgtattttgaagtcagcgcaaaaaagaacacaaatgtagatgagatgttctatgtgcttttctccatggccaaacttccccatgaaatgagtcctgctttacatcgtaagatttctgtgcaatacggtgacgcttttcatcctaggccattctgcatgaggcgagtcaaggagatggatgcttatggcatggtctcccccttcgcaaggcggccatccgtcaacagtgacttgaagtatatcaaagctaaggttctccgggaggggcaggcaagagagcgtgacaaatgcaccatacagtag

SEQ ID NO: 179108 - DNA, 801 bp, Artificial Sequence
  derived and/or modified sequence
atgatgaagaccctgagcagcggcaactgcaccctgtctgtgcctgccaagaacagctacaggatggtggtgctgggcgccagccgggtgggcaagagcagcatcgtgagccgcttcctgaatggccgctttgaggaccagtacacccccaccatcgaggacttccacaggaaggtgtacaacatccggggggacatgtaccagctggacatcctggacaccagcggcaaccaccccttccctgccatgaggcggctgagcatcctgactggagatgtgttcatcctggtgttcagcctggacaaccgggagagctttgatgaggtgaagaggctgcagaagcagatcctggaggtgaagagctgcctgaagaacaagaccaaggaggccgctgagctgcccatggtgatctgtggcaacaagaatgaccacggggagctgtgccggcaggtgcccaccacagaggccgagctgctggtgtctggagatgagaactgtgcctactttgaggtgtctgccaagaagaacaccaacgtggatgagatgttctacgtgctcttctccatggccaagctgccccatgagatgagccctgccctgcacaggaagatctctgtgcagtatggagatgccttccacccccggcccttctgcatgagaagagtgaaggagatggatgcctacggcatggtgagcccctttgcccggcggcccagcgtgaacagcgacctgaagtacatcaaggccaaggtgctgcgggagggccaggcccgggagcgggacaagtgcaccatccagtag

SEQ ID NO: 179109 - DNA, 801 bp, Artificial Sequence
  derived and/or modified sequence
atgatgaagaccctgagcagcggcaactgcaccctgagcgtgcccgcgaaaaattcttatagaatggttgtcctgggggcctcccgggtaggaaaaagcagcatcgtttctaggttcctgaacggtcgcttcgaagatcagtatactcccacaatcgaagacttccacaggaaggtgtacaacatcagaggggatatgtaccagttggacattctggatacctccgggaaccatccatttccggccatgcgccgcctgagcatactgaccggtgatgtgttcatactggttttttccctggataaccgcgagagctttgatgaggtgaaacgcctgcagaagcagatcctggaggtcaaaagttgtctaaaaaacaagaccaaagaagctgccgagcttcccatggtcatctgtggcaacaagaacgaccacggcgagctctgccggcaagttcctaccaccgaggcagaactacttgtatcgggtgatgaaaattgtgcctactttgaagtgtccgctaaaaagaacacaaacgtcgatgaaatgttctatgttctgtttagcatggctaaacttcctcatgaaatgtcacctgctctccaccggaagatcagcgtccagtatggagacgctttccaccctcggcctttttgcatgcgacgggtcaaagagatggatgcctacggtatggtttcccccttcgccagacgccccagcgtcaattccgatctgaagtacattaaggctaaagtgctccgcgaaggccaggcaagagaaagggataaatgcactattcagtag

SEQ ID NO: 179110 - DNA, 801 bp, Artificial Sequence
  derived and/or modified sequence
atgatgaagaccctgtcatccgggaattgcacactgtcagttcccgctaagaactcctaccgcatggtcgtattgggggcaagcagggttggtaagtctagcattgtgagccggttcctaaacgggaggtttgaggatcagtacaccccaaccatcgaagatttccataggaaagtgtacaatatccgcggagacatgtaccagttagatattttggacacttcagggaatcaccctttccctgcgatgaggcgcctgtctatcctcacaggggatgtgtttattctagtcttcagcctggacaacagagagtcttttgacgaggtaaagaggctccagaaacaaatcttagaagtaaagtcctgccttaagaataagacaaaagaagcagccgagctgcctatggtaatttgcggaaataagaatgaccacggggaattatgtaggcaagtccccactacagaggctgaactgctcgtcagcggcgacgagaattgtgcatatttcgaagtgtctgcaaagaagaataccaatgtggacgagatgttctacgtgctcttctctatggccaaactgccccacgagatgtctcctgcgcttcataggaagatttccgtgcagtacggggatgcctttcaccctcgacccttttgcatgcgcagggtgaaagagatggatgcttatggaatggtgagtcccttcgctcggaggcctagcgtgaactcagacctgaagtacattaaagcgaaggtgctgcgggaaggccaagcccgtgagcgcgataagtgtactatccaatag

SEQ ID NO: 179111 - DNA, 3412 bp, Artificial Sequence
  derived and/or modified sequence
gcgcggggagaaagaagccgtccctccggcgctgggagagctgcagagccgcgggcagagaaggaggccgcggccgagcccggcagcccgataccccccatccgagcgaccccctttggggcaggcggagaaggtggcataggcgaccaggagggttcgcccacctgggacacgcacccacagtcacctccaaaggaccccccctccccaagtctctaggagctgctccttcatcactggagtcgcccctacctctctgcccccagcccgagagccccaggcggggacccccggatcggacgtccccaagcctccgggcacctggctcagcaggaggcccccggctcggggcagggcagggccggcggcggcgagccggagcccgccccctgcccgggccccgccgagccctcggagcccacccatggggcacctgccccttgcgcctccttgcccggccgcgcccagcccggcgtcccgagcagcgcaggggaggatccccgcgcagtgacccgggagccaccacagactctgggaggctcggcggctggagcagcaggcagctccccgcagctcccggcgcttccaggcagctctctgagccgtgccagaggcccggcccgccattcccagccccgagccatgatgaagactttgtccagcgggaactgcacgctcagtgtgcccgccaaaaactcataccgcatggtggtgctgggtgcctctcgggtgggcaagagctccatcgtgtctcgcttcctcaatggccgctttgaggaccagtacacacccaccatcgaggacttccaccgtaaggtatacaacatccgcggcgacatgtaccagctcgacatcctggatacctctggcaaccaccccttccccgccatgcgcaggctgtccatcctcacaggggatgtcttcatcctggtgttcagcctggataaccgggagtccttcgatgaggtcaagcgccttcagaagcagatcctggaggtcaagtcctgcctgaagaacaagaccaaggaggcggcggagctgcccatggtcatctgtggcaacaagaacgaccacggcgagctgtgccgccaggtgcccaccaccgaggccgagctgctggtgtcgggcgacgagaactgcgcctacttcgaggtgtcggccaagaagaacaccaacgtggacgagatgttctacgtgctcttcagcatggccaagctgccacacgagatgagccccgccctgcatcgcaagatctccgtgcagtacggtgacgccttccaccccaggcccttctgcatgcgccgcgtcaaggagatggacgcctatggcatggtctcgcccttcgcccgccgccccagcgtcaacagtgacctcaagtacatcaaggccaaggtccttcgggaaggccaggcccgtgagagggacaagtgcaccatccagtgagcgagggatgctggggcggggcttggccagtgccttcagggaggtggccccagatgcccactgtgcgcatctccccaccgaggccccggcagcagtcttgttcacagaccttaggcaccagactggaggcccccgggcgctggcctccgcacattcgtctgccttctcacagctttcctgagtccgcttgtccacagctccttggtggtttcatctcctctgtgggaggacacatctctgcagcctcaagagttaggcagagactcaagttacaccttcctctcctggggttggaagaaatgttgatgccagaggggtgaggattgctgcgtcatatggagcctcctgggacaagcctcaggatgaaaaggacacagaaggccagatgagaaaggtctcctctctcctggcataacacccagcttggtttgggtggcagctgggagaacttctctcccagccctgcaactcttacgctctggttcagctgcctctgcaccccctcccacccccagcacacacacaagttggcccccagctgcgcctgacattgagccagtggactctgtgtctgaagggggcgtggccacacctcctagaccacgcccaccacttagaccacgcccacctcctgaccgcgttcctcagcctcctctcctaggtccctccgcccgacagttgtgctttgttgtggttgcagctgttttcgtgtcatgtatagtagtagaaatggaaatcattgtactgtaaaagcctagtgactccctccttggccaggccctcacccagttcagatccacggcctccacccgggacgccttcctcctctgctcccaaacagggtttccgtggcctgtttgcagctagacattgacctccgccattgagctccacggtttacagacaattgcacaagcgtggggtgggcaggccaggactgcttttttttaatgctcccatttcacagaggataccaccgagactcggaggggacacgatgagcaccaggccccacctttgtcccctagcaaattcagggtacagctccacctagaaccaggctgccctctactgtgctcgttcctcaagcatttattaagcacctactgggtgctgggttcactgtgtcctaggaaaccaagagggtccccagtcctggcctctgcccgcccctgctgccccaccaccttctgcacacacagcggtggggaggcggggaggagcagctgggacccagaactgagcctgggagggatccgacagaaaagctcagggcgggtcttctccttgtgcccgggattgggctatgctgggtaccaccatgtactcaggcatggtgggttttgaacccataaaccaaaggcccttgtcatcagctcttaacaagtatattttgtattttaatctctctaaacatattgaagttttagggccctaaggaaccttagtgatcttctattgggtctttctgaggttcagagagggtaagtaacttcctccaggtcacacagcaagtctgtgggtggcagaagcaagctagcgctgggcattcagtacataccacgatgtgctccctctcttgatgcttggcccctggggccttcagggctttgggacatcttgtcctcaaccctctccctagatcagtctgtgagggtccctgtagatattgtgtacaccatgcccatgtatatacaagtacacacagatgtacacacagatgtacacatgctccagccccagctctgcatacctgcacctgcaccccagccttggcccctgcctgcgtctgtgctcaaagcagcagctccaaccctgcctctgtccccttccccacccactgcctgagccttctgagcagaccaggtaccttggctgcaccggtgtgtggcccgctctcacccaggcacagccccgccaccatggatctccgtgtacactatcaataaaagtgggtttgttacaaagc

SEQ ID NO: 179112 - protein, 327 aa, Artificial Sequence
  derived and/or modified sequence
MAELPGPFLCGALLGFLCLSGLAVEVKVPTEPLSTPLGKTAELTCTYSTSVGDSFALEWSFVQPGKPISESHPILYFTNGHLYPTGSKSKRVSLLQNPPTVGVATLKLTDVHPSDTGTYLCQVNNPPDFYTNGLGLINLTVLVPPSNPLCSQSGQTSVGGSTALRCSSSEGAPKPVYNWVRLGTFPTPSPGSMVQDEVSGQLILTNLSLTSSGTYRCVATNQMGSASCELTLSVTEPSQGRVAGALIGVLLGVLLLSVAAFCLVRFQKERGKKPKETYGGSDLREDAIAPGISEHTCMRADSSKGFLERPSSASTVTTTKSKLPMVV

SEQ ID NO: 179113 - protein, 284 aa, Artificial Sequence
  derived and/or modified sequence
MAELPGPFLCGALLGFLCLSGLAVEVKVPTEPLSTPLGKTAELTCTYSTSVGDSFALEWSFVQPGKPISESHPILYFTNGHLYPTGSKSKRVSLLQNPPTVGVATLKLTDVHPSDTGTYLCQVNNPPDFYTNGLGLINLTVLVPPSNPLCSQSGQTSVGGSTALRCSSSEGAPKPVYNWVRLGTFPTPSPGSMVQDEVSGQLILTNLSLTSSGTYRCVATNQMGSASCELTLSVTEPSQGRVAGALIGVLLGVLLLSVAAFCLVRFQKERGKKPKETYGGSDLR

SEQ ID NO: 179114 - DNA, 984 bp, Artificial Sequence
  derived and/or modified sequence
atggccgagctgcccggccccttcctgtgcggcgccctgctgggcttcctgtgcctgagcggcctggccgtggaggtgaaggtgcccaccgagcccctgagcacccccctgggcaagaccgccgagctgacctgcacctacagcaccagcgtgggcgacagcttcgccctggagtggagcttcgtgcagcccggcaagcccatcagcgagagccaccccatcctgtacttcaccaacggccacctgtaccccaccggcagcaagagcaagagagtgagcctgctgcagaacccccccaccgtgggcgtggccaccctgaagctgaccgacgtgcaccccagcgacaccggcacctacctgtgccaggtgaacaacccccccgacttctacaccaacggcctgggcctgatcaacctgaccgtgctggtgccccccagcaaccccctgtgcagccagagcggccagaccagcgtgggcggcagcaccgccctgagatgcagcagcagcgagggcgcccccaagcccgtgtacaactgggtgagactgggcaccttccccacccccagccccggcagcatggtgcaggacgaggtgagcggccagctgatcctgaccaacctgagcctgaccagcagcggcacctacagatgcgtggccaccaaccagatgggcagcgccagctgcgagctgaccctgagcgtgaccgagcccagccagggcagagtggccggcgccctgatcggcgtgctgctgggcgtgctgctgctgagcgtggccgccttctgcctggtgagattccagaaggagagaggcaagaagcccaaggagacctacggcggcagcgacctgagagaggacgccatcgcccccggcatcagcgagcacacctgcatgagagccgacagcagcaagggcttcctggagagacccagcagcgccagcaccgtgaccaccaccaagagcaagctgcccatggtggtgtag

SEQ ID NO: 179115 - DNA, 855 bp, Artificial Sequence
  derived and/or modified sequence
atggccgagctgcccggccccttcctgtgcggcgccctgctgggcttcctgtgcctgagcggcctggccgtggaggtgaaggtgcccaccgagcccctgagcacccccctgggcaagaccgccgagctgacctgcacctacagcaccagcgtgggcgacagcttcgccctggagtggagcttcgtgcagcccggcaagcccatcagcgagagccaccccatcctgtacttcaccaacggccacctgtaccccaccggcagcaagagcaagagagtgagcctgctgcagaacccccccaccgtgggcgtggccaccctgaagctgaccgacgtgcaccccagcgacaccggcacctacctgtgccaggtgaacaacccccccgacttctacaccaacggcctgggcctgatcaacctgaccgtgctggtgccccccagcaaccccctgtgcagccagagcggccagaccagcgtgggcggcagcaccgccctgagatgcagcagcagcgagggcgcccccaagcccgtgtacaactgggtgagactgggcaccttccccacccccagccccggcagcatggtgcaggacgaggtgagcggccagctgatcctgaccaacctgagcctgaccagcagcggcacctacagatgcgtggccaccaaccagatgggcagcgccagctgcgagctgaccctgagcgtgaccgagcccagccagggcagagtggccggcgccctgatcggcgtgctgctgggcgtgctgctgctgagcgtggccgccttctgcctggtgagattccagaaggagagaggcaagaagcccaaggagacctacggcggcagcgacctgagatag

SEQ ID NO: 179116 - DNA, 984 bp, Artificial Sequence
  derived and/or modified sequence
atggcggagctgcccggaccattcttatgcggggctctcctcggttttctatgcttgtccggattggccgtggaggtcaaggtgccaacggagcccctttccacccctttgggcaagactgcggagctgacatgcacatattccacatccgtgggcgacagcttcgctctggagtggagcttcgttcagcctggtaagccaatctctgaatctcatcccattttgtatttcaccaatggacacttgtaccccactggatccaagagtaagcgggtttcactactgcagaatcccccaacagtgggagtggctaccctgaagttgactgatgtccatccaagcgatactgggacttacctgtgccaggtgaataaccctcccgatttctacaccaatggtctcggtttgatcaatctcacagtgttggtgcccccctctaatcctctctgttcccagagcgggcagacctccgtcgggggctcaacggcacttaggtgtagcagctcagagggggcaccaaaacctgtgtacaactgggttcggctgggtactttccctactcctagccctggaagcatggtgcaggacgaagtgagtggccagttgattctaactaacctgagtctgaccagctctggcacttaccgctgtgtggccacaaatcagatgggatcagccagttgcgaactgactcttagcgtcacagaaccctctcaggggcgggtagccggggcgctcattggcgtgcttctcggagttctcctcctctccgtagccgccttttgtctcgtgcgcttccagaaagagcggggaaaaaaacccaaagagacttacggaggctcggacctgagagaggatgccattgcgccagggatttctgaacacacttgcatgagggcggattctagtaaagggttccttgagaggccatctagtgctagtacagtaaccacaacgaaatctaaattgcctatggtcgtgtag

SEQ ID NO: 179117 - DNA, 855 bp, Artificial Sequence
  derived and/or modified sequence
atggcagaactgcctggacctttcttatgtggcgctctgctgggcttcctgtgtttatctggcctggcagtggaggtaaaggtccccacagaaccgctcagcactcccctcggcaagactgctgagctcacctgtacttatagcactagtgtgggggactcttttgctctggaatggtcattcgtgcagcctggaaaaccgatttccgagagccaccccatcctctatttcactaatggccacctgtacccaacgggctctaagagtaagcgggtatccctgttacaaaatcccccaaccgtcggagtcgccacattgaagctcacagatgtccacccctccgacaccggcacctacttatgtcaggtgaacaatccccctgacttctatactaatggcctgggactaatcaatctgacagtgctggtccccccatccaaccctctctgcagccagtctggacagacatctgtgggaggcagcacagccctgcggtgctcttccagtgaaggggctcccaaaccagtgtacaattgggtccggctgggtaccttccctacgccttctcccggaagcatggttcaagacgaagtgtctggacaactgatacttaccaatctctccttaacatcctctggaacctaccggtgcgtggccactaaccagatggggtcagcatcttgcgagctgacactgtccgtgactgagccatcacagggacgggtagcaggtgccctgataggagttctgttgggagtgttgctcctgagtgtcgccgcgttctgtttggtgcgatttcagaaagagaggggtaaaaagcccaaagagacctatggggggtccgacctccgatag

SEQ ID NO: 179118 - DNA, 984 bp, Artificial Sequence
  derived and/or modified sequence
atggccgagctgcccggccccttcctgtgtggggccctgctgggcttcctgtgcctgagcggcctggccgtggaggtgaaggtgcccacagagcccctgagcacccccctgggcaagacagctgagctgacctgcacctacagcacctctgtgggggacagctttgccctggagtggagctttgtgcagcccgggaagcccatcagcgagagccaccccatcctgtacttcaccaacggccacctgtaccccaccggcagcaagagcaagagggtgtccctgctgcagaacccccccaccgtgggcgtggccaccctgaagctgacagatgtgcaccccagcgacaccggcacctacctgtgccaggtgaacaaccccccagacttctacaccaacggcctgggcctcatcaacctgactgtgctggtgccccccagcaaccccctgtgcagccagagcggccagacctctgtgggcggcagcacagccctgcgctgcagcagcagcgagggcgcccccaagcctgtgtacaactgggtgcggctgggcaccttccccacccccagccctggctccatggtgcaggatgaggtgtctggccagctgatcctgaccaacctgagcctgaccagcagcggcacctaccgctgtgtggccaccaaccagatgggcagcgccagctgtgagctgaccctgtctgtgacagagcccagccagggccgggtggccggggccctgattggagtgctgctgggcgtgctgctgctgtctgtggccgccttctgcctggtgcgcttccagaaggagcggggcaagaagcccaaggagacctacggcggcagtgacctgagagaagatgccatcgcccctggcatcagcgagcacacctgcatgagagctgacagcagcaagggcttcctggagcggcccagcagcgccagcacagtgaccaccaccaagagcaagctgcccatggtggtgtag

SEQ ID NO: 179119 - DNA, 855 bp, Artificial Sequence
  derived and/or modified sequence
atggccgagctgcccggccccttcctgtgtggggccctgctgggcttcctgtgcctgagcggcctggccgtggaggtgaaggtgcccacagagcccctgagcacccccctgggcaagacagctgagctgacctgcacctacagcacctctgtgggggacagctttgccctggagtggagctttgtgcagcccgggaagcccatcagcgagagccaccccatcctgtacttcaccaacggccacctgtaccccaccggcagcaagagcaagagggtgtccctgctgcagaacccccccaccgtgggcgtggccaccctgaagctgacagatgtgcaccccagcgacaccggcacctacctgtgccaggtgaacaaccccccagacttctacaccaacggcctgggcctcatcaacctgactgtgctggtgccccccagcaaccccctgtgcagccagagcggccagacctctgtgggcggcagcacagccctgcgctgcagcagcagcgagggcgcccccaagcctgtgtacaactgggtgcggctgggcaccttccccacccccagccctggctccatggtgcaggatgaggtgtctggccagctgatcctgaccaacctgagcctgaccagcagcggcacctaccgctgtgtggccaccaaccagatgggcagcgccagctgtgagctgaccctgtctgtgacagagcccagccagggccgggtggccggggccctgattggagtgctgctgggcgtgctgctgctgtctgtggccgccttctgcctggtgcgcttccagaaggagcggggcaagaagcccaaggagacctacggcggcagtgacctgaggtag

SEQ ID NO: 179120 - DNA, 984 bp, Artificial Sequence
  derived and/or modified sequence
atggccgagctgcccggccccttcctgtgcggcgccctgctgggcttcttgtgcctctcagggctggccgtggaggtgaaggtgcccacagaacctctgagtacgcccttgggtaagactgccgaactgacctgcacatactctaccagcgtgggcgacagctttgcacttgagtggtccttcgttcagcctgggaagccaatttccgagtcacaccccatcttgtattttaccaacggacacttataccctaccggctctaaaagcaaacgagtctctctgttgcagaatcctcccacggtcggcgtagccaccctcaagttgaccgacgttcatccaagtgatacggggacgtatctgtgccaagtgaacaatcctcccgatttctacactaatggcttgggcctgatcaatctgaccgtcctggtgcctccttccaatcctctgtgttcccaaagtggccagacaagcgttgggggctccaccgccctccgctgctcctcttctgaaggggccccaaagccagtgtataactgggtgcgtttgggtacctttcctacgcccagccccgggtcaatggttcaggacgaggtgtccggccagctcatactgacaaacctctctctgacctcctctggtacttacaggtgtgtagcaacaaatcaaatgggatctgcttcttgtgagttgaccctgtcagttacagaacccagtcaaggcagggtggcgggcgccttgatcggagttctcctcggagtgttgctgctttccgttgcagccttctgcctcgtgcgctttcagaaggagcgtggcaaaaaaccaaaggagacgtacggggggtcagatctccgagaggatgctatcgccccaggaattagtgagcacacttgtatgagagctgatagttccaaaggcttcttagaacgcccatcctccgcctcaactgtgaccaccaccaaaagtaaactgccgatggtcgtatag

SEQ ID NO: 179121 - DNA, 855 bp, Artificial Sequence
  derived and/or modified sequence
atggccgagctgcccggccccttcctgtgcggcgccctgctgggcttcctttgcctctcagggctcgctgtggaggtcaaagtaccaaccgaacccctgtcaaccccactcggcaaaaccgcagaattgacctgtacctacagtaccagcgtgggcgacagttttgctctcgagtggagcttcgtacagcctgggaaaccaatcagcgagagtcatccaattctgtacttcactaacggccatctatacccaacagggtccaagagtaaaagagttagtctactgcaaaacccccccacagtcggggtggccacccttaaactgaccgacgtgcatcctagcgacacaggtacgtacttgtgtcaggtcaataaccctcctgatttctacacgaatgggcttgggctcatcaatctcacagtgctggtgcccccatccaaccctctttgttctcagtcagggcagacatctgtcggagggtccacggcgctgcgttgttcttcgagcgagggcgcacctaaacccgtgtacaattgggttcggctcgggacttttcccacaccatcccccgggagcatggtgcaggacgaagtaagcggacaactcattctgactaatctctctctgacaagctccggaacctaccgctgtgttgctactaatcaaatgggttccgcttcctgcgagctgaccctgtctgtgaccgaaccatcccagggacgcgtagctggagccctgataggagtcctgctaggggtgctcctcctcagcgtcgccgctttctgccttgttcggtttcaaaaggaaagaggaaaaaagcccaaagaaacctacggaggtagcgacctgcggtag

SEQ ID NO: 179122 - DNA, 984 bp, Artificial Sequence
  derived and/or modified sequence
atggctgaattgcccggtccgtttctctgtggagccttgctgggctttctgtgcttgagcggtctcgccgtggaagtgaaggtccccacggaaccactgtccacaccactggggaaaaccgccgagctcacttgcacctactctacctcggttggcgacagttttgcactggaatggagtttcgtgcagccaggcaagccgatcagcgaatcacatcccatactctacttcactaacggccacctctatcctacagggtcgaaaagtaagcgggtgtccctgctgcaaaacccgcctaccgtgggtgttgccaccttgaaactgacagacgtacaccctagtgacacaggcacttacctgtgccaagtaaataacccaccagacttctatactaacggtctggggctgatcaatctgactgtgctggtcccgccatccaaccctttatgcagccagtccggacagaccagtgtgggagggagcaccgcactcaggtgctcctccagtgaaggtgcgcctaagccagtttataactgggtgaggttaggcacttttcccactccctcacccggttcaatggtccaggatgaggtcagcgggcagctaattctcaccaatctctcgctgacctctagtgggacctacaggtgtgtggccacgaatcagatgggaagcgccagttgtgaattgactctttcggtcacagaacccagtcaaggcagggtcgcgggtgcgctgataggtgttctgcttggagttttactattgtccgtggctgccttttgcttagtgcggtttcagaaagagcggggaaagaaacctaaagagacctacggcggttctgacctgagagaggacgccattgccccagggatctcagagcacacttgcatgcgagccgacagtagcaaagggttcctcgagcgaccctctagtgcatccaccgtaactactacaaaatcaaaattgccaatggttgtctag

SEQ ID NO: 179123 - DNA, 855 bp, Artificial Sequence
  derived and/or modified sequence
atggctgagctgccaggtccatttctgtgtggcgctctgttaggctttctttgtctctcgggcctggctgtggaggtgaaagtgcccactgaacccttatcaactcccctggggaaaactgccgaactcacctgtacctacagcacttctgtgggtgacagcttcgccctcgaatggagcttcgtgcagcccggtaagcctatcagcgagagccatccaattctgtacttcaccaatgggcatttatacccaaccggaagcaagtctaagagggtgtcactgctgcaaaacccacccactgtcggtgttgctacccttaaattaacggatgtgcacccaagcgatacgggaacatacctttgccaggttaacaacccacccgatttctatacaaacggactgggcctcatcaatttgactgtgctagtgcctccctcgaaccctctgtgttctcaaagtgggcagacgagcgtgggcggaagcacggcgcttcggtgttcgtctagtgaaggcgcaccaaagcctgtatacaactgggtccgcctgggaacatttcctactccaagccccggtagcatggtccaggatgaagtcagcggtcagctcatcctaaccaatttgtcactaacatcatctgggacgtataggtgcgtagcaactaatcagatgggcagcgcctcttgcgaactgaccctgagcgtgacagagccctcccagggccgagtcgctggggctttgattggcgtcctgctgggcgtgctactgctgtctgtcgcggctttctgtttggtgcgcttccagaaagagcgaggaaaaaaaccaaaggagacctacggaggatccgacctgcggtag

SEQ ID NO: 179124 - protein, 722 aa, Artificial Sequence
  derived and/or modified sequence
METSDIQIFYQEDPECQNLSENSCPPSEVSDTNLYSPFKPRNYQLELALPAMKGKNTIICAPTGCGKTFVSLLICEHHLKKFPQGQKGKVVFFANQIPVYEQQKSVFSKYFERHGYRVTGISGATAENVPVEQIVENNDIIILTPQILVNNLKKGTIPSLSIFTLMIFDECHNTSKQHPYNMIMFNYLDQKLGGSSGPLPQVIGLTASVGVGDAKNTDEALDYICKLCASLDASVIATVKHNLEELEQVVYKPQKFFRKVESRISDKFKYIIAQLMRDTESLAKRICKDLENLSQIQNREFGTQKYEQWIVTVQKACMVFQMPDKDEESRICKALFLYTSHLRKYNDALIISEHARMKDALDYLKDFFSNVRAAGFDEIEQDLTQRFEEKLQELESVSRDPSNENPKLEDLCFILQEEYHLNPETITILFVKTRALVDALKNWIEGNPKLSFLKPGILTGRGKTNQNTGMTLPAQKCILDAFKASGDHNILIATSVADEGIDIAQCNLVILYEYVGNVIKMIQTRGRGRARGSKCFLLTSNAGVIEKEQINMYKEKMMNDSILRLQTWDEAVFREKILHIQTHEKFIRDSQEKPKPVPDKENKKLLCRKCKALACYTADVRVIEECHYTVLGDAFKECFVSRPHPKPKQFSSFEKRAKIFCARQNCSHDWGIHVKYKTFEIPVIKIESFVVEDIATGVQTLYSKWKDFHFEKIPFDPAEMSK

SEQ ID NO: 179125 - protein, 880 aa, Artificial Sequence
  derived and/or modified sequence
MTTEQRRSLQAFQDYIRKTLDPTYILSYMAPWFREGYSGLYEAIESWDFKKIEKLEEYRLLLKRLQPEFKTRIIPTDIISDLSECLINQECEEILQICSTKGMMAGAEKLVECLLRSDKENWPKTLKLALEKERNKFSELWIVEKGIKDVETEDLEDKMETSDIQIFYQEDPECQNLSENSCPPSEVSDTNLYSPFKPRNYQLELALPAMKGKNTIICAPTGCGKTFVSLLICEHHLKKFPQGQKGKVVFFANQIPVYEQQKSVFSKYFERHGYRVTGISGATAENVPVEQIVENNDIIILTPQILVNNLKKGTIPSLSIFTLMIFDECHNTSKQHPYNMIMFNYLDQKLGGSSGPLPQVIGLTASVGVGDAKNTDEALDYICKLCASLDASVIATVKHNLEELEQVVYKPQKFFRKVESRISDKFKYIIAQLMRDTESLAKRICKDLENLSQIQNREFGTQKYEQWIVTVQKACMVFQMPDKDEESRICKALFLYTSHLRKYNDALIISEHARMKDALDYLKDFFSNVRAAGFDEIEQDLTQRFEEKLQELESVSRDPSNENPKLEDLCFILQEEYHLNPETITILFVKTRALVDALKNWIEGNPKLSFLKPGILTGRGKTNQNTGMTLPAQKCILDAFKASGDHNILIATSVADEGIDIAQCNLVILYEYVGNVIKMIQTRGRGRARGSKCFLLTSNAGVIEKEQINMYKEKMMNDSILRLQTWDEAVFREKILHIQTHEKFIRDSQEKPKPVPDKENKKLLCRKCKALACYTADVRVIEECHYTVLGDAFKECFVSRPHPKPKQFSSFEKRAKIFCARQNCSHDWGIHVKYKTFEIPVIKIESFVVEDIATGVQTLYSKWKDFHFEKIPFDPAEMSK

SEQ ID NO: 179126 - protein, 925 aa, Artificial Sequence
  derived and/or modified sequence
MTTEQRRSLQAFQDYIRKTLDPTYILSYMAPWFREEEVQYIQAEKNNKGPMEAATLFLKFLLELQEEGWFRGFLDALDHAGYSGLYEAIESWDFKKIEKLEEYRLLLKRLQPEFKTRIIPTDIISDLSECLINQECEEILQICSTKGMMAGAEKLVECLLRSDKENWPKTLKLALEKERNKFSELWIVEKGIKDVETEDLEDKMETSDIQIFYQEDPECQNLSENSCPPSEVSDTNLYSPFKPRNYQLELALPAMKGKNTIICAPTGCGKTFVSLLICEHHLKKFPQGQKGKVVFFANQIPVYEQQKSVFSKYFERHGYRVTGISGATAENVPVEQIVENNDIIILTPQILVNNLKKGTIPSLSIFTLMIFDECHNTSKQHPYNMIMFNYLDQKLGGSSGPLPQVIGLTASVGVGDAKNTDEALDYICKLCASLDASVIATVKHNLEELEQVVYKPQKFFRKVESRISDKFKYIIAQLMRDTESLAKRICKDLENLSQIQNREFGTQKYEQWIVTVQKACMVFQMPDKDEESRICKALFLYTSHLRKYNDALIISEHARMKDALDYLKDFFSNVRAAGFDEIEQDLTQRFEEKLQELESVSRDPSNENPKLEDLCFILQEEYHLNPETITILFVKTRALVDALKNWIEGNPKLSFLKPGILTGRGKTNQNTGMTLPAQKCILDAFKASGDHNILIATSVADEGIDIAQCNLVILYEYVGNVIKMIQTRGRGRARGSKCFLLTSNAGVIEKEQINMYKEKMMNDSILRLQTWDEAVFREKILHIQTHEKFIRDSQEKPKPVPDKENKKLLCRKCKALACYTADVRVIEECHYTVLGDAFKECFVSRPHPKPKQFSSFEKRAKIFCARQNCSHDWGIHVKYKTFEIPVIKIESFVVEDIATGVQTLYSKWKDFHFEKIPFDPAEMSK

SEQ ID NO: 179127 - protein, 854 aa, Artificial Sequence
  derived and/or modified sequence
MKVEACTWAGYSGLYEAIESWDFKKIEKLEEYRLLLKRLQPEFKTRIIPTDIISDLSECLINQECEEILQICSTKGMMAGAEKLVECLLRSDKENWPKTLKLALEKERNKFSELWIVEKGIKDVETEDLEDKMETSDIQIFYQEDPECQNLSENSCPPSEVSDTNLYSPFKPRNYQLELALPAMKGKNTIICAPTGCGKTFVSLLICEHHLKKFPQGQKGKVVFFANQIPVYEQQKSVFSKYFERHGYRVTGISGATAENVPVEQIVENNDIIILTPQILVNNLKKGTIPSLSIFTLMIFDECHNTSKQHPYNMIMFNYLDQKLGGSSGPLPQVIGLTASVGVGDAKNTDEALDYICKLCASLDASVIATVKHNLEELEQVVYKPQKFFRKVESRISDKFKYIIAQLMRDTESLAKRICKDLENLSQIQNREFGTQKYEQWIVTVQKACMVFQMPDKDEESRICKALFLYTSHLRKYNDALIISEHARMKDALDYLKDFFSNVRAAGFDEIEQDLTQRFEEKLQELESVSRDPSNENPKLEDLCFILQEEYHLNPETITILFVKTRALVDALKNWIEGNPKLSFLKPGILTGRGKTNQNTGMTLPAQKCILDAFKASGDHNILIATSVADEGIDIAQCNLVILYEYVGNVIKMIQTRGRGRARGSKCFLLTSNAGVIEKEQINMYKEKMMNDSILRLQTWDEAVFREKILHIQTHEKFIRDSQEKPKPVPDKENKKLLCRKCKALACYTADVRVIEECHYTVLGDAFKECFVSRPHPKPKQFSSFEKRAKIFCARQNCSHDWGIHVKYKTFEIPVIKIESFVVEDIATGVQTLYSKWKDFHFEKIPFDPAEMSK

SEQ ID NO: 179128 - protein, 251 aa, Artificial Sequence
  derived and/or modified sequence
MTTEQRRSLQAFQDYIRKTLDPTYILSYMAPWFREEEVQYIQAEKNNKGPMEAATLFLKFLLELQEEGWFRGFLDALDHAGYSGLYEAIESWDFKKIEKLEEYRLLLKRLQPEFKTRIIPTDIISDLSECLINQECEEILQICSTKGMMAGAEKLVECLLRSDKENWPKTLKLALEKERNKFSELWIVEKGIKDVETEDLEDKMETSDIQIFYQEDPECQNLSENSCPPSEVSDTNLYSPFKPIKKKKKKK

SEQ ID NO: 179129 - protein, 536 aa, Artificial Sequence
  derived and/or modified sequence
METSDIQIFYQEDPECQNLSENSCPPSEVSDTNLYSPFKPRNYQLELALPAMKGKNTIICAPTGCGKTFVSLLICEHHLKKFPQGQKGKVVFFANQIPVYEQQKSVFSKYFERHGYRVTGISGATAENVPVEQIVENNDIIILTPQILVNNLKKGTIPSLSIFTLMIFDECHNTSKQHPYNMIMFNYLDQKLGGSSGPLPQVIGLTASVGVGDAKNTDEALDYICKLCASLDASVIATVKHNLEELEQVVYKPQKFFRKVESRISDKFKYIIAQLMRDTESLAKRICKDLENLSQIQNREFGTQKYEQWIVTVQKACMVFQMPDKDEESRICKALFLYTSHLRKYNDALIISEHARMKDALDYLKDFFSNVRAAGFDEIEQDLTQRFEEKLQELESVSRDPSNENPKLEDLCFILQEEYHLNPETITILFVKTRALVDALKNWIEGNPKLSFLKPGILTGRGKTNQNTGMTLPAQKCILDAFKASGDHNILIATSVADEGIDIAQCNLVILYEYVGNVIKMIQTREEEQEVASASF

SEQ ID NO: 179130 - DNA, 2169 bp, Artificial Sequence
  derived and/or modified sequence
atggagaccagcgacatccagatcttctaccaggaggaccccgagtgccagaacctgagcgagaacagctgcccccccagcgaggtgagcgacaccaacctgtacagccccttcaagcccagaaactaccagctggagctggccctgcccgccatgaagggcaagaacaccatcatctgcgcccccaccggctgcggcaagaccttcgtgagcctgctgatctgcgagcaccacctgaagaagttcccccagggccagaagggcaaggtggtgttcttcgccaaccagatccccgtgtacgagcagcagaagagcgtgttcagcaagtacttcgagagacacggctacagagtgaccggcatcagcggcgccaccgccgagaacgtgcccgtggagcagatcgtggagaacaacgacatcatcatcctgaccccccagatcctggtgaacaacctgaagaagggcaccatccccagcctgagcatcttcaccctgatgatcttcgacgagtgccacaacaccagcaagcagcacccctacaacatgatcatgttcaactacctggaccagaagctgggcggcagcagcggccccctgccccaggtgatcggcctgaccgccagcgtgggcgtgggcgacgccaagaacaccgacgaggccctggactacatctgcaagctgtgcgccagcctggacgccagcgtgatcgccaccgtgaagcacaacctggaggagctggagcaggtggtgtacaagccccagaagttcttcagaaaggtggagagcagaatcagcgacaagttcaagtacatcatcgcccagctgatgagagacaccgagagcctggccaagagaatctgcaaggacctggagaacctgagccagatccagaacagagagttcggcacccagaagtacgagcagtggatcgtgaccgtgcagaaggcctgcatggtgttccagatgcccgacaaggacgaggagagcagaatctgcaaggccctgttcctgtacaccagccacctgagaaagtacaacgacgccctgatcatcagcgagcacgccagaatgaaggacgccctggactacctgaaggacttcttcagcaacgtgagagccgccggcttcgacgagatcgagcaggacctgacccagagattcgaggagaagctgcaggagctggagagcgtgagcagagaccccagcaacgagaaccccaagctggaggacctgtgcttcatcctgcaggaggagtaccacctgaaccccgagaccatcaccatcctgttcgtgaagaccagagccctggtggacgccctgaagaactggatcgagggcaaccccaagctgagcttcctgaagcccggcatcctgaccggcagaggcaagaccaaccagaacaccggcatgaccctgcccgcccagaagtgcatcctggacgccttcaaggccagcggcgaccacaacatcctgatcgccaccagcgtggccgacgagggcatcgacatcgcccagtgcaacctggtgatcctgtacgagtacgtgggcaacgtgatcaagatgatccagaccagaggcagaggcagagccagaggcagcaagtgcttcctgctgaccagcaacgccggcgtgatcgagaaggagcagatcaacatgtacaaggagaagatgatgaacgacagcatcctgagactgcagacctgggacgaggccgtgttcagagagaagatcctgcacatccagacccacgagaagttcatcagagacagccaggagaagcccaagcccgtgcccgacaaggagaacaagaagctgctgtgcagaaagtgcaaggccctggcctgctacaccgccgacgtgagagtgatcgaggagtgccactacaccgtgctgggcgacgccttcaaggagtgcttcgtgagcagaccccaccccaagcccaagcagttcagcagcttcgagaagagagccaagatcttctgcgccagacagaactgcagccacgactggggcatccacgtgaagtacaagaccttcgagatccccgtgatcaagatcgagagcttcgtggtggaggacatcgccaccggcgtgcagaccctgtacagcaagtggaaggacttccacttcgagaagatccccttcgaccccgccgagatgagcaagtag

SEQ ID NO: 179131 - DNA, 2643 bp, Artificial Sequence
  derived and/or modified sequence
atgaccaccgagcagagaagaagcctgcaggccttccaggactacatcagaaagaccctggaccccacctacatcctgagctacatggccccctggttcagagagggctacagcggcctgtacgaggccatcgagagctgggacttcaagaagatcgagaagctggaggagtacagactgctgctgaagagactgcagcccgagttcaagaccagaatcatccccaccgacatcatcagcgacctgagcgagtgcctgatcaaccaggagtgcgaggagatcctgcagatctgcagcaccaagggcatgatggccggcgccgagaagctggtggagtgcctgctgagaagcgacaaggagaactggcccaagaccctgaagctggccctggagaaggagagaaacaagttcagcgagctgtggatcgtggagaagggcatcaaggacgtggagaccgaggacctggaggacaagatggagaccagcgacatccagatcttctaccaggaggaccccgagtgccagaacctgagcgagaacagctgcccccccagcgaggtgagcgacaccaacctgtacagccccttcaagcccagaaactaccagctggagctggccctgcccgccatgaagggcaagaacaccatcatctgcgcccccaccggctgcggcaagaccttcgtgagcctgctgatctgcgagcaccacctgaagaagttcccccagggccagaagggcaaggtggtgttcttcgccaaccagatccccgtgtacgagcagcagaagagcgtgttcagcaagtacttcgagagacacggctacagagtgaccggcatcagcggcgccaccgccgagaacgtgcccgtggagcagatcgtggagaacaacgacatcatcatcctgaccccccagatcctggtgaacaacctgaagaagggcaccatccccagcctgagcatcttcaccctgatgatcttcgacgagtgccacaacaccagcaagcagcacccctacaacatgatcatgttcaactacctggaccagaagctgggcggcagcagcggccccctgccccaggtgatcggcctgaccgccagcgtgggcgtgggcgacgccaagaacaccgacgaggccctggactacatctgcaagctgtgcgccagcctggacgccagcgtgatcgccaccgtgaagcacaacctggaggagctggagcaggtggtgtacaagccccagaagttcttcagaaaggtggagagcagaatcagcgacaagttcaagtacatcatcgcccagctgatgagagacaccgagagcctggccaagagaatctgcaaggacctggagaacctgagccagatccagaacagagagttcggcacccagaagtacgagcagtggatcgtgaccgtgcagaaggcctgcatggtgttccagatgcccgacaaggacgaggagagcagaatctgcaaggccctgttcctgtacaccagccacctgagaaagtacaacgacgccctgatcatcagcgagcacgccagaatgaaggacgccctggactacctgaaggacttcttcagcaacgtgagagccgccggcttcgacgagatcgagcaggacctgacccagagattcgaggagaagctgcaggagctggagagcgtgagcagagaccccagcaacgagaaccccaagctggaggacctgtgcttcatcctgcaggaggagtaccacctgaaccccgagaccatcaccatcctgttcgtgaagaccagagccctggtggacgccctgaagaactggatcgagggcaaccccaagctgagcttcctgaagcccggcatcctgaccggcagaggcaagaccaaccagaacaccggcatgaccctgcccgcccagaagtgcatcctggacgccttcaaggccagcggcgaccacaacatcctgatcgccaccagcgtggccgacgagggcatcgacatcgcccagtgcaacctggtgatcctgtacgagtacgtgggcaacgtgatcaagatgatccagaccagaggcagaggcagagccagaggcagcaagtgcttcctgctgaccagcaacgccggcgtgatcgagaaggagcagatcaacatgtacaaggagaagatgatgaacgacagcatcctgagactgcagacctgggacgaggccgtgttcagagagaagatcctgcacatccagacccacgagaagttcatcagagacagccaggagaagcccaagcccgtgcccgacaaggagaacaagaagctgctgtgcagaaagtgcaaggccctggcctgctacaccgccgacgtgagagtgatcgaggagtgccactacaccgtgctgggcgacgccttcaaggagtgcttcgtgagcagaccccaccccaagcccaagcagttcagcagcttcgagaagagagccaagatcttctgcgccagacagaactgcagccacgactggggcatccacgtgaagtacaagaccttcgagatccccgtgatcaagatcgagagcttcgtggtggaggacatcgccaccggcgtgcagaccctgtacagcaagtggaaggacttccacttcgagaagatccccttcgaccccgccgagatgagcaagtag

SEQ ID NO: 179132 - DNA, 2778 bp, Artificial Sequence
  derived and/or modified sequence
atgaccaccgagcagagaagaagcctgcaggccttccaggactacatcagaaagaccctggaccccacctacatcctgagctacatggccccctggttcagagaggaggaggtgcagtacatccaggccgagaagaacaacaagggccccatggaggccgccaccctgttcctgaagttcctgctggagctgcaggaggagggctggttcagaggcttcctggacgccctggaccacgccggctacagcggcctgtacgaggccatcgagagctgggacttcaagaagatcgagaagctggaggagtacagactgctgctgaagagactgcagcccgagttcaagaccagaatcatccccaccgacatcatcagcgacctgagcgagtgcctgatcaaccaggagtgcgaggagatcctgcagatctgcagcaccaagggcatgatggccggcgccgagaagctggtggagtgcctgctgagaagcgacaaggagaactggcccaagaccctgaagctggccctggagaaggagagaaacaagttcagcgagctgtggatcgtggagaagggcatcaaggacgtggagaccgaggacctggaggacaagatggagaccagcgacatccagatcttctaccaggaggaccccgagtgccagaacctgagcgagaacagctgcccccccagcgaggtgagcgacaccaacctgtacagccccttcaagcccagaaactaccagctggagctggccctgcccgccatgaagggcaagaacaccatcatctgcgcccccaccggctgcggcaagaccttcgtgagcctgctgatctgcgagcaccacctgaagaagttcccccagggccagaagggcaaggtggtgttcttcgccaaccagatccccgtgtacgagcagcagaagagcgtgttcagcaagtacttcgagagacacggctacagagtgaccggcatcagcggcgccaccgccgagaacgtgcccgtggagcagatcgtggagaacaacgacatcatcatcctgaccccccagatcctggtgaacaacctgaagaagggcaccatccccagcctgagcatcttcaccctgatgatcttcgacgagtgccacaacaccagcaagcagcacccctacaacatgatcatgttcaactacctggaccagaagctgggcggcagcagcggccccctgccccaggtgatcggcctgaccgccagcgtgggcgtgggcgacgccaagaacaccgacgaggccctggactacatctgcaagctgtgcgccagcctggacgccagcgtgatcgccaccgtgaagcacaacctggaggagctggagcaggtggtgtacaagccccagaagttcttcagaaaggtggagagcagaatcagcgacaagttcaagtacatcatcgcccagctgatgagagacaccgagagcctggccaagagaatctgcaaggacctggagaacctgagccagatccagaacagagagttcggcacccagaagtacgagcagtggatcgtgaccgtgcagaaggcctgcatggtgttccagatgcccgacaaggacgaggagagcagaatctgcaaggccctgttcctgtacaccagccacctgagaaagtacaacgacgccctgatcatcagcgagcacgccagaatgaaggacgccctggactacctgaaggacttcttcagcaacgtgagagccgccggcttcgacgagatcgagcaggacctgacccagagattcgaggagaagctgcaggagctggagagcgtgagcagagaccccagcaacgagaaccccaagctggaggacctgtgcttcatcctgcaggaggagtaccacctgaaccccgagaccatcaccatcctgttcgtgaagaccagagccctggtggacgccctgaagaactggatcgagggcaaccccaagctgagcttcctgaagcccggcatcctgaccggcagaggcaagaccaaccagaacaccggcatgaccctgcccgcccagaagtgcatcctggacgccttcaaggccagcggcgaccacaacatcctgatcgccaccagcgtggccgacgagggcatcgacatcgcccagtgcaacctggtgatcctgtacgagtacgtgggcaacgtgatcaagatgatccagaccagaggcagaggcagagccagaggcagcaagtgcttcctgctgaccagcaacgccggcgtgatcgagaaggagcagatcaacatgtacaaggagaagatgatgaacgacagcatcctgagactgcagacctgggacgaggccgtgttcagagagaagatcctgcacatccagacccacgagaagttcatcagagacagccaggagaagcccaagcccgtgcccgacaaggagaacaagaagctgctgtgcagaaagtgcaaggccctggcctgctacaccgccgacgtgagagtgatcgaggagtgccactacaccgtgctgggcgacgccttcaaggagtgcttcgtgagcagaccccaccccaagcccaagcagttcagcagcttcgagaagagagccaagatcttctgcgccagacagaactgcagccacgactggggcatccacgtgaagtacaagaccttcgagatccccgtgatcaagatcgagagcttcgtggtggaggacatcgccaccggcgtgcagaccctgtacagcaagtggaaggacttccacttcgagaagatccccttcgaccccgccgagatgagcaagtag

SEQ ID NO: 179133 - DNA, 2565 bp, Artificial Sequence
  derived and/or modified sequence
atgaaggtggaggcctgcacctgggccggctacagcggcctgtacgaggccatcgagagctgggacttcaagaagatcgagaagctggaggagtacagactgctgctgaagagactgcagcccgagttcaagaccagaatcatccccaccgacatcatcagcgacctgagcgagtgcctgatcaaccaggagtgcgaggagatcctgcagatctgcagcaccaagggcatgatggccggcgccgagaagctggtggagtgcctgctgagaagcgacaaggagaactggcccaagaccctgaagctggccctggagaaggagagaaacaagttcagcgagctgtggatcgtggagaagggcatcaaggacgtggagaccgaggacctggaggacaagatggagaccagcgacatccagatcttctaccaggaggaccccgagtgccagaacctgagcgagaacagctgcccccccagcgaggtgagcgacaccaacctgtacagccccttcaagcccagaaactaccagctggagctggccctgcccgccatgaagggcaagaacaccatcatctgcgcccccaccggctgcggcaagaccttcgtgagcctgctgatctgcgagcaccacctgaagaagttcccccagggccagaagggcaaggtggtgttcttcgccaaccagatccccgtgtacgagcagcagaagagcgtgttcagcaagtacttcgagagacacggctacagagtgaccggcatcagcggcgccaccgccgagaacgtgcccgtggagcagatcgtggagaacaacgacatcatcatcctgaccccccagatcctggtgaacaacctgaagaagggcaccatccccagcctgagcatcttcaccctgatgatcttcgacgagtgccacaacaccagcaagcagcacccctacaacatgatcatgttcaactacctggaccagaagctgggcggcagcagcggccccctgccccaggtgatcggcctgaccgccagcgtgggcgtgggcgacgccaagaacaccgacgaggccctggactacatctgcaagctgtgcgccagcctggacgccagcgtgatcgccaccgtgaagcacaacctggaggagctggagcaggtggtgtacaagccccagaagttcttcagaaaggtggagagcagaatcagcgacaagttcaagtacatcatcgcccagctgatgagagacaccgagagcctggccaagagaatctgcaaggacctggagaacctgagccagatccagaacagagagttcggcacccagaagtacgagcagtggatcgtgaccgtgcagaaggcctgcatggtgttccagatgcccgacaaggacgaggagagcagaatctgcaaggccctgttcctgtacaccagccacctgagaaagtacaacgacgccctgatcatcagcgagcacgccagaatgaaggacgccctggactacctgaaggacttcttcagcaacgtgagagccgccggcttcgacgagatcgagcaggacctgacccagagattcgaggagaagctgcaggagctggagagcgtgagcagagaccccagcaacgagaaccccaagctggaggacctgtgcttcatcctgcaggaggagtaccacctgaaccccgagaccatcaccatcctgttcgtgaagaccagagccctggtggacgccctgaagaactggatcgagggcaaccccaagctgagcttcctgaagcccggcatcctgaccggcagaggcaagaccaaccagaacaccggcatgaccctgcccgcccagaagtgcatcctggacgccttcaaggccagcggcgaccacaacatcctgatcgccaccagcgtggccgacgagggcatcgacatcgcccagtgcaacctggtgatcctgtacgagtacgtgggcaacgtgatcaagatgatccagaccagaggcagaggcagagccagaggcagcaagtgcttcctgctgaccagcaacgccggcgtgatcgagaaggagcagatcaacatgtacaaggagaagatgatgaacgacagcatcctgagactgcagacctgggacgaggccgtgttcagagagaagatcctgcacatccagacccacgagaagttcatcagagacagccaggagaagcccaagcccgtgcccgacaaggagaacaagaagctgctgtgcagaaagtgcaaggccctggcctgctacaccgccgacgtgagagtgatcgaggagtgccactacaccgtgctgggcgacgccttcaaggagtgcttcgtgagcagaccccaccccaagcccaagcagttcagcagcttcgagaagagagccaagatcttctgcgccagacagaactgcagccacgactggggcatccacgtgaagtacaagaccttcgagatccccgtgatcaagatcgagagcttcgtggtggaggacatcgccaccggcgtgcagaccctgtacagcaagtggaaggacttccacttcgagaagatccccttcgaccccgccgagatgagcaagtag

SEQ ID NO: 179134 - DNA, 756 bp, Artificial Sequence
  derived and/or modified sequence
atgaccaccgagcagagaagaagcctgcaggccttccaggactacatcagaaagaccctggaccccacctacatcctgagctacatggccccctggttcagagaggaggaggtgcagtacatccaggccgagaagaacaacaagggccccatggaggccgccaccctgttcctgaagttcctgctggagctgcaggaggagggctggttcagaggcttcctggacgccctggaccacgccggctacagcggcctgtacgaggccatcgagagctgggacttcaagaagatcgagaagctggaggagtacagactgctgctgaagagactgcagcccgagttcaagaccagaatcatccccaccgacatcatcagcgacctgagcgagtgcctgatcaaccaggagtgcgaggagatcctgcagatctgcagcaccaagggcatgatggccggcgccgagaagctggtggagtgcctgctgagaagcgacaaggagaactggcccaagaccctgaagctggccctggagaaggagagaaacaagttcagcgagctgtggatcgtggagaagggcatcaaggacgtggagaccgaggacctggaggacaagatggagaccagcgacatccagatcttctaccaggaggaccccgagtgccagaacctgagcgagaacagctgcccccccagcgaggtgagcgacaccaacctgtacagccccttcaagcccatcaagaagaagaagaagaagaagtag

SEQ ID NO: 179135 - DNA, 1611 bp, Artificial Sequence
  derived and/or modified sequence
atggagaccagcgacatccagatcttctaccaggaggaccccgagtgccagaacctgagcgagaacagctgcccccccagcgaggtgagcgacaccaacctgtacagccccttcaagcccagaaactaccagctggagctggccctgcccgccatgaagggcaagaacaccatcatctgcgcccccaccggctgcggcaagaccttcgtgagcctgctgatctgcgagcaccacctgaagaagttcccccagggccagaagggcaaggtggtgttcttcgccaaccagatccccgtgtacgagcagcagaagagcgtgttcagcaagtacttcgagagacacggctacagagtgaccggcatcagcggcgccaccgccgagaacgtgcccgtggagcagatcgtggagaacaacgacatcatcatcctgaccccccagatcctggtgaacaacctgaagaagggcaccatccccagcctgagcatcttcaccctgatgatcttcgacgagtgccacaacaccagcaagcagcacccctacaacatgatcatgttcaactacctggaccagaagctgggcggcagcagcggccccctgccccaggtgatcggcctgaccgccagcgtgggcgtgggcgacgccaagaacaccgacgaggccctggactacatctgcaagctgtgcgccagcctggacgccagcgtgatcgccaccgtgaagcacaacctggaggagctggagcaggtggtgtacaagccccagaagttcttcagaaaggtggagagcagaatcagcgacaagttcaagtacatcatcgcccagctgatgagagacaccgagagcctggccaagagaatctgcaaggacctggagaacctgagccagatccagaacagagagttcggcacccagaagtacgagcagtggatcgtgaccgtgcagaaggcctgcatggtgttccagatgcccgacaaggacgaggagagcagaatctgcaaggccctgttcctgtacaccagccacctgagaaagtacaacgacgccctgatcatcagcgagcacgccagaatgaaggacgccctggactacctgaaggacttcttcagcaacgtgagagccgccggcttcgacgagatcgagcaggacctgacccagagattcgaggagaagctgcaggagctggagagcgtgagcagagaccccagcaacgagaaccccaagctggaggacctgtgcttcatcctgcaggaggagtaccacctgaaccccgagaccatcaccatcctgttcgtgaagaccagagccctggtggacgccctgaagaactggatcgagggcaaccccaagctgagcttcctgaagcccggcatcctgaccggcagaggcaagaccaaccagaacaccggcatgaccctgcccgcccagaagtgcatcctggacgccttcaaggccagcggcgaccacaacatcctgatcgccaccagcgtggccgacgagggcatcgacatcgcccagtgcaacctggtgatcctgtacgagtacgtgggcaacgtgatcaagatgatccagaccagagaggaggagcaggaggtggccagcgccagcttctag

SEQ ID NO: 179136 - DNA, 2169 bp, Artificial Sequence
  derived and/or modified sequence
atggagacaagcgatatccagatcttttatcaggaggatccagaatgtcaaaacctgtccgagaactcgtgtcctcctagcgaggttagcgacaccaatctttacagccctttcaagccaagaaactaccagctggaattagcccttccagcgatgaaggggaagaatactattatttgcgcacctacgggttgcggcaaaacttttgtgtcgctgctcatctgcgaacaccaccttaaaaagttcccccagggccagaagggaaaggtcgtcttcttcgccaaccagatcccggtgtacgaacaacagaagtcagtgtttagtaaatattttgagcggcatgggtacagagtcactggaatctcaggtgccacggcggagaacgttcccgttgaacaaattgtggagaacaatgacataatcattctgacccctcagatcttagtcaataacctaaaaaagggaacaatcccatccttaagtatcttcactttgatgatattcgacgaatgccataatacgtcaaagcagcacccatataacatgatcatgttcaattatctcgatcagaagcttggggggagcagtggacctctgccacaggtaataggtctgactgcatctgtgggtgtgggggatgccaagaacacagacgaagccttggattacatctgcaaactctgtgcgtccctcgacgcgtctgtgatcgctacagtcaagcacaatctcgaagagctggagcaagtcgtgtacaagccccaaaaattcttcagaaaggtcgaatctagaatctctgacaaattcaaatatatcatcgcccagctgatgagggataccgagtccctagccaaaagaatatgcaaagacctggagaatctctcccagattcagaatcgagagttcggcacccaaaaatacgagcagtggattgtcacagtccagaaagcctgtatggtgtttcagatgccagataaggatgaggagtccagaatatgcaaagcactcttcctgtatacaagccacctccggaaatataacgatgccctgatcattagcgagcacgctcgaatgaaggacgcgctcgactacttgaaagacttttttagcaatgtccgagcagccggcttcgatgaaattgagcaggatctgacccagcggttcgaagagaagctgcaggaactggaatccgtaagtcgagacccaagcaacgagaaccccaagcttgaagacctgtgtttcatattacaggaagagtaccacctaaaccccgagacgatcacaatcctcttcgtgaaaaccagagccctcgtcgacgcacttaagaattggattgagggcaaccctaaactttcattcttaaaacctggcatcctgactggtagggggaagactaatcagaacaccggaatgaccctgccggcacagaagtgcatcctagacgctttcaaggcctcaggtgatcataacattcttatagctacgtcagtggctgacgagggaatcgatatcgcccagtgcaacctggttatcctgtatgagtacgtgggaaatgtgatcaaaatgatccagaccagaggccgggggagggctcgaggtagcaaatgtttccttctaacgtcaaacgccggagttatagaaaaagagcaaattaatatgtacaaggaaaaaatgatgaatgatagcatactgagactgcagacatgggatgaagcagttttccgcgaaaagatcctccacattcagacacacgagaaatttatcagggatagccaagaaaaacctaaaccagtgccggacaaggaaaataagaagctcttgtgccgcaaatgtaaggccctcgcctgttacaccgccgatgtgagagttatcgaggagtgtcactacactgtgttaggcgatgcatttaaagaatgctttgtcagtcggccacaccctaagcccaagcagttttcctccttcgagaagagggctaagattttctgtgctaggcagaactgctcacatgattggggaatccacgtgaagtacaagactttcgagattcctgtcatcaagatcgaatcgtttgtagtcgaggacattgctaccggggtgcagaccctgtattccaagtggaaagatttccactttgagaagatcccatttgatcctgcagagatgagcaagtag

SEQ ID NO: 179137 - DNA, 2643 bp, Artificial Sequence
  derived and/or modified sequence
atgaccacagagcaaagacgatctctgcaggcattccaggattatattcggaagaccctagatccaacatatatcctaagctacatggctccatggttccgtgaggggtactcaggcctttacgaagccatcgaatcttgggactttaagaaaatagagaagctggaggagtaccgattgctgctgaagcgtctgcagccagaattcaagaccagaatcatccctactgacatcatctctgatttaagcgagtgtctgattaatcaggagtgcgaggagattcttcagatctgttctactaaagggatgatggctggtgctgaaaagcttgttgagtgtctccttagaagtgacaaagagaattggcctaagaccctgaagttagcactagagaaggaacgaaacaaattctcggagttgtggatagtggaaaagggtatcaaagatgtggagacagaggacctggaagacaaaatggagacttctgacattcagatcttctaccaggaggaccctgaatgccagaatttgtcggaaaattcatgtccaccatccgaagtttctgacactaatctgtatagcccgttcaaaccccggaactatcagctcgagctcgcactcccagcaatgaagggaaagaacacaattatttgcgcacctaccggttgcgggaaaacatttgtcagtctgctgatttgtgagcaccacctcaagaagttcccccagggacaaaagggtaaggttgtgttcttcgctaaccagattcctgtgtacgagcagcagaagtcggtcttctcaaaatatttcgagcggcatggctatagggtcacaggcatctcaggcgccaccgctgaaaatgtgcctgtggagcagattgttgaaaacaatgacattattattcttaccccccagattctggtaaacaaccttaaaaagggaaccataccatcgctgagcatttttacattgatgatcttcgacgagtgccacaatacaagcaagcaacatccctacaatatgataatgtttaattatcttgaccagaagttgggaggaagcagcggcccactaccccaggtgatcgggctgaccgcgtccgtgggcgttggggatgccaagaataccgatgaggccttagactatatctgtaagctatgtgcttcattggatgcgagcgtgattgcaacagtcaagcataatctagaggagctggagcaagtcgtgtacaagccgcaaaaatttttccgtaaagtagagagcaggatttcagataagttcaaatatataattgcacagttgatgcgggacacggagagcctcgcgaagagaatctgcaaagacctggaaaatctgtctcagattcaaaaccgtgagtttggcacccagaagtacgagcagtggatcgtgaccgtgcagaaggcatgtatggtatttcaaatgccagataaggatgaagagtctcgtatctgtaaggctctgttcctctacacgtcacacctccgaaagtacaatgacgcccttataatatcagagcacgcaaggatgaaagacgcattagactatctgaaggattttttttcaaacgtgagagccgctgggtttgacgaaatcgagcaagacctaacacaacggtttgaagagaagctccaggaactggagtcggtttcaagggacccatcaaacgaaaatcccaaattagaagatttgtgcttcatcttacaggaggagtaccatcttaatccagagacaattacaatactgttcgtcaaaactagggccctcgtggatgcccttaagaactggattgagggaaaccctaagctcagcttcctcaagccaggaatattgactggtaggggtaaaacaaatcagaacacaggaatgacactccctgctcagaagtgtattttggacgcctttaaagccagtggagaccataacattctgatcgctacttccgtggccgatgagggtatcgatatagctcaatgtaatctcgtcattctgtatgaatacgtgggcaacgtgattaagatgatccaaacacgcggccgtggaagggcccgcgggtccaagtgtttccttctcacatccaatgccggcgtcattgaaaaggaacagataaatatgtacaaggagaaaatgatgaacgactctatcttaagactgcagacctgggatgaggccgttttccgcgagaaaattctccacatccagacccacgagaaatttataagagatagccaagagaaacctaagccggtccctgacaaggagaataaaaagctgctctgtcggaaatgtaaggcactcgcctgttacacagcagacgtccgggtcattgaagaatgccactatacggttctgggcgatgcctttaaggagtgtttcgtgtccaggccccatcctaagcccaaacagttttcatcctttgaaaaaagagcaaaaatcttttgtgcaaggcagaattgctctcatgactggggcatacacgtaaaatataagacttttgagattcccgtgataaagattgaatctttcgtggtggaagacattgctacgggggtccagactctttatagcaaatggaaagacttccattttgagaagattccttttgatccagcagagatgagcaagtag

SEQ ID NO: 179138 - DNA, 2778 bp, Artificial Sequence
  derived and/or modified sequence
atgaccaccgagcagagacggtcactgcaggcttttcaagattacattaggaagacgctcgatcctacttatattctgagttacatggctccttggtttagagaggaggaggtacaatacatccaagccgagaagaacaataaggggcccatggaggcagctacccttttcctcaaattcctgctggagttgcaggaggagggatggttccggggcttccttgacgctttggatcatgccggttattctgggctgtatgaagccattgagagctgggactttaagaagatcgaaaagctggaggagtatcgtctccttctaaagcgtctgcagccagagtttaaaacgcgaataatcccaacagatattatctcagacctatcagaatgcctgatcaaccaggagtgcgaagaaatcctgcagatttgttcaaccaagggaatgatggccggtgcagaaaaactggtcgaatgtttattgcgatcagataaagagaattggccaaagactctcaagctagccctcgagaaagagcggaataaattctcagaattgtggatcgtagaaaagggtatcaaggacgtagagacggaagacctggaggataagatggaaaccagtgacatccagatcttttaccaggaagaccctgagtgccagaacctgagcgagaatagctgccctcccagcgaagtttctgacacaaacctctactccccgtttaaaccccggaattaccagctggaactcgccctgccagcaatgaagggaaagaacacaattatctgtgcaccaaccggctgtggaaagacgttcgtcagcctcttgatctgtgaacaccatctaaagaagtttcctcaaggccagaagggcaaggtggtgtttttcgcaaaccaaatccccgtgtatgaacaacaaaaatcagtcttcagcaaatacttcgaacgccacggttatagagtcacaggaataagtggggctaccgcagagaatgttccagtcgaacagatcgtggagaataatgatatcattatcctgaccccccagattcttgtgaataacttgaagaagggtaccatccccagcctctccatcttcaccttgatgatttttgatgagtgtcataacacgagcaagcagcacccctataatatgataatgtttaactacttggatcagaaactggggggaagctcgggcccactgccacaagtcattggactgaccgcttccgtgggcgtaggcgatgctaaaaacactgatgaagctttggactacatatgtaaattatgtgcttctttagacgcgagtgtcatcgctacagtgaagcataatctggaggaacttgaacaagtcgtttataagccccagaagttttttcggaaggttgaatcccgcattagtgacaaatttaaatatataatcgcccagctcatgcgcgacacagagagtttagcgaaacggatctgtaaggatctggaaaatctctcacaaatacaaaatagggagtttgggactcaaaaatacgagcagtggatcgtgacagtccagaaggcttgcatggtgttccagatgcccgacaaggacgaggaatcgcgcatctgtaaagcattgtttctgtacacgtcacacttgaggaagtacaacgatgccctgattatctcagagcatgcccggatgaaggatgctctggactaccttaaagactttttctcaaatgtgcgcgcagcaggctttgatgaaatcgagcaggacttaacgcaacgctttgaggagaaactgcaggaacttgaaagcgtgagccgcgaccctagtaatgagaacccaaagctagaggatctctgctttattttgcaggaggaatatcacttgaaccccgagactattaccatcctgtttgtgaaaactcgcgccctcgttgacgccttaaagaattggatagaggggaaccccaaactgtccttcctgaagcctggcattctcactgggcgggggaagactaatcagaacactgggatgaccctgccggcccagaaatgtatcttggacgctttcaaagccagcggcgatcacaacatcttaatcgctactagtgtagcagacgagggcatcgacatagcacagtgcaacctggtcatcttatacgagtacgtcggtaacgttatcaaaatgattcagaccaggggccgtggccgggcaagaggctccaagtgttttctcttaactagtaatgccggggtgatagagaaagagcagataaacatgtataaagagaagatgatgaacgactcaatcttgcgccttcagacttgggacgaggcggtctttagggagaaaattttgcacatacaaacacacgagaagtttatacgagacagccaagaaaagcccaaacctgtgcctgacaaggaaaataagaagctgctgtgtaggaaatgtaaggcactggcttgctatactgccgatgtgagggtgatcgaggagtgccattacactgtcctaggcgatgccttcaaagaatgttttgtgtctcggccacacccaaagccaaagcaatttagctcttttgagaagcgggcaaagatattctgcgctcgtcaaaattgctctcacgattggggtatacacgtgaagtacaagaccttcgagattcctgtcataaagatagaatccttcgttgttgaagatattgccaccggggttcagaccctgtacagcaagtggaaagacttccacttcgaaaagatcccgtttgaccccgccgaaatgagtaaatag

SEQ ID NO: 179139 - DNA, 2565 bp, Artificial Sequence
  derived and/or modified sequence
atgaaagtggaggcatgtacatgggctggatatagtggcctatatgaggctatcgaatcttgggacttcaaaaaaatcgagaaactcgaggaataccggttgttgctgaagagactgcaaccagaattcaaaacaagaataatcccaaccgacattatttctgacctgtcggagtgcttgattaatcaggaatgcgaagagatactgcaaatctgttccaccaagggtatgatggctggtgcggagaaactggtagagtgcctgttaagatcagataaagaaaactggcctaagaccctcaaactggcgcttgaaaaggaaagaaataagttctctgagctgtggattgtcgagaagggtatcaaggacgtggaaaccgaagacttggaagataaaatggaaactagtgatattcagatcttttaccaagaagatccagaatgccaaaatcttagtgaaaattcatgccctccctccgaggtgagtgatacaaacttgtactccccctttaaacctaggaattaccagcttgagctggccctgcccgctatgaaaggcaagaatacaataatttgcgccccgaccgggtgcgggaagaccttcgtgtctctgttgatttgcgagcaccacctcaaaaagttcccacagggacagaaagggaaggttgtcttttttgccaatcagataccggtgtacgagcagcagaagagcgtgttttcaaaatacttcgagagacatggctaccgcgttaccggcatctctggcgccacggccgagaacgtccctgtggagcagatcgttgaaaacaacgatatcatcatcttgacccctcagattctggtaaataatttaaaaaagggaacgattccaagcctgtcaatattcaccttgatgattttcgacgagtgccacaatacaagtaagcagcacccttacaacatgatcatgttcaactatttggaccagaagctgggaggtagcagcggaccactgccacaggtgatagggctgaccgcttccgtcggcgtgggcgacgcaaagaatacagacgaggctctggactacatctgtaagctctgcgcttctctagatgctagcgtgattgctactgtcaaacataacctcgaggagctcgagcaggttgtatacaaacctcagaagttcttccgcaaggttgagagcaggatcagcgataaatttaagtacattatcgcccagctgatgcgcgatacagagtccttggccaagcggatatgcaaagaccttgagaatctgagtcagatacagaaccgggaatttgggacacagaaatatgaacagtggatagtgaccgtccaaaaggcgtgcatggtttttcagatgccagataaagatgaggaaagtcggatatgtaaggcactgtttctttatacctcgcacctgaggaaatataacgacgcactcatcatttctgagcacgctcgaatgaaggacgcacttgattacttaaaagacttcttttccaacgtaagggccgcgggctttgatgagatcgaacaggacctgacccagcgtttcgaggaaaaacttcaggagctagaaagtgtctctcgggacccctccaacgagaaccccaaactggaggacctctgttttatactacaggaggaataccacctgaatccagaaactattaccattctgtttgtgaagacacgagcactcgttgatgcactgaaaaactggatcgaggggaaccccaagttatcctttctcaaaccaggtatcttaacgggtagaggaaagactaatcaaaacactggcatgactctgcccgctcagaagtgtatcctggatgccttcaaggcatctggcgaccataatatcctgatcgcaactagtgtagcagatgaagggattgatatagcacagtgtaatttggtaattctctacgagtacgtcggcaacgtcattaagatgattcagactcgcgggcggggccgagcccgaggttccaaatgttttcttctgacaagtaacgctggagtgatagagaaggagcagattaatatgtacaaagaaaaaatgatgaacgactcgatcctccggttgcagacatgggacgaagctgttttcagagagaagatactccacatccagacgcacgaaaagtttattcgcgattcccaggaaaaacctaagcccgtgccggacaaggagaataagaagttattgtgccggaaatgtaaggccttggcctgctatacagcagatgttagggtcatagaggaatgtcactacaccgtgcttggagacgcgttcaaagagtgctttgttagtagaccccatcctaagcctaaacaatttagctccttcgagaagcgggccaagatattctgcgctaggcagaactgcagccacgactgggggatacatgtcaagtataaaactttcgagatcccggtgataaagatcgagagcttcgttgtggaggacatcgccaccggggttcagaccctgtactccaaatggaaagatttccacttcgagaaaatcccattcgatccggcagaaatgtccaaatag

SEQ ID NO: 179140 - DNA, 756 bp, Artificial Sequence
  derived and/or modified sequence
atgactacagagcagcggcgcagtctgcaggcgttccaagactatataagaaaaacattagatccaacttacatcctgtcatacatggcaccatggttccgagaggaggaggtacagtacattcaggctgagaagaacaacaagggccctatggaagcagccacactctttctgaagttcctgctggagctgcaggaggagggctggttccggggctttcttgatgccctggatcacgccgggtatagtgggttgtacgaagcaatagaatcttgggattttaagaagattgagaagctggaagagtatagactgctccttaagcgtctgcagcctgagtttaaaactagaattatcccgaccgacattatcagcgatctgagcgagtgtttaatcaatcaggagtgtgaggagatactccaaatctgctctacaaagggaatgatggccggtgcagagaagctcgttgaatgtctcttacggtcagataaagaaaattggccaaaaacgttgaaactcgctctggaaaaggaacgtaacaagttctctgagctttggattgtagagaaagggataaaagacgtcgagaccgaggatcttgaggataagatggagacttctgatattcagatcttctaccaggaggaccccgagtgccagaatctgtccgagaatagttgcccacccagcgaagtctccgacaccaatctatactctccttttaaaccaattaaaaaaaagaagaagaagaagtag

SEQ ID NO: 179141 - DNA, 1611 bp, Artificial Sequence
  derived and/or modified sequence
atggagacttcagatattcaaatcttctatcaagaggatcctgaatgtcagaatctgagtgaaaactcctgccccccaagtgaggtgtccgatacaaacctgtactcgccttttaaacccaggaactaccagctggagttggcgcttcctgctatgaagggaaagaacactatcatctgcgccccaacaggctgcgggaaaactttcgtaagtcttttaatatgtgagcatcatctcaagaaattcccgcaaggacaaaaaggcaaagtggtcttctttgcaaaccagatccccgtgtatgagcaacaaaagtcagttttcagtaagtactttgagcggcacggttaccgcgtgacagggatttccggggctacagcagagaacgtgccagtggaacagattgttgaaaataacgacattatcatactcacaccgcagattttggtgaataatcttaaaaaaggcaccattccgtcgctttcaatctttactctgatgatttttgatgaatgtcacaatacatctaagcagcacccctacaatatgattatgttcaattatctcgatcaaaaattaggtggtagctctggtccgctcccgcaagtaataggcctgacagcgagtgttggggtgggagatgctaagaatacggacgaagcccttgactatatttgcaaactgtgtgcctccttagacgcctcagttatcgccactgtaaagcacaacctggaggagcttgaacaggtcgtgtataaaccacaaaagttctttaggaaggtggagtcccgaatctcagacaaattcaagtacatcatcgcccaactgatgcgtgacacagaatctctggccaaaaggatctgtaaagatttggaaaacctatctcaaatacagaatcgcgagttcggtacccagaagtacgagcaatggatcgtaacagtacagaaagcatgcatggtgttccagatgccagacaaggacgaggagtcaaggatctgtaaagcgctctttctttacacctctcatttacgtaaatacaacgacgccctgatcattagcgaacatgcccggatgaaggacgctttggactatctgaaagattttttctctaatgtccgggccgccggttttgacgaaatcgagcaagacctaacgcagcgctttgaagaaaaactgcaggaactggagagtgtcagcagagacccttcaaatgaaaatccaaagctggaagacttatgtttcatactgcaggaggagtaccacctaaacccagagactataactattctcttcgtgaaaacacgcgctctggtcgatgcgctcaagaattggattgaaggaaaccccaagctgtctttcttgaagcccggaatcctgactggaaggggcaaaacgaatcagaatacagggatgacattaccagcccagaagtgtattcttgacgcctttaaggcctctggagaccacaatattttgatcgcaacatctgtagccgatgaaggcatcgacatagcacagtgtaacctcgtcattctgtatgagtacgtcggcaacgtaattaagatgattcaaactcgcgaagaggagcaggaagtggcatcagcctcattctag

SEQ ID NO: 179142 - DNA, 2169 bp, Artificial Sequence
  derived and/or modified sequence
atggagaccagtgacatccagatcttctaccaggaggaccctgagtgccagaacctgtctgagaacagctgccccccatctgaggtgtctgacaccaacctgtacagccccttcaagcccaggaactaccagctggagctggccctgcctgccatgaagggcaagaacaccatcatctgtgcccccaccggctgcggcaagacctttgtgtccctgctgatctgtgagcaccacctgaagaagttcccccagggccagaagggcaaggtggtgttctttgccaaccagatccctgtgtatgagcagcagaagtctgtgttcagcaagtactttgagcggcacggctacagagtgacaggcatcagcggggccacagcagaaaatgtgcctgtggagcagatcgtggagaacaatgacatcatcatcctgaccccccagatcctggtgaacaacctgaagaagggcaccatccccagcctgagcatcttcaccctgatgatctttgatgagtgccacaacaccagcaagcagcacccctacaacatgatcatgttcaactacctggaccagaagctgggcggcagcagcggccccctgccccaggtgattggcctgacagcctctgtgggcgtgggagatgccaagaacacagatgaggccctggactacatctgcaagctgtgtgccagcctggatgccagcgtcatcgccaccgtgaagcacaacctggaggagctggagcaggtggtgtacaagccccagaagttcttcaggaaggtggagagccgcatcagtgacaagttcaagtacatcatcgcccagctgatgagggacacagagagcctggccaagaggatctgcaaggacctggagaacctgagccagatccagaaccgggagtttggcacccagaagtatgagcagtggatcgtgacagtgcagaaggcctgcatggtgttccagatgccagacaaggatgaggagagccgcatctgcaaggccctcttcctgtacaccagccacctgaggaagtacaatgatgccctgatcatcagcgagcacgccaggatgaaggatgccctggactacctgaaggacttcttcagcaatgtgcgggccgccggctttgatgaaattgagcaggacctgacccagagatttgaggagaagctgcaggagctggagagcgtgtcccgggaccccagcaatgaaaaccccaagctggaggacctgtgcttcatcctgcaggaggagtaccacctgaaccctgagaccatcaccatcctgtttgtgaagacccgggccctggtggatgccctgaagaactggattgagggcaaccccaagctgtccttcctgaagccaggcatcctgaccggccggggcaagaccaaccagaacacaggcatgaccctgcctgcccagaagtgcatcctggatgccttcaaggccagcggggaccacaacatcctgattgccacctctgtggctgatgagggcattgatattgcccagtgcaacctggtgatcctgtatgaatatgtgggcaatgtcatcaagatgatccagacccggggccggggccgggcccggggcagcaagtgcttcctgctgaccagcaatgctggggtgattgagaaggagcagatcaacatgtacaaggagaagatgatgaatgacagcatcctgcggctgcagacctgggatgaagctgtgttccgggagaagatcctgcacatccagacccatgagaagttcatccgggacagccaggagaagcccaagcctgtgcctgacaaggagaacaagaagctgctgtgcaggaagtgcaaggccctggcctgctacacagcagatgtgcgggtgattgaggagtgccactacacagtgctgggagatgccttcaaggaatgttttgtgtcccggccccaccccaagcccaagcagttcagcagctttgagaagagggccaagatcttctgtgcccggcagaactgcagccatgactggggcatccacgtgaagtacaagacctttgagatccctgtgatcaagattgagagctttgtggtggaggacatcgccaccggggtgcagaccctgtacagcaagtggaaggacttccactttgagaagatcccctttgatcctgctgagatgagcaagtag

SEQ ID NO: 179143 - DNA, 2643 bp, Artificial Sequence
  derived and/or modified sequence
atgaccacagagcagaggaggagcctgcaggccttccaggactacatcaggaagaccctggaccccacctacatcctgagctacatggccccctggttccgggagggctacagcggcctgtatgaggccatcgagagctgggacttcaagaagattgagaagctggaggagtaccgcctgctgctgaagaggctgcagcctgagttcaagacccgcatcatccccacagacatcatcagtgacctgtctgagtgcctgatcaaccaggagtgtgaggagatcctgcagatctgcagcaccaagggcatgatggccggggctgagaagctggtggagtgcctgctgcggagtgacaaggagaactggcccaagaccctgaagctggccctggagaaggagaggaacaagttcagcgagctgtggatcgtggagaagggcatcaaggatgtggagacagaggacctggaggacaagatggagaccagtgacatccagatcttctaccaggaggaccctgagtgccagaacctgtctgagaacagctgccccccatctgaggtgtctgacaccaacctgtacagccccttcaagcccaggaactaccagctggagctggccctgcctgccatgaagggcaagaacaccatcatctgtgcccccaccggctgcggcaagacctttgtgtccctgctgatctgtgagcaccacctgaagaagttcccccagggccagaagggcaaggtggtgttctttgccaaccagatccctgtgtatgagcagcagaagtctgtgttcagcaagtactttgagcggcacggctacagagtgacaggcatcagcggggccacagcagaaaatgtgcctgtggagcagatcgtggagaacaatgacatcatcatcctgaccccccagatcctggtgaacaacctgaagaagggcaccatccccagcctgagcatcttcaccctgatgatctttgatgagtgccacaacaccagcaagcagcacccctacaacatgatcatgttcaactacctggaccagaagctgggcggcagcagcggccccctgccccaggtgattggcctgacagcctctgtgggcgtgggagatgccaagaacacagatgaggccctggactacatctgcaagctgtgtgccagcctggatgccagcgtcatcgccaccgtgaagcacaacctggaggagctggagcaggtggtgtacaagccccagaagttcttcaggaaggtggagagccgcatcagtgacaagttcaagtacatcatcgcccagctgatgagggacacagagagcctggccaagaggatctgcaaggacctggagaacctgagccagatccagaaccgggagtttggcacccagaagtatgagcagtggatcgtgacagtgcagaaggcctgcatggtgttccagatgccagacaaggatgaggagagccgcatctgcaaggccctcttcctgtacaccagccacctgaggaagtacaatgatgccctgatcatcagcgagcacgccaggatgaaggatgccctggactacctgaaggacttcttcagcaatgtgcgggccgccggctttgatgaaattgagcaggacctgacccagagatttgaggagaagctgcaggagctggagagcgtgtcccgggaccccagcaatgaaaaccccaagctggaggacctgtgcttcatcctgcaggaggagtaccacctgaaccctgagaccatcaccatcctgtttgtgaagacccgggccctggtggatgccctgaagaactggattgagggcaaccccaagctgtccttcctgaagccaggcatcctgaccggccggggcaagaccaaccagaacacaggcatgaccctgcctgcccagaagtgcatcctggatgccttcaaggccagcggggaccacaacatcctgattgccacctctgtggctgatgagggcattgatattgcccagtgcaacctggtgatcctgtatgaatatgtgggcaatgtcatcaagatgatccagacccggggccggggccgggcccggggcagcaagtgcttcctgctgaccagcaatgctggggtgattgagaaggagcagatcaacatgtacaaggagaagatgatgaatgacagcatcctgcggctgcagacctgggatgaagctgtgttccgggagaagatcctgcacatccagacccatgagaagttcatccgggacagccaggagaagcccaagcctgtgcctgacaaggagaacaagaagctgctgtgcaggaagtgcaaggccctggcctgctacacagcagatgtgcgggtgattgaggagtgccactacacagtgctgggagatgccttcaaggaatgttttgtgtcccggccccaccccaagcccaagcagttcagcagctttgagaagagggccaagatcttctgtgcccggcagaactgcagccatgactggggcatccacgtgaagtacaagacctttgagatccctgtgatcaagattgagagctttgtggtggaggacatcgccaccggggtgcagaccctgtacagcaagtggaaggacttccactttgagaagatcccctttgatcctgctgagatgagcaagtag

SEQ ID NO: 179144 - DNA, 2778 bp, Artificial Sequence
  derived and/or modified sequence
atgaccacagagcagaggaggagcctgcaggccttccaggactacatcaggaagaccctggaccccacctacatcctgagctacatggccccctggttccgggaggaggaggtgcagtacatccaggccgagaagaacaacaagggccccatggaggccgccaccctcttcctgaagttcctgctggagctgcaggaggagggctggttccggggcttcctggatgccctggaccacgccggctacagcggcctgtatgaggccattgaatcctgggacttcaagaagattgagaagctggaggagtaccgcctgctgctgaagaggctgcagcctgagttcaagacccgcatcatccccacagacatcatcagtgacctgtctgaatgtctcatcaaccaggagtgtgaggagatcctgcagatctgcagcaccaagggcatgatggccggggctgagaagctggtggagtgcctgctgcggagtgacaaggagaactggcccaagaccctgaagctggccctggagaaggagaggaacaagttcagcgagctgtggatcgtggagaagggcatcaaggatgtggagacagaggacctggaggacaagatggagaccagtgacatccagatcttctaccaggaggaccctgagtgccagaacctgtctgagaacagctgcccccccagcgaggtgtctgacaccaacctgtacagccccttcaagcccaggaactaccagctggagctggccctgcctgccatgaagggcaagaacaccatcatctgtgcccccaccggctgtgggaagacctttgtgtccctgctgatctgtgagcaccacctgaagaagttcccccagggccagaagggcaaggtggtgttctttgccaaccagatccctgtgtatgagcagcagaagagcgtcttcagcaagtactttgaaagacatggctacagagtgacaggcatcagcggggccacagcagaaaatgtgcctgtggagcagatcgtggagaacaatgacatcatcatcctgaccccccagatcctggtgaacaacctgaagaagggcaccatccccagcctgagcatcttcaccctgatgatctttgatgagtgccacaacaccagcaagcagcacccctacaacatgatcatgttcaactacctggaccagaagctgggcggcagcagcggccccctgccccaggtgattggcctgacagcctctgtgggcgtgggagatgccaagaacacagatgaggccctggactacatctgcaagctgtgtgccagcctggatgcctctgtgattgccaccgtgaagcacaacctggaggagctggagcaggtggtgtacaagccccagaagttcttcaggaaggtggagagccgcatcagtgacaagttcaagtacatcatcgcccagctgatgagggacacagagagcctggccaagaggatctgcaaggacctggagaacctgagccagatccagaaccgggagtttggcacccagaagtatgagcagtggatcgtgacagtgcagaaggcctgcatggtgttccagatgccagacaaggatgaggagagccgcatctgcaaggccctcttcctgtacaccagccacctgaggaagtacaatgatgccctgatcatcagcgagcacgccaggatgaaggatgccctggactacctgaaggacttcttcagcaatgtgcgggctgctggctttgatgaaattgagcaggacctgacccagagatttgaggagaagctgcaggagctggagagcgtgtcccgggaccccagcaatgaaaaccccaagctggaggacctgtgcttcatcctgcaggaggagtaccacctgaaccctgagaccatcaccatcctgtttgtgaagacccgggccctggtggatgccctgaagaactggattgagggcaaccccaagctgtccttcctgaagccaggcatcctgaccggccggggcaagaccaaccagaacacaggcatgaccctgcctgcccagaagtgcatcctggatgccttcaaggccagcggggaccacaacatcctgattgccacctctgtggctgatgagggcatcgacatcgcccagtgcaacctggtgatcctgtatgaatatgtgggcaatgtcatcaagatgatccagacccggggccggggccgggcccggggcagcaagtgcttcctgctgaccagcaatgctggggtcatcgagaaggagcagatcaacatgtacaaggagaagatgatgaatgacagcatcctgcggctgcagacctgggatgaggccgtgttccgggagaagatcctgcacatccagacccatgagaagttcatccgggacagccaggagaagcccaagcctgtgcctgacaaggagaacaagaagctgctgtgcaggaagtgcaaggccctggcctgctacacagcagatgtgcgggtcatcgaggagtgccactacacagtgctgggagatgccttcaaggagtgctttgtgtcccggccccaccccaagcccaagcagttcagcagctttgagaagagggccaagatcttctgtgcccggcagaactgcagccatgactggggcatccacgtgaagtacaagacctttgagatccctgtgatcaagattgagagctttgtggtggaggacatcgccactggagtgcagaccctgtacagcaagtggaaggacttccactttgagaagatcccctttgatcctgctgagatgagcaagtag

SEQ ID NO: 179145 - DNA, 4089 bp, Artificial Sequence
  derived and/or modified sequence
acagcctgcggggaacgtagctagctgcaagcagaggccggcatgaccaccgagcagcgacgcagcctgcaagccttccaggattatatccggaagaccctggaccctacctacatcctgagctacatggccccctggtttagggaggaagaggtgcagtatattcaggctgagaaaaacaacaagggcccaatggaggctgccacactttttctcaagttcctgttggagctccaggaggaaggctggttccgtggctttttggatgccctagaccatgcaggttattctggactttatgaagccattgaaagttgggatttcaaaaaaattgaaaagttggaggagtatagattacttttaaaacgtttacaaccagaatttaaaaccagaattatcccaaccgatatcatttctgatctgtctgaatgtttaattaatcaggaatgtgaagaaattctacaggtataaaagatgttgaaacagaagatcttgaggataagatggaaacttctgacatacagattttctaccaagaagatccagaatgccagaatcttagtgagaattcatgtccaccttcagaagtgtctgatacaaacttgtacagcccatttaaaccaagaaattaccaattagagcttgctttgcctgctatgaaaggaaaaaacacaataatatgtgctcctacaggttgtggaaaaacctttgtttcactgcttatatgtgaacatcatcttaaaaaattcccacaaggacaaaaggggaaagttgtcttttttgcgaatcagatcccagtgtatgaacagcagaaatctgtattctcaaaatactttgaaagacatgggtatagagttacaggcatttctggagcaacagctgagaatgtcccagtggaacagattgttgagaacaatgacatcatcattttaactccacagattcttgtgaacaaccttaaaaagggaacgattccatcactatccatctttactttgatgatatttgatgaatgccacaacactagtaaacaacacccgtacaatatgatcatgtttaattatctagatcagaaacttggaggatcttcaggcccactgccccaggtcattgggctgactgcctcggttggtgttggggatgccaaaaacacagatgaagccttggattatatctgcaagctgtgtgcttctcttgatgcgtcagtgatagcaacagtcaaacacaatctggaggaactggagcaagttgtttataagccccagaagtttttcaggaaagtggaatcacggattagcgacaaatttaaatacatcatagctcagctgatgagggacacagagagtctggcaaagagaatctgcaaagacctcgaaaacttatctcaaattcaaaatagggaatttggaacacagaaatatgaacaatggattgttacagttcagaaagcatgcatggtgttccagatgccagacaaagatgaagagagcaggatttgtaaagccctgtttttatacacttcacatttgcggaaatataatgatgccctcattatcagtgagcatgcacgaatgaaagatgctctggattacttgaaagacttcttcagcaatgtccgagcagcaggattcgatgagattgagcaagatcttactcagagatttgaagaaaagctgcaggaactagaaagtgtttccagggatcccagcaatgagaatcctaaacttgaagacctctgcttcatcttacaagaagagtaccacttaaacccagagacaataacaattctctttgtgaaaaccagagcacttgtggacgctttaaaaaattggattgaaggaaatcctaaactcagttttctaaaacctggcatattgactggacgtggcaaaacaaatcagaacacaggaatgaccctcccggcacagaagtgtatattggatgcattcaaagccagtggagatcacaatattctgattgccacctcagttgctgatgaaggcattgacattgcacagtgcaatcttgtcatcctttatgagtatgtgggcaatgtcatcaaaatgatccaaaccagaggcagaggaagagcaagaggtagcaagtgcttccttctgactagtaatgctggtgtaattgaaaaagaacaaataaacatgtacaaagaaaaaatgatgaatgactctattttacgccttcagacatgggacgaagcagtatttagggaaaagattctgcatatacagactcatgaaaaattcatcagagatagtcaagaaaaaccaaaacctgtacctgataaggaaaataaaaaactgctctgcagaaagtgcaaagccttggcatgttacacagctgacgtaagagtgatagaggaatgccattacactgtgcttggagatgcttttaaggaatgctttgtgagtagaccacatcccaagccaaagcagttttcaagttttgaaaaaagagcaaagatattctgtgcccgacagaactgcagccatgactggggaatccatgtgaagtacaagacatttgagattccagttataaaaattgaaagttttgtggtggaggatattgcaactggagttcagacactgtactcgaagtggaaggactttcattttgagaagataccatttgatccagcagaaatgtccaaatgatatcaggtcctcaatcttcagctacagggaatgagtaactttgagtggagaagaaacaaacatagtgggtataatcatggatcgcttgtacccctgtgaaaatatattttttaaaaatatctttagcagtttgtactatattatatatgcaaagcacaaatgagtgaatcacagcactgagtattttgtaggccaacagagctcatagtacttgggaaaaattaaaaagcctcatttctagccttctttttagagtcaactgccaacaaacacacagtaatcactctgtacacactgggatagatgaatgaatggaatgttgggaatttttatctccctttgtctccttaacctactgtaaactggcttttgcccttaacaatctactgaaattgttcttttgaaggttaccagtgactctggttgccaaatccactgggcacttcttaaccttctatttgacctctgcgcatttggccctgttgagcactcttcttgaagctctccctgggcttctctctcttctagttctattctagtctttttttattgagtcctcctctttgctgatcccttccaagggttcaatatatatacatgtatatactgtacatatgtatatgtaactaatatacatacatacaggtatgtatatgtaatggttatatgtactcatgttcctggtgtagcaacgtgtggtatggctacacagagaacatgagaacataaagccatttttatgcttactactaaaagctgtccactgtagagttgctgtatgtagcaatgtgtatccactctacagtggtcagcttttagtagagagcataaaaatgataaaatacttcttgaaaacttagtttactatacatcttgccctattaatatgttctcttaacgtgtgccattgttctctttgaccattttcctataatgatgttgatgttcaacacctggactgaatgtctgttctcagatcccttggatgttacagatgaggcagtctgactgtcctttctacttgaaagattagaatatgtatccaaatggcattcacgtgtcacttagcaaggtttgctgatgcttcaaagagcttagtttgcggtttcctggacgtggaaacaagtatctgagttccctggagatcaacgggatgaggtgttacagctgcctccctcttcatgcaatctggtgagcagtggtgcaggcggggagccagagaaacttgccagttatataacttctctttggcttttcttcatctgtaaaacaaggataatactgaactgtaagggttagtggagagtttttaattaaaagaatgtgtgaaaagtacatgacacagtagttgcttgataatagttactagtagtagtattcttactaagacccaatacaaatggattatttaaaccaa

SEQ ID NO: 179146 - DNA, 4621 bp, Artificial Sequence
  derived and/or modified sequence
tagttattaaagttcctatgcagctccgcctcgcgtccggcctcatttcctcggaaaatccctgctttccccgctcgccacgccctcctcctacccggctttaaagctagtgaggcacagcctgcggggaacgtagctagctgcaagcagaggccggcatgaccaccgagcagcgacgcagcctgcaagccttccaggattatatccggaagaccctggaccctacctacatcctgagctacatggccccctggtttagggagggttattctggactttatgaagccattgaaagttgggatttcaaaaaaattgaaaagttggaggagtatagattacttttaaaacgtttacaaccagaatttaaaaccagaattatcccaaccgatatcatttctgatctgtctgaatgtttaattaatcaggaatgtgaagaaattctacagatttgctctactaaggggatgatggcaggtgcagagaaattggtggaatgccttctcagatcagacaaggaaaactggcccaaaactttgaaacttgctttggagaaagaaaggaacaagttcagtgaactgtggattgtagagaaaggtataaaagatgttgaaacagaagatcttgaggataagatggaaacttctgacatacagattttctaccaagaagatccagaatgccagaatcttagtgagaattcatgtccaccttcagaagtgtctgatacaaacttgtacagcccatttaaaccaagaaattaccaattagagcttgctttgcctgctatgaaaggaaaaaacacaataatatgtgctcctacaggttgtggaaaaacctttgtttcactgcttatatgtgaacatcatcttaaaaaattcccacaaggacaaaaggggaaagttgtcttttttgcgaatcagatcccagtgtatgaacagcagaaatctgtattctcaaaatactttgaaagacatgggtatagagttacaggcatttctggagcaacagctgagaatgtcccagtggaacagattgttgagaacaatgacatcatcattttaactccacagattcttgtgaacaaccttaaaaagggaacgattccatcactatccatctttactttgatgatatttgatgaatgccacaacactagtaaacaacacccgtacaatatgatcatgtttaattatctagatcagaaacttggaggatcttcaggcccactgccccaggtcattgggctgactgcctcggttggtgttggggatgccaaaaacacagatgaagccttggattatatctgcaagctgtgtgcttctcttgatgcgtcagtgatagcaacagtcaaacacaatctggaggaactggagcaagttgtttataagccccagaagtttttcaggaaagtggaatcacggattagcgacaaatttaaatacatcatagctcagctgatgagggacacagagagtctggcaaagagaatctgcaaagacctcgaaaacttatctcaaattcaaaatagggaatttggaacacagaaatatgaacaatggattgttacagttcagaaagcatgcatggtgttccagatgccagacaaagatgaagagagcaggatttgtaaagccctgtttttatacacttcacatttgcggaaatataatgatgccctcattatcagtgagcatgcacgaatgaaagatgctctggattacttgaaagacttcttcagcaatgtccgagcagcaggattcgatgagattgagcaagatcttactcagagatttgaagaaaagctgcaggaactagaaagtgtttccagggatcccagcaatgagaatcctaaacttgaagacctctgcttcatcttacaagaagagtaccacttaaacccagagacaataacaattctctttgtgaaaaccagagcacttgtggacgctttaaaaaattggattgaaggaaatcctaaactcagttttctaaaacctggcatattgactggacgtggcaaaacaaatcagaacacaggaatgaccctcccggcacagaagtgtatattggatgcattcaaagccagtggagatcacaatattctgattgccacctcagttgctgatgaaggcattgacattgcacagtgcaatcttgtcatcctttatgagtatgtgggcaatgtcatcaaaatgatccaaaccagaggcagaggaagagcaagaggtagcaagtgcttccttctgactagtaatgctggtgtaattgaaaaagaacaaataaacatgtacaaagaaaaaatgatgaatgactctattttacgccttcagacatgggacgaagcagtatttagggaaaagattctgcatatacagactcatgaaaaattcatcagagatagtcaagaaaaaccaaaacctgtacctgataaggaaaataaaaaactgctctgcagaaagtgcaaagccttggcatgttacacagctgacgtaagagtgatagaggaatgccattacactgtgcttggagatgcttttaaggaatgctttgtgagtagaccacatcccaagccaaagcagttttcaagttttgaaaaaagagcaaagatattctgtgcccgacagaactgcagccatgactggggaatccatgtgaagtacaagacatttgagattccagttataaaaattgaaagttttgtggtggaggatattgcaactggagttcagacactgtactcgaagtggaaggactttcattttgagaagataccatttgatccagcagaaatgtccaaatgatatcaggtcctcaatcttcagctacagggaatgagtaactttgagtggagaagaaacaaacatagtgggtataatcatggatcgcttgtacccctgtgaaaatatattttttaaaaatatctttagcagtttgtactatattatatatgcaaagcacaaatgagtgaatcacagcactgagtattttgtaggccaacagagctcatagtacttgggaaaaattaaaaagcctcatttctagccttctttttagagtcaactgccaacaaacacacagtaatcactctgtacacactgggatagatgaatgaatggaatgttgggaatttttatctccctttgtctccttaacctactgtaaactggcttttgcccttaacaatctactgaaattgttcttttgaaggttaccagtgactctggttgccaaatccactgggcacttcttaaccttctatttgacctctgcgcatttggccctgttgagcactcttcttgaagctctccctgggcttctctctcttctagttctattctagtctttttttattgagtcctcctctttgctgatcccttccaagggttcaatatatatacatgtatatactgtacatatgtatatgtaactaatatacatacatacaggtatgtatatgtaatggttatatgtactcatgttcctggtgtagcaacgtgtggtatggctacacagagaacatgagaacataaagccatttttatgcttactactaaaagctgtccactgtagagttgctgtatgtagcaatgtgtatccactctacagtggtcagcttttagtagagagcataaaaatgataaaatacttcttgaaaacttagtttactatacatcttgccctattaatatgttctcttaacgtgtgccattgttctctttgaccattttcctataatgatgttgatgttcaacacctggactgaatgtctgttctcagatcccttggatgttacagatgaggcagtctgactgtcctttctacttgaaagattagaatatgtatccaaatggcattcacgtgtcacttagcaaggtttgctgatgcttcaaagagcttagtttgcggtttcctggacgtggaaacaagtatctgagttccctggagatcaacgggatgaggtgttacagctgcctccctcttcatgcaatctggtgagcagtggtgcaggcggggagccagagaaacttgccagttatataacttctctttggcttttcttcatctgtaaaacaaggataatactgaactgtaagggttagtggagagtttttaattaaaagaatgtgtgaaaagtacatgacacagtagttgcttgataatagttactagtagtagtattcttactaagacccaatacaaatggattatttaaaccaagtttatgagttggttttttttcattttctatttgtattttattaagagtgtcttttcttatgtgattttttttaattgctatttgatatggtttggctatatgtccccacccaaatctcatcttgaattataatccccatgtgtcaagggagggacctgacgggaggtgattggatcacgggggcagttgtccccatgctgttcttgggatagtgagttagttctcatgagatctgatggttttataagtgtttgacaattcctcctttacacacactctctctctcatctgctgccatgtaagacttgcctgcttccccttctgccatgattgtaagtttcctgaggcctcctcagccatgtggaactgtgaatctattaagcctcttttctttataaatga

SEQ ID NO: 179147 - DNA, 4353 bp, Artificial Sequence
  derived and/or modified sequence
tagttattaaagttcctatgcagctccgcctcgcgtccggcctcatttcctcggaaaatccctgctttccccgctcgccacgccctcctcctacccggctttaaagctagtgaggcacagcctgcggggaacgtagctagctgcaagcagaggccggcatgaccaccgagcagcgacgcagcctgcaagccttccaggattatatccggaagaccctggaccctacctacatcctgagctacatggccccctggtttagggaggaagaggtgcagtatattcaggctgagaaaaacaacaagggcccaatggaggctgccacactttttctcaagttcctgttggagctccaggaggaaggctggttccgtggctttttggatgccctagaccatgcaggttattctggactttatgaagccattgaaagttgggatttcaaaaaaattgaaaagttggaggagtatagattacttttaaaacgtttacaaccagaatttaaaaccagaattatcccaaccgatatcatttctgatctgtctgaatgtttaattaatcaggaatgtgaagaaattctacagatttgctctactaaggggatgatggcaggtgcagagaaattggtggaatgccttctcagatcagacaaggaaaactggcccaaaactttgaaacttgctttggagaaagaaaggaacaagttcagtgaactgtggattgtagagaaaggtataaaagatgttgaaacagaagatcttgaggataagatggaaacttctgacatacagattttctaccaagaagatccagaatgccagaatcttagtgagaattcatgtccaccttcagaagtgtctgatacaaacttgtacagcccatttaaaccaagaaattaccaattagagcttgctttgcctgctatgaaaggaaaaaacacaataatatgtgctcctacaggttgtggaaaaacctttgtttcactgcttatatgtgaacatcatcttaaaaaattcccacaaggacaaaaggggaaagttgtcttttttgcgaatcagatcccagtgtatgaacagcagaaatctgtattctcaaaatactttgaaagacatgggtatagagttacaggcatttctggagcaacagctgagaatgtcccagtggaacagattgttgagaacaatgacatcatcattttaactccacagattcttgtgaacaaccttaaaaagggaacgattccatcactatccatctttactttgatgatatttgatgaatgccacaacactagtaaacaacacccgtacaatatgatcatgtttaattatctagatcagaaacttggaggatcttcaggcccactgccccaggtcattgggctgactgcctcggttggtgttggggatgccaaaaacacagatgaagccttggattatatctgcaagctgtgtgcttctcttgatgcgtcagtgatagcaacagtcaaacacaatctggaggaactggagcaagttgtttataagccccagaagtttttcaggaaagtggaatcacggattagcgacaaatttaaatacatcatagctcagctgatgagggacacagagagtctggcaaagagaatctgcaaagacctcgaaaacttatctcaaattcaaaatagggaatttggaacacagaaatatgaacaatggattgttacagttcagaaagcatgcatggtgttccagatgccagacaaagatgaagagagcaggatttgtaaagccctgtttttatacacttcacatttgcggaaatataatgatgccctcattatcagtgagcatgcacgaatgaaagatgctctggattacttgaaagacttcttcagcaatgtccgagcagcaggattcgatgagattgagcaagatcttactcagagatttgaagaaaagctgcaggaactagaaagtgtttccagggatcccagcaatgagaatcctaaacttgaagacctctgcttcatcttacaagaagagtaccacttaaacccagagacaataacaattctctttgtgaaaaccagagcacttgtggacgctttaaaaaattggattgaaggaaatcctaaactcagttttctaaaacctggcatattgactggacgtggcaaaacaaatcagaacacaggaatgaccctcccggcacagaagtgtatattggatgcattcaaagccagtggagatcacaatattctgattgccacctcagttgctgatgaaggcattgacattgcacagtgcaatcttgtcatcctttatgagtatgtgggcaatgtcatcaaaatgatccaaaccagaggcagaggaagagcaagaggtagcaagtgcttccttctgactagtaatgctggtgtaattgaaaaagaacaaataaacatgtacaaagaaaaaatgatgaatgactctattttacgccttcagacatgggacgaagcagtatttagggaaaagattctgcatatacagactcatgaaaaattcatcagagatagtcaagaaaaaccaaaacctgtacctgataaggaaaataaaaaactgctctgcagaaagtgcaaagccttggcatgttacacagctgacgtaagagtgatagaggaatgccattacactgtgcttggagatgcttttaaggaatgctttgtgagtagaccacatcccaagccaaagcagttttcaagttttgaaaaaagagcaaagatattctgtgcccgacagaactgcagccatgactggggaatccatgtgaagtacaagacatttgagattccagttataaaaattgaaagttttgtggtggaggatattgcaactggagttcagacactgtactcgaagtggaaggactttcattttgagaagataccatttgatccagcagaaatgtccaaatgatatcaggtcctcaatcttcagctacagggaatgagtaactttgagtggagaagaaacaaacatagtgggtataatcatggatcgcttgtacccctgtgaaaatatattttttaaaaatatctttagcagtttgtactatattatatatgcaaagcacaaatgagtgaatcacagcactgagtattttgtaggccaacagagctcatagtacttgggaaaaattaaaaagcctcatttctagccttctttttagagtcaactgccaacaaacacacagtaatcactctgtacacactgggatagatgaatgaatggaatgttgggaatttttatctccctttgtctccttaacctactgtaaactggcttttgcccttaacaatctactgaaattgttcttttgaaggttaccagtgactctggttgccaaatccactgggcacttcttaaccttctatttgacctctgcgcatttggccctgttgagcactcttcttgaagctctccctgggcttctctctcttctagttctattctagtctttttttattgagtcctcctctttgctgatcccttccaagggttcaatatatatacatgtatatactgtacatatgtatatgtaactaatatacatacatacaggtatgtatatgtaatggttatatgtactcatgttcctggtgtagcaacgtgtggtatggctacacagagaacatgagaacataaagccatttttatgcttactactaaaagctgtccactgtagagttgctgtatgtagcaatgtgtatccactctacagtggtcagcttttagtagagagcataaaaatgataaaatacttcttgaaaacttagtttactatacatcttgccctattaatatgttctcttaacgtgtgccattgttctctttgaccattttcctataatgatgttgatgttcaacacctggactgaatgtctgttctcagatcccttggatgttacagatgaggcagtctgactgtcctttctacttgaaagattagaatatgtatccaaatggcattcacgtgtcacttagcaaggtttgctgatgcttcaaagagcttagtttgcggtttcctggacgtggaaacaagtatctgagttccctggagatcaacgggatgaggtgttacagctgcctccctcttcatgcaatctggtgagcagtggtgcaggcggggagccagagaaacttgccagttatataacttctctttggcttttcttcatctgtaaaacaaggataatactgaactgtaagggttagtggagagtttttaattaaaagaatgtgtgaaaagtacatgacacagtagttgcttgataatagttactagtagtagtattcttactaagacccaatacaaatggattatttaaaccaa

SEQ ID NO: 179148 - DNA, 2565 bp, Artificial Sequence
  derived and/or modified sequence
atgaaggtggaggcctgcacctgggccggctacagcggcctgtatgaggccatcgagagctgggacttcaagaagattgagaagctggaggagtaccgcctgctgctgaagaggctgcagcctgagttcaagacccgcatcatccccacagacatcatcagtgacctgtctgagtgcctgatcaaccaggagtgtgaggagatcctgcagatctgcagcaccaagggcatgatggccggggctgagaagctggtggagtgcctgctgcggagtgacaaggagaactggcccaagaccctgaagctggccctggagaaggagaggaacaagttcagcgagctgtggatcgtggagaagggcatcaaggatgtggagacagaggacctggaggacaagatggagaccagtgacatccagatcttctaccaggaggaccctgagtgccagaacctgtctgagaacagctgccccccatctgaggtgtctgacaccaacctgtacagccccttcaagcccaggaactaccagctggagctggccctgcctgccatgaagggcaagaacaccatcatctgtgcccccaccggctgcggcaagacctttgtgtccctgctgatctgtgagcaccacctgaagaagttcccccagggccagaagggcaaggtggtgttctttgccaaccagatccctgtgtatgagcagcagaagtctgtgttcagcaagtactttgagcggcacggctacagagtgacaggcatcagcggggccacagcagaaaatgtgcctgtggagcagatcgtggagaacaatgacatcatcatcctgaccccccagatcctggtgaacaacctgaagaagggcaccatccccagcctgagcatcttcaccctgatgatctttgatgagtgccacaacaccagcaagcagcacccctacaacatgatcatgttcaactacctggaccagaagctgggcggcagcagcggccccctgccccaggtgattggcctgacagcctctgtgggcgtgggagatgccaagaacacagatgaggccctggactacatctgcaagctgtgtgccagcctggatgccagcgtcatcgccaccgtgaagcacaacctggaggagctggagcaggtggtgtacaagccccagaagttcttcaggaaggtggagagccgcatcagtgacaagttcaagtacatcatcgcccagctgatgagggacacagagagcctggccaagaggatctgcaaggacctggagaacctgagccagatccagaaccgggagtttggcacccagaagtatgagcagtggatcgtgacagtgcagaaggcctgcatggtgttccagatgccagacaaggatgaggagagccgcatctgcaaggccctcttcctgtacaccagccacctgaggaagtacaatgatgccctgatcatcagcgagcacgccaggatgaaggatgccctggactacctgaaggacttcttcagcaatgtgcgggccgccggctttgatgaaattgagcaggacctgacccagagatttgaggagaagctgcaggagctggagagcgtgtcccgggaccccagcaatgaaaaccccaagctggaggacctgtgcttcatcctgcaggaggagtaccacctgaaccctgagaccatcaccatcctgtttgtgaagacccgggccctggtggatgccctgaagaactggattgagggcaaccccaagctgtccttcctgaagccaggcatcctgaccggccggggcaagaccaaccagaacacaggcatgaccctgcctgcccagaagtgcatcctggatgccttcaaggccagcggggaccacaacatcctgattgccacctctgtggctgatgagggcattgatattgcccagtgcaacctggtgatcctgtatgaatatgtgggcaatgtcatcaagatgatccagacccggggccggggccgggcccggggcagcaagtgcttcctgctgaccagcaatgctggggtgattgagaaggagcagatcaacatgtacaaggagaagatgatgaatgacagcatcctgcggctgcagacctgggatgaagctgtgttccgggagaagatcctgcacatccagacccatgagaagttcatccgggacagccaggagaagcccaagcctgtgcctgacaaggagaacaagaagctgctgtgcaggaagtgcaaggccctggcctgctacacagcagatgtgcgggtgattgaggagtgccactacacagtgctgggagatgccttcaaggaatgttttgtgtcccggccccaccccaagcccaagcagttcagcagctttgagaagagggccaagatcttctgtgcccggcagaactgcagccatgactggggcatccacgtgaagtacaagacctttgagatccctgtgatcaagattgagagctttgtggtggaggacatcgccaccggggtgcagaccctgtacagcaagtggaaggacttccactttgagaagatcccctttgatcctgctgagatgagcaagtag

SEQ ID NO: 179149 - DNA, 756 bp, Artificial Sequence
  derived and/or modified sequence
atgaccacagagcagaggaggagcctgcaggccttccaggactacatcaggaagaccctggaccccacctacatcctgagctacatggccccctggttccgggaggaggaggtgcagtacatccaggccgagaagaacaacaagggccccatggaggccgccaccctcttcctgaagttcctgctggagctgcaggaggagggctggttccggggcttcctggatgccctggaccacgccggctacagcggcctgtatgaggccattgaatcctgggacttcaagaagattgagaagctggaggagtaccgcctgctgctgaagaggctgcagcctgagttcaagacccgcatcatccccacagacatcatcagtgacctgtctgaatgtctcatcaaccaggagtgtgaggagatcctgcagatctgcagcaccaagggcatgatggccggggctgagaagctggtggagtgcctgctgcggagtgacaaggagaactggcccaagaccctgaagctggccctggagaaggagaggaacaagttcagcgagctgtggatcgtggagaagggcatcaaggatgtggagacagaggacctggaggacaagatggagaccagtgacatccagatcttctaccaggaggaccctgagtgccagaacctgtctgagaacagctgcccccccagcgaggtgtctgacaccaacctgtacagccccttcaagcccatcaagaagaagaagaagaagaagtag

SEQ ID NO: 179150 - DNA, 1611 bp, Artificial Sequence
  derived and/or modified sequence
atggagaccagtgacatccagatcttctaccaggaggaccctgagtgccagaacctgtctgagaacagctgccccccatctgaggtgtctgacaccaacctgtacagccccttcaagcccaggaactaccagctggagctggccctgcctgccatgaagggcaagaacaccatcatctgtgcccccaccggctgcggcaagacctttgtgtccctgctgatctgtgagcaccacctgaagaagttcccccagggccagaagggcaaggtggtgttctttgccaaccagatccctgtgtatgagcagcagaagtctgtgttcagcaagtactttgagcggcacggctacagagtgacaggcatcagcggggccacagcagaaaatgtgcctgtggagcagatcgtggagaacaatgacatcatcatcctgaccccccagatcctggtgaacaacctgaagaagggcaccatccccagcctgagcatcttcaccctgatgatctttgatgagtgccacaacaccagcaagcagcacccctacaacatgatcatgttcaactacctggaccagaagctgggcggcagcagcggccccctgccccaggtgattggcctgacagcctctgtgggcgtgggagatgccaagaacacagatgaggccctggactacatctgcaagctgtgtgccagcctggatgccagcgtcatcgccaccgtgaagcacaacctggaggagctggagcaggtggtgtacaagccccagaagttcttcaggaaggtggagagccgcatcagtgacaagttcaagtacatcatcgcccagctgatgagggacacagagagcctggccaagaggatctgcaaggacctggagaacctgagccagatccagaaccgggagtttggcacccagaagtatgagcagtggatcgtgacagtgcagaaggcctgcatggtgttccagatgccagacaaggatgaggagagccgcatctgcaaggccctcttcctgtacaccagccacctgaggaagtacaatgatgccctgatcatcagcgagcacgccaggatgaaggatgccctggactacctgaaggacttcttcagcaatgtgcgggccgccggctttgatgaaattgagcaggacctgacccagagatttgaggagaagctgcaggagctggagagcgtgtcccgggaccccagcaatgaaaaccccaagctggaggacctgtgcttcatcctgcaggaggagtaccacctgaaccctgagaccatcaccatcctgtttgtgaagacccgggccctggtggatgccctgaagaactggattgagggcaaccccaagctgtccttcctgaagccaggcatcctgaccggccggggcaagaccaaccagaacacaggcatgaccctgcctgcccagaagtgcatcctggatgccttcaaggccagcggggaccacaacatcctgattgccacctctgtggctgatgagggcattgatattgcccagtgcaacctggtgatcctgtatgaatatgtgggcaatgtcatcaagatgatccagacccgggaggaggagcaggaggtggccagcgccagcttctag

SEQ ID NO: 179151 - DNA, 2169 bp, Artificial Sequence
  derived and/or modified sequence
atggagaccagcgacatccagatcttctaccaggaggaccccgagtgccaaaatttgagcgaaaatagctgccccccatctgaggtcagtgacacgaacctgtattcgcccttcaagccaagaaactatcagctcgaactcgccctgccagcgatgaaaggcaagaacaccatcatctgcgccccgactggctgcggcaagacattcgtgtcccttctgatctgtgaacaccacctcaagaagttccctcagggccaaaaaggtaaagttgtctttttcgcaaaccagatcccggtctatgaacagcaaaaatccgtgttctccaaatactttgagagacatggctatagggtcactgggatctccggcgcgacagcagagaatgttcccgtagagcagatcgtcgagaacaacgatattattatattaaccccccagatcttggtgaataacctaaagaagggcactattccatcgctgagtatatttaccctcatgattttcgatgagtgtcacaatacttcaaaacagcatccttacaatatgatcatgttcaactacttagaccagaaactcggcggaagtagcggtccactcccccaggttattggcctcactgctagcgtcggggtgggggatgcaaagaatactgatgaagcactagattacatctgcaagttatgcgcctctttagatgcctctgttattgccactgtgaagcacaacctagaagagctcgaacaagttgtgtacaaaccccagaagttcttccgtaaggtagagtctcgcatcagcgacaagttcaagtacatcattgctcagctgatgagagatactgagtcccttgctaagaggatttgtaaagaccttgagaacctctctcagattcagaacagagagttcgggacacagaagtacgagcagtggattgtgacagttcaaaaagcttgtatggtgttccagatgcccgacaaagatgaagagtctagaatttgcaaagctttattcctctacacaagccatctccgcaaatacaatgacgcattaattatcagcgaacacgctcggatgaaggatgccctagattatcttaaagactttttcagtaatgtccgcgccgcagggttcgacgagatcgagcaggacctgacccagagatttgaggagaaacttcaggagctggagtcggtgtcccgggacccatccaatgagaacccgaagctggaagatctgtgcttcatactgcaggaggagtaccacttaaatccagagacaatcacaattctctttgtgaagaccagggcgctggttgacgccttgaagaattggatcgagggtaatcctaagctctctttcctgaaacccggaattctcaccggccggggaaaaaccaatcagaacacaggcatgacacttcctgcccagaagtgcatcttagatgccttcaaagcgagcggggatcacaatatccttatcgcaacctctgtcgctgacgagggaatcgatatcgcacagtgcaacttggttattctttatgaatacgtgggaaatgttatcaagatgattcagacacgcggtaggggtagggctcggggctcaaagtgttttttgttgactagtaatgcaggcgtcattgagaaagaacaaattaatatgtacaaagagaaaatgatgaatgactccatcttacggcttcagacttgggatgaagctgttttccgggaaaaaattctgcatatccagacccacgagaagttcatacgggactcgcaggagaagcctaagccagtgcctgacaaagagaacaaaaagctcctatgcaggaaatgtaaagccctggcttgctacactgcagacgtgagggtgatcgaggaatgccactacacagtgctgggcgatgcttttaaggaatgctttgtctctagaccacatcccaagccaaagcaatttagctcttttgagaagcgcgccaaaatcttctgcgccaggcagaactgttcccatgactgggggatccacgtgaagtacaagacttttgagatcccagttataaagattgagagctttgtggttgaagacattgcgacaggggttcaaacattgtacagcaagtggaaggatttccattttgagaaaatcccctttgacccagcagaaatgagtaaatag

SEQ ID NO: 179152 - DNA, 2643 bp, Artificial Sequence
  derived and/or modified sequence
atgaccaccgagcagcggcggagcctgcaggccttccaggactacatccggaagacactcgatccaacatatatcctcagctacatggcaccttggttcagggagggctattcaggactgtatgaggcgatcgagtcctgggactttaaaaagattgagaagctggaagaataccgcctactgttaaagcgactccagccagaatttaaaacccgcatcatccctacggatattatctccgacttgagcgagtgtcttattaaccaggagtgcgaagaaattttacagatctgtagtaccaagggaatgatggccggagccgagaaactggtggagtgcctgctgagaagtgacaaagagaattggcccaaaactcttaagttggccctggaaaaagagcgcaacaagttcagtgaactctggatagtggagaaaggaattaaggacgtggaaaccgaggacttagaggataagatggagaccagtgatattcagatcttttatcaggaggacccggaatgccaaaatctatctgagaattcatgtccaccttctgaggtgtccgacactaacctctatagcccgtttaaaccccgaaattaccagctggaactcgccctaccagcaatgaagggaaaaaacaccattatatgtgcccccacggggtgtggaaagacctttgtatccctgctgatctgtgaacatcatttaaagaaatttccacagggccaaaagggcaaggtggtgttctttgcgaaccagatccccgtttacgagcagcagaaaagcgtgttcagtaaatactttgagcggcacgggtacagggttactggcattagtggcgccaccgctgagaacgtgcccgtagaacagattgtggagaataacgatattataatacttaccccccaaatcctcgtcaataacctgaaaaagggaaccataccaagtctgtccatattcaccctaatgattttcgatgaatgtcacaacacctcaaaacagcatccgtacaacatgattatgtttaattacctcgatcagaagcttggcgggagctctggccctctgccacaggtgattggcctcacagctagtgtcggcgtgggcgatgcaaagaatacagatgaggccctggattatatctgtaagctatgtgcatccttggatgcctcggtgatagccacagtaaaacataacctcgaggaacttgaacaggtagtttacaagccacagaagtttttccggaaagtcgagagcagaatatcagataagttcaaatatataattgcacagctgatgagagacacagagagcctcgccaaacgcatctgcaaagatctcgaaaacctgtcacagattcagaaccgggagttcggcacacaaaaatatgagcagtggatcgtcaccgtgcaaaaggcttgcatggtgtttcagatgccagataaggacgaggaatcacgaatctgtaaggcccttttcctgtacacatcacacctgcgcaaatacaatgacgccctgattatcagcgagcatgcgaggatgaaggacgcactggactacctaaaagacttcttctccaacgtcagggccgctggcttcgacgagatcgagcaggatctgacacagcggttcgaggagaaactacaggaattagaatcggtgagccgtgacccatcaaatgagaatcctaaactcgaagacctctgttttatcctccaggaagagtaccatctgaacccggagacaatcacgattctctttgtcaagacccgcgcgctggtcgatgctctcaaaaactggatcgaaggcaaccctaagctgtcattcctgaaaccaggcatcctaactgggcggggaaaaacaaaccagaatacaggcatgacgctgcccgcgcaaaagtgtatcctcgatgctttcaaggcgagcggtgatcacaatattttaatcgccacctccgtggccgatgagggtatcgacatagcccagtgcaatcttgtgattctgtacgagtatgttgggaacgtgattaagatgatacagacaagaggcaggggcagagcgagaggcagcaaatgtttcctcttaactagcaacgcgggcgtgatcgaaaaggaacaaataaacatgtataaggagaagatgatgaatgattccatactacgcctccaaacttgggacgaagccgtatttcgtgagaagatcttgcacatacaaacccacgagaaatttattcgtgacagtcaagaaaaacccaagccagttccggataaagaaaataagaaacttctctgccgcaaatgcaaggcactagcttgctatacagcggacgttagggtgatcgaagaatgccactacaccgtgcttggagatgcattcaaggaatgctttgtcagtagaccccatccaaagccaaagcaatttagttcctttgagaagagagcaaagattttctgcgcacgccagaattgctcacatgactggggtatccacgttaagtataagaccttcgaaatacctgttataaaaatcgagagttttgtggtggaagacatcgccacaggggtgcaaaccttatactctaaatggaaagactttcactttgaaaaaatccccttcgacccagctgagatgtcaaaatag

SEQ ID NO: 179153 - DNA, 2778 bp, Artificial Sequence
  derived and/or modified sequence
atgaccaccgagcagcggcggagcctgcaggccttccaggactacattaggaagacattggaccctacctacattttgtcatatatggcaccgtggtttcgggaggaggaagtacaatacatccaagctgagaagaataataaaggacccatggaggccgccacactcttcttaaaattcctgctcgaattgcaggaggaaggatggtttcgaggttttctggatgcgctcgatcatgctggctattcaggcctgtatgaagccattgaaagctgggatttcaaaaaaatagagaaactagaggagtataggctactgcttaagcgcctgcagcccgaatttaaaacaagaataattccgacagacattatcagcgatctgagcgagtgcctgattaaccaggaatgcgaggagatccttcagatttgctcaacgaagggtatgatggcaggcgccgagaaactagtggaatgcctcctccgctcggacaaagaaaattggcctaaaacactaaaactcgccttagaaaaagagaggaacaagttttcagagctctggattgtggaaaagggcattaaggatgtcgagacggaggatttagaagataagatggagactagtgacattcagatcttctaccaagaagatccagaatgccaaaacctcagtgaaaattcatgtccaccatcggaagtgagtgatactaatttgtacagcccatttaagcctcggaactatcaactcgagttagctctgccagccatgaagggtaagaatacgatcatatgcgcacctacagggtgtggaaagacgttcgtttcccttttgatatgtgagcaccacctgaaaaagttcccgcagggccaaaaggggaaggtggtattctttgcaaaccaaatacccgtgtacgagcagcagaaatctgtgttctcaaagtattttgagagacatgggtaccgggttacaggcatttctggggctaccgccgagaacgtaccagttgagcagattgtcgagaacaacgacatcatcatactcacaccacaaatcctggtaaacaacctcaagaagggaacaattccctcactaagcatctttacactcatgattttcgacgagtgtcacaatacttccaaacagcacccttacaatatgatcatgtttaactacctagaccagaaattgggaggctcttctggcccactcccccaagtgattgggctgactgcaagtgtgggggtgggtgacgccaagaacaccgacgaagctctggattatatatgcaaactctgtgcctctctggatgccagcgtgatcgccactgtaaagcataatctcgaggaactggagcaggtcgtgtataagcctcagaaatttttcaggaaggtggaatcacgaataagcgacaagttcaagtacatcatcgcccagttgatgcgcgacactgagagcctcgcaaagcggatctgcaaggatttggaaaacctttcccagatacaaaatagagagttcggaactcagaagtacgaacagtggattgtaaccgtgcagaaagcctgcatggtctttcagatgccagacaaggatgaagagtcaagaatttgcaaagccttgttcctttatacatcacacctacgaaaatacaacgatgccctaatcatcagtgaacacgcgaggatgaaagacgcattggattacctcaaggacttcttctctaatgtcagagcagctggattcgacgaaattgagcaggatctgacacagcgttttgaggagaagctacaggaacttgagtcagtgagcagggatcctagtaacgagaatccaaagttggaggacctatgctttatcctccaagaggagtatcacctgaacccagaaaccataacaatacttttcgtcaagactagagccctcgtagatgcactgaagaactggattgagggtaacccaaagctgtctttccttaaacccggtattctgaccggacggggtaagaccaaccagaacacgggaatgaccctccctgcccagaaatgcatccttgacgctttcaaagcatctggggaccataatatattaatagcgaccagcgtcgcagacgaagggattgatatcgctcaatgtaacctcgttatactgtatgagtatgtcggaaatgtaatcaaaatgatccagacgaggggcagaggaagagcccgggggtctaaatgctttctactcacctccaatgctggtgtgatcgagaaagagcagatcaatatgtacaaggagaagatgatgaatgatagcattttgaggctccagacctgggatgaggccgtatttagggaaaaaatactgcatattcaaacccatgagaaattcattagagacagtcaggagaaacccaaacccgtgcccgataaggagaataaaaagctgctatgtcggaaatgtaaagcgctggcctgctacaccgccgatgtccgggtgatagaggagtgccattacacagttttgggagatgcttttaaagaatgctttgtgtctcggccacaccccaagcccaagcagttttcttcttttgagaagagagcaaagatcttttgcgccaggcaaaactgctcccatgactggggtattcacgtcaaatataaaacttttgaaatccctgttattaaaattgagtccttcgtggttgaagacattgctaccggagtgcagacattatattcaaagtggaaagacttccacttcgagaagatccccttcgatccagcagagatgtccaagtag

SEQ ID NO: 179154 - DNA, 2565 bp, Artificial Sequence
  derived and/or modified sequence
atgaaggtggaggcctgcacctgggccggctacagcggcctgtacgaggctattgaaagctgggactttaaaaaaattgagaagctagaggaatatcggttgctgctgaaacgacttcagccggaatttaaaacgcggattatcccaactgacattatcagcgatcttagcgagtgccttatcaaccaggagtgtgaagagatacttcagatctgctcgactaaggggatgatggccggggccgagaagctggtcgagtgtctgcttaggagcgacaaagagaactggcccaaaaccttaaagctcgcattggaaaaagagagaaacaagtttagtgagctgtggatagttgagaagggcatcaaggatgtggagacagaggaccttgaggacaaaatggaaacgagcgatatccagatcttctaccaggaggatccggaatgtcagaatctgagcgagaactcatgtccgccatctgaggtgtcagacaccaatctctattctccatttaaaccgaggaactaccagttggaactagctctgccagcgatgaagggcaagaatactattatttgcgctcctaccggatgcggtaaaacctttgtctctcttctgatatgtgaacaccatctaaagaaattcccacagggtcaaaaaggcaaagtggtattctttgccaaccagattccagtgtatgagcagcagaagagtgtctttagtaaatacttcgaacgccacggttatagagtcaccggtatatctggggcgacggctgagaacgtaccagtggaacagatagtggagaataatgatatcataatcctgaccccccagatactggttaacaacttaaagaagggaacaatcccatccttatccatttttaccctcatgatatttgacgagtgtcacaatacaagcaaacaacacccttataacatgatcatgttcaactacctagatcaaaagctaggcgggagcagcgggccacttccccaggtgatcggactgacagcctctgtaggtgttggggatgctaaaaatacagatgaggccctggactacatctgtaagttatgcgcatcccttgacgcgagtgtgatcgccacagtgaagcacaatcttgaggagttagagcaagtggtgtataagcctcagaagttctttcggaaagtggagagccggatctccgataaattcaagtatatcattgctcagctcatgcgagacaccgagagcctggcaaaaaggatctgcaaggatttagagaacttgtctcaaattcagaacagggagtttggcacccagaagtatgagcagtggattgtgacagtccagaaagcctgcatggtatttcagatgcctgacaaggacgaagaatctcgaatttgcaaagcactcttcctctatacatcccacctgagaaaatataacgatgctctgattatcagcgaacacgcccgcatgaaagatgcattggactaccttaaagacttcttctccaacgtgcgcgctgctgggttcgatgagatagagcaggacctgacccaacggtttgaagagaagcttcaggagctcgagagcgtttctcgggacccctcaaatgagaatccaaaactcgaagatctctgcttcatcctgcaggaagagtatcacctgaatcctgagacgattaccattctgtttgtgaaaactcgggccttagtagacgccctcaaaaattggatcgaggggaacccgaagttaagcttcctcaagcccggcatcctgacgggacgtggaaagacaaaccaaaacaccggaatgacgctcccagcccaaaagtgtatcctggacgcgtttaaggcaagcggtgaccataatattctgattgcgacctcggtcgccgacgagggtatcgacatagctcagtgcaatctcgttatattgtacgagtacgtcggcaatgtgattaaaatgattcaaacccggggacgagggcgggcacggggctcgaaatgttttcttttgacttccaacgctggagtgattgagaaggagcagataaacatgtataaggagaaaatgatgaatgattctatcctcagactccagacttgggatgaggcggtgttcagggagaagattctgcacatccaaacccacgagaagttcatcagagacagccaagagaaaccgaagcctgtgcccgataaggaaaataagaagctgctttgtaggaaatgcaaggcattagcgtgttacaccgcagatgttcgggttattgaagagtgtcattacacagtgcttggcgatgccttcaaagaatgtttcgtttctcgtccacaccccaagcctaaacaattctcgtcctttgagaagcgcgctaaaatcttctgtgcccgacagaattgttctcacgattggggaatacacgtcaaatataaaacatttgaaattcccgtgatcaaaatcgagtcttttgtggtcgaagacattgctacaggggtccaaacattgtacagtaagtggaaagatttccactttgaaaaaatccctttcgacccagctgaaatgtcaaagtag

SEQ ID NO: 179155 - DNA, 756 bp, Artificial Sequence
  derived and/or modified sequence
atgaccaccgagcagcggcggagcctgcaggccttccaggactacataagaaagaccctcgacccaacttatattctgtcctatatggcaccatggttcagagaagaagaagtgcagtatatacaggctgaaaagaataataaaggacccatggaagcagccaccctgttcctgaagttcctcctagaactccaagaagagggatggttcagaggctttctggatgccttggaccacgcgggatattccggtctttatgaggccattgaatcatgggatttcaagaagatcgagaaacttgaagagtatagactgctgctcaaaagactgcagcccgaattcaagactagaatcatcccaaccgacataatcagcgacctttccgagtgcctgattaaccaggaatgtgaggagatcctgcagatatgtagcacaaagggtatgatggccggtgcggagaaactcgtggagtgcttattacgatcagacaaggagaattggcccaaaacactgaagctggcactggagaaggaacgcaataagttctccgagttatggatcgtggagaaaggcataaaagatgtcgaaacggaagatttggaagacaaaatggagacttctgacatccaaattttttatcaggaagaccctgaatgtcagaacctgtcagagaactcatgcccaccttctgaggtgtccgatactaatttatatagcccatttaagcccatcaagaaaaaaaaaaagaaaaagtag

SEQ ID NO: 179156 - DNA, 1611 bp, Artificial Sequence
  derived and/or modified sequence
atggagaccagcgacatccagatcttctaccaggaggaccccgagtgccagaacctgtccgagaattcatgcccaccttccgaggtcagcgacaccaatttgtactcccctttcaaaccgcgaaactatcagctggaacttgccctgccagctatgaaagggaaaaatactatcatatgtgctcctacggggtgtggtaagacctttgtatcactcctcatctgtgagcaccatctcaaaaaatttccgcaagggcaaaaggggaaggtcgttttttttgccaaccagattccagtgtacgagcaacaaaagtccgtgttcagcaagtacttcgaacgccatgggtaccgcgtcacagggattagtggggcaaccgcagaaaatgttcccgtggagcagatcgtggagaataatgacatcataattttgacaccccaaatcttggtaaataatctgaagaaaggcaccatcccctccctgtccatattcacccttatgatattcgacgaatgtcacaatacctccaagcagcacccttataacatgattatgttcaactatttggatcaaaagcttggaggtagttccggacctctgccacaggtgatcggactcaccgccagcgttggagttggggatgccaaaaataccgatgaagctctggactatatttgcaagttgtgtgcttccctggacgcatcagtgattgccaccgtgaagcataatctggaggagttggagcaggtggtgtacaagccccaaaagtttttccggaaggtggaaagtcgaatcagcgataaatttaagtatataatcgcccagctgatgagagatactgaatctctggccaaacggatttgcaaagatctggagaacctctcccagattcagaaccgcgaattcgggacacagaaatacgaacagtggattgtgacggtgcagaaggcgtgtatggtattccaaatgccagacaaggatgaagagtctcggatatgtaaggcgctgttcctttatacatcccatcttcgcaagtataacgatgccttgatcataagcgagcacgcacgcatgaaggacgccctcgattatcttaaggatttcttttcaaacgtgcgagctgcaggattcgacgagattgagcaagacctcactcagcgtttcgaagagaagctccaggagttggaatccgtgtctagagatcccagcaacgagaatcctaagctggaggacttatgctttatactccaggaggaataccatttaaaccccgaaacaattaccatcctttttgttaaaactagggcactcgtggatgcactgaagaactggattgagggaaacccaaaactgtcgtttctgaaaccaggtatcctgactggcagggggaagactaatcagaacactgggatgactctgccagcccagaagtgcattctcgacgctttcaaagctagcggtgaccacaatatattaatagcaacctctgtggcagacgaagggatagacattgcccagtgcaatctcgtgattctgtatgaatacgtgggcaatgtaattaagatgatacaaacgagagaggaggaacaggaggtcgcttctgcatctttctag

SEQ ID NO: 179157 - DNA, 2169 bp, Artificial Sequence
  derived and/or modified sequence
atggaaacatccgatatccagatattctatcaggaagatcccgagtgtcagaatctctcagagaacagttgccccccatcagaggtctccgataccaacctgtatagtccttttaaaccccgaaactatcagctcgagctggccctgcccgcaatgaaaggcaagaatactattatatgcgcccctacaggctgcgggaaaactttcgtttcactgctgatctgcgagcatcacctgaagaagttcccccaaggtcagaaaggtaaggtagtctttttcgcaaaccaaattcctgtatatgaacagcagaagtctgtgttcagtaagtactttgagcggcacggttacagagtcacaggaattagcggtgcaactgccgaaaacgtgcctgttgagcagattgttgagaataatgatattatcatcctgacaccccagatcctggtgaacaatctgaagaaagggaccatccccagtctcagcatctttactctgatgatctttgatgagtgtcataacacctccaagcaacatccttataatatgattatgttcaactacttagatcagaagttgggtggctcttcaggacccttgccccaggtgattggactaacagcaagcgtaggcgtcggggatgcaaagaacaccgacgaggccctggactacatctgcaagctctgcgcttccctggatgcaagcgtaatagcaacagttaaacacaaccttgaggagttggaacaggtcgtgtacaagcctcagaagttttttcgcaaggtcgagtctaggattagcgacaagttcaagtatattattgcacagctcatgagagacacggagtctctggcaaaaagaatttgcaaggatcttgagaatttatcccagatccagaatcgcgagtttggcacacagaagtacgagcagtggatcgttactgtccagaaggcatgcatggtttttcagatgccagataaagacgaagagtcccgcatttgcaaggccctgtttctttatacttcacacttgcgtaagtacaacgacgctctcatcattagtgaacacgcaaggatgaaggacgcattagattaccttaaagactttttctctaacgttcgcgctgcaggttttgacgaaatcgaacaggacctgactcagcgcttcgaggaaaaactgcaggagcttgaatctgtgagccgcgaccctagtaacgagaacccgaaactggaagacctgtgttttatactgcaagaagagtaccacctgaacccagagacaatcactattctctttgttaaaacgcgagccctcgtggatgctttgaaaaattggatcgagggcaatcccaaactaagtttcctgaagccaggaatcctcaccggcaggggaaagactaatcaaaatacggggatgaccttgcccgctcaaaagtgcattctcgatgcattcaaggcgtcaggggaccataatatcctcatcgcaacgagtgtggccgatgagggaattgatattgcacagtgtaacctcgtgattctgtatgaatacgtcggtaacgtcatcaagatgatacagacccgcggaaggggtagagccaggggcagcaaatgtttcttactcacaagcaacgcaggagttatcgaaaaggagcagattaacatgtataaggaaaaaatgatgaacgatagcatcctgcggctgcagacttgggatgaagcggttttcagggagaagatactgcatatccagacacacgaaaaattcattcgcgactctcaggagaagcccaagcccgtacccgacaaagagaacaagaagttgctgtgtcggaagtgtaaggctctcgcatgttacaccgccgacgtccgcgtcatcgaggaatgccattacacagtgcttggggacgcctttaaagagtgcttcgtaagccgtccacatcctaaacctaaacagttctcgagttttgaaaagcgggcaaaaatcttttgtgcccgacagaactgtagccatgattgggggatccacgtgaagtataagacttttgagatccctgttatcaagatcgaatcttttgtggtggaggatatagccaccggcgtgcaaacgctgtatagtaagtggaaggacttccacttcgagaagattccgtttgaccctgccgagatgagtaagtag

SEQ ID NO: 179158 - DNA, 2643 bp, Artificial Sequence
  derived and/or modified sequence
atgacaacagagcagagacgctccctgcaagcttttcaagattacatacggaaaactctcgatccaacatacatactgagctacatggcgccatggttcagagagggctacagtggactgtatgaggcgatcgagagctgggatttcaaaaagattgagaagctggaggagtaccgtctactcttgaaacggttgcagccagagtttaagacacggataatacccacggacatcatctcggacctctccgagtgcctgatcaatcaggagtgcgaggaaatcctccaaatctgttccaccaagggtatgatggctggcgctgagaagttggtggaatgcctgctaaggtcagacaaggagaattggcccaaaacactaaaactggcacttgaaaaggaacgcaataaattctcggagttatggatcgtggaaaagggcatcaaagatgtcgaaaccgaggatctggaggacaaaatggaaacatccgacatccagattttttatcaagaggatcctgagtgtcagaacctgtccgaaaattcctgccctccctcagaagtgtccgacaccaacctttatagcccatttaagcctaggaactatcagctagagcttgcgctgcctgccatgaaagggaaaaatacaatcatctgtgctccaaccgggtgcggcaagaccttcgtgagcctgttaatctgcgagcaccacctgaaaaagtttcctcagggtcaaaaaggtaaagtggtgttctttgccaaccaaattccagtatacgaacagcagaagtctgtgttcagtaagtactttgaacgccatggatatcgcgtcaccggtataagcggggcaaccgccgaaaacgtacccgtcgagcagatagtggagaataacgatatcatcatactcacaccgcagatattagtcaacaatttaaaaaagggcaccattcccagcctgtcgatatttacactaatgatctttgacgagtgtcacaatacttctaagcaacatccctacaatatgataatgttcaattacctggaccagaagttagggggaagtagtggccctcttccgcaggtgataggcctgacagctagcgtcggagtaggcgacgccaagaacacagatgaagccctggattacatatgtaaactttgcgccagtctcgacgcttccgtgattgccacagtaaagcataatctggaagaactggagcaagtagtatacaaaccacagaaattcttccggaaagtggaatctcgcatcagcgacaaatttaagtatatcatagcccagctgatgagggatacagagtctctcgcaaagcgaatctgcaaagatctggaaaatctgtcacaaatacagaatcgcgaatttggcacccaaaagtatgaacagtggatagtgaccgttcagaaggcctgcatggtattccaaatgccagacaaggacgaagagtcccggatttgcaaagctctcttcctgtatacctctcatttgcgcaaatacaacgatgcgctgatcatctccgaacacgctcggatgaaagacgcccttgactatttgaaagactttttttccaacgttcgggcagcgggattcgatgaaatcgaacaggatctcacacagaggtttgaggagaagctgcaagaactggaatctgtgtctcgtgatccaagcaacgaaaacccaaaactggaggatttgtgttttatactgcaagaagagtatcatcttaatcccgaaaccatcaccatcttgtttgtgaagacccgagcactcgtcgatgcactgaaaaattggattgagggaaatccaaagctgtccttcttgaaacccggaatcctaactggaagaggcaagaccaatcagaacactggcatgacccttcctgcccagaagtgcattcttgacgcgtttaaagctagcggcgatcataacatcctgatcgcaacgagcgtggcagacgaggggatagatattgcacagtgtaatctcgtcattctgtatgagtacgtaggcaacgtcattaagatgattcagacacggggacgcggtcgggcacgagggtctaaatgctttctgctcacgtcaaacgctggcgtaatagaaaaggaacagattaatatgtataaggaaaaaatgatgaacgatagcattctaagattacagacctgggatgaggctgtcttccgtgaaaagatacttcatattcaaacccacgagaagttcatacgcgactctcaagagaaacccaagccggtgcctgacaaagagaataaaaagttactgtgtcgcaaatgcaaggccctggcatgctatacagcagatgttcgagtgattgaagaatgccattatactgtcctgggagatgcatttaaagagtgcttcgtttctcgccctcatcctaaaccaaaacagttctctagtttcgaaaagagagcaaaaatcttttgcgcacggcagaattgctcacacgactgggggatccatgtgaagtataagacctttgagatccctgtaataaaaattgaatcatttgtggtggaggacatagccaccggggtccagaccctgtattccaaatggaaggactttcattttgaaaagattcctttcgaccctgccgaaatgtcaaagtag

SEQ ID NO: 179159 - DNA, 2778 bp, Artificial Sequence
  derived and/or modified sequence
atgaccaccgagcagcgcagaagcctgcaagcgttccaagactatatccgcaagaccttggaccctacttacattctgtcatatatggccccttggttccgcgaggaggaggtccagtacattcaggctgagaaaaacaataagggcccaatggaagcggcaactctttttctgaagttccttttagaactgcaggaagagggctggttcagagggttccttgacgccctggaccatgccggttattctggattatacgaggctattgaatcatgggacttcaagaaaatcgaaaaactcgaagagtacagactcctgcttaaacgattgcagcccgaattcaagacaagaatcatacccactgatattatctcagacctgtcagagtgtttgattaaccaggagtgcgaagaaattctgcagatctgctcaacgaagggtatgatggctggggcagagaagctggtcgagtgccttctccgaagcgataaagagaattggccaaagaccctgaagctggccctagaaaaagaacggaacaaattttccgaactctggattgtcgaaaaaggtatcaaggatgtggagaccgaggatttggaggacaagatggagacatccgatatacaaattttttaccaggaggacccagaatgccagaacctttctgaaaacagttgccctccaagcgaggtgtccgacacaaatctgtacagtccattcaaaccaagaaactatcagctggagctggcccttcccgcaatgaaggggaagaatacaatcatctgcgcccctaccggatgtggaaagacattcgtgtctttactgatctgtgagcatcacctaaaaaaattccctcaggggcaaaaggggaaggtggtctttttcgccaatcagatcccagtctacgagcagcaaaaaagcgtgttctccaaatatttcgagcgccacggttatcgtgtgaccggcattagtggtgcaactgctgagaacgtgccagtggagcagatcgtcgaaaataacgatatcatcattcttaccccccagattctggttaacaatttgaagaagggcaccattcccagtcttagtatcttcactctgatgatcttcgacgagtgccacaatacttcaaaacagcatccttacaatatgattatgtttaattaccttgaccaaaagctcggtgggtcatccgggccactcccgcaggtgatcggattgactgctagcgtcggtgtcggagacgccaagaatacagacgaagccctcgactatatttgtaagctgtgcgcttctctggatgcctctgtcattgccacagtgaaacataacctggaagagttagaacaagtggtctacaagccgcagaaattttttcgtaaagtcgagtccaggatcagtgacaagttcaagtacatcatcgcacaactgatgcgtgataccgagagtctagcaaagcgcatctgcaaggatctggagaacctaagccagatccagaatagagaatttggcacacagaagtacgaacagtggattgtgactgtgcagaaagcgtgtatggtctttcagatgcccgacaaagacgaggagagccgcatttgtaaggcactctttctatacacctctcacctccgtaaatataacgatgcactgattatcagtgagcacgccaggatgaaggacgctctcgattatttaaaggactttttttctaatgtgcgggctgctgggttcgacgagatcgaacaggatctgacccagcgcttcgaggagaaactgcaggagcttgagtccgtcagtcgagatccatcaaacgaaaatcctaagttagaggatctatgcttcattctccaggaggaataccacttgaatccagagacgataaccattctcttcgtcaaaacgagagcactggtcgatgctctcaagaactggatcgagggcaatcccaaattgtcattcctgaagccgggaattctcaccggcagaggaaagacaaaccagaataccggcatgacactaccagcccagaaatgtatactcgatgcctttaaggcctctggcgatcacaacatacttatagctacaagcgtggctgatgaggggatcgatatcgcccaatgcaatcttgtgatcctgtatgagtatgtgggcaacgtgataaaaatgatccagacacgcggacggggaagagccaggggatccaaatgcttcctgctgactagtaatgccggagttatcgagaaggaacagatcaacatgtacaaggagaaaatgatgaatgacagcattttgagactccaaacatgggacgaggcagtgtttcgtgaaaagatactgcacatacaaactcacgaaaagttcatccgggactctcaggaaaagcctaagcctgtcccagataaggaaaataaaaagctgctctgcaggaaatgtaaagcactcgcgtgctacacagcggacgtcagagtgatcgaagagtgccattacactgttctgggagacgcctttaaggaatgcttcgtcagcagaccacatcccaaaccgaaacaattctctagcttcgaaaaaagggcgaaaatattctgcgcacgccagaactgcagccacgactggggcattcacgtgaaatacaagacattcgagatccccgtcatcaagatcgaatcctttgtggtcgaggacattgccactggggtacagaccttatactcgaagtggaaagactttcattttgagaaaatccctttcgaccctgctgagatgtctaaatag

SEQ ID NO: 179160 - DNA, 2565 bp, Artificial Sequence
  derived and/or modified sequence
atgaaggtcgaagcctgtacttgggccggatactcaggcctatacgaggcaatcgaatcttgggatttcaaaaaaatcgagaaactcgaggaatataggctgctactcaagagactgcaacctgagttcaagacccgcatcattcctaccgacatcatctcagatctgtccgaatgcctgatcaaccaagagtgcgaagaaatactccaaatttgttctacaaaggggatgatggcaggagccgaaaagttagtggagtgcctgcttcgatccgacaaagagaattggccaaaaaccctgaagctggccctggagaaagaacgaaataagttttctgagctatggatagtagagaagggcatcaaggatgtggagacggaggacctcgaggataaaatggaaacgagtgatatccagattttttatcaagaggaccctgagtgtcagaaccttagcgaaaattcctgtcctccatccgaagttagcgatacgaacctctactcccccttcaaaccgaggaattatcagttagaactggctctaccagccatgaagggcaaaaacacaattatttgtgcccctacaggctgtggaaagacattcgttagtctactcatttgtgagcatcatctaaaaaagttcccacaaggtcagaaggggaaggtggtctttttcgcaaatcaaattcccgtttacgagcagcaaaagagtgtcttcagcaaatattttgaaaggcacgggtatcgggtcacaggcattagtggagccacagctgagaatgtgccagtcgagcagatcgtcgagaacaatgacatcatcattctgactccgcagattctagtgaacaacttgaaaaagggtacaatcccctccctgtccattttcacgctaatgatcttcgatgagtgccacaacacttctaagcagcatccatacaacatgataatgtttaactaccttgaccagaaactcgggggaagttctggaccgcttccccaggttatcggactgactgcttccgtaggtgtcggagacgcaaagaatacagacgaagctctcgattacatctgtaaactgtgcgcatcgttggatgcaagcgtgattgctactgtgaagcataatctggaggaactcgagcaggtggtatataaacctcagaagtttttccgtaaagtggagtctaggatctcggacaaattcaagtacatcattgctcagctgatgcgggataccgagtccctcgccaagaggatctgtaaagacctcgagaatcttagtcagatccagaatagagaattcggaacccagaagtatgaacaatggatcgtcaccgttcaaaaagcatgtatggtgttccagatgcccgacaaggacgaagaatcgcggatttgtaaggccctgtttctgtatacctcccacttacgtaagtataacgatgcattgatcattagcgaacatgcccgaatgaaagacgcattggattatctgaaagatttcttctccaacgtgcgagcagcgggatttgatgaaatcgagcaggacctgacacagcggttcgaggaaaaactgcaagaattggaatctgtttccagggatccgtccaacgaaaaccccaaattggaagatctgtgcttcattctgcaggaagaataccatctgaaccctgagaccatcacgatcctgttcgttaagactagggcattagtagacgcattaaaaaattggatcgaaggcaaccccaagctgtctttcttgaagcccggtatcttgacgggaaggggtaaaacgaaccagaataccgggatgaccctgcctgctcagaaatgcatcctggatgcattcaaggcttcaggtgaccacaacatactaattgccacgtccgtcgcagatgaggggatagatattgcccagtgtaacctggtcattctgtacgaatacgtcggtaatgtcataaaaatgattcaaacacgaggccgaggaagggctcgaggctctaagtgcttcctcctcacatcgaacgccggagtaatcgaaaaagaacaaattaacatgtacaaagaaaaaatgatgaatgatagtatacttagactccagacctgggacgaggcagtgtttagggagaaaatccttcacatacagacccatgaaaagttcatcagggattcccaggagaagcccaagcctgtccccgacaaggaaaataaaaagttattgtgtagaaaatgcaaagcgctggcctgctacacagctgatgtgagagtgatagaggagtgtcattacacggtgctaggagatgctttcaaggagtgctttgtgtcaaggccgcatcctaaaccaaagcaattctcttcctttgagaagcgcgctaagattttttgtgcccgtcaaaactgctctcatgactggggcattcacgtgaagtacaagacctttgagatcccagtcataaaaatcgagagctttgtcgtagaggatatagcaactggagtccagacactctattccaaatggaaggactttcacttcgagaagatcccgttcgacccagcagagatgagcaaatag

SEQ ID NO: 179161 - DNA, 756 bp, Artificial Sequence
  derived and/or modified sequence
atgaccaccgagcagcgacgcagtctgcaggcctttcaagactacattcgaaaaaccctggacccaacctacatcctgagctatatggctccctggtttagagaggaggaggtgcagtatatccaggcagagaaaaataataaaggccctatggaggcagccacgctttttctgaagtttttactagagctgcaggaggaagggtggtttaggggcttcctggatgccctggatcacgctggatatagcgggttgtatgaagccatcgaaagttgggactttaagaaaatcgagaagctggaagagtaccgcctgctcctcaagagactgcagccagagttcaagacacggataatccccacagatatcataagtgatctgagtgaatgcctgatcaatcaagagtgtgaagagatcctgcagatctgctctaccaaaggtatgatggcaggggcagagaagctggtcgagtgtcttctacgaagtgataaggaaaattggcccaagacactaaaactggcattggaaaaggaaagaaataagtttagcgaactgtggatcgtggaaaaaggaatcaaagatgtggagacggaagacttggaagataagatggagactagcgatatccaaatattttatcaagaagatcccgaatgtcagaacttaagcgaaaacagctgtccaccttctgaggtcagtgacaccaacctgtattcccctttcaagccaattaagaaaaagaaaaaaaagaagtag

SEQ ID NO: 179162 - DNA, 1611 bp, Artificial Sequence
  derived and/or modified sequence
atggagacttccgatattcaaattttctatcaggaggaccctgagtgtcagaatctgagcgagaactcttgcccaccatccgaggtctccgacaccaatctgtacagcccttttaagccccgaaattaccagctggaactggcattaccggctatgaagggcaagaataccattatttgtgcgccaacgggttgcggcaagaccttcgtgtcgctgttgatctgcgaacaccacttaaagaaatttccacaggggcagaagggcaaggtggtattctttgctaaccagatccccgtgtatgagcagcaaaagtcagtgtttagtaaatattttgagcggcatggctatcgggtgacagggatttcaggggctaccgccgagaatgtgccagtagaacaaattgtcgagaacaacgatattattattcttacgccccagatccttgtgaataatcttaagaagggtactatacctagtttgtcaattttcaccctcatgattttcgatgaatgtcataacacgagcaaacagcacccctacaatatgattatgttcaattatctggatcagaagttaggtgggagtagcggtcctttgccccaagtgatcggccttactgcatcagtcggggtaggcgacgccaagaacacagatgaagcgctggactatatttgtaagctttgcgcttctctggacgcaagcgtcatcgccacggtcaagcataatctggaagaactggagcaggttgtttacaagccgcagaagttctttcggaaggttgaatctcggatctctgacaagttcaaatacatcatcgcccaattaatgcgcgacactgaaagtttggctaagcgcatttgcaaggatctggagaacctgagtcagattcagaaccgagagtttggcacacagaagtacgaacagtggatcgtgaccgtccagaaagcttgtatggtgtttcagatgccagacaaagacgaggagagcaggatctgcaaggctctgttcctctacacgtcacatctgcggaagtacaacgacgctctgattatttcagagcacgctcgcatgaaggacgctctcgattacctgaaagacttcttctcaaatgtcagagccgctggattcgacgagatcgagcaagatcttacacagcggtttgaggagaaactgcaggaattggagagcgtcagccgggaccctagcaacgagaacccaaagctcgaagacctgtgctttatcctgcaggaggagtatcacttaaaccccgaaacaatcacaatcctgttcgtgaaaacgcgggcattggtggatgcgctcaagaactggatagagggtaatccaaaactctccttccttaaacctggcatcctaactggacgtgggaagaccaatcagaatacaggcatgacactgcctgcccagaagtgtatattagacgcctttaaagcttccggtgatcacaatatactgatcgccaccagcgtggctgatgaaggcatcgacattgctcagtgtaatctcgtgatcctttatgagtacgtggggaacgtcataaaaatgatccaaacccgcgaagaggagcaggaagtggcctctgcctccttctag

SEQ ID NO: 179163 - DNA, 3253 bp, Artificial Sequence
  derived and/or modified sequence
aaggaatgccagcagctaccagaaaccggaagggcaaggaatgcattctccccagagccttcagaggaagcatgactctgctaacaccatgattcacaattctggcctccaagaacagagagaataagcctctattgtttaaaccacctggtttgtcctaattcgttattgcagccacaggaaactaatacagaaggctaaaatgaaaacgatgaagaggtgcagtatattcaggctgagaaaaacaacaagggcccaatggaggctgccacactttttctcaagttcctgttggagctccaggaggaaggctggttccgtggctttttggatgccctagaccatgcagagctatggtgttttctatcaacagaagaatcatgaagttcataaatttggaaaggagagctttatttttcataaagggttgcagtctgcatggtggccattttgacaggctgggaagtgtagcctcgggccagaagcaggaaacaggcacttggagggtggggagagtaaaacagagatttatgctgaatagggtgaccaaatattcagtaagctacaggaggagtcatgaaagtagaagcatgcacctgggcaggttattctggactttatgaagccattgaaagttgggatttcaaaaaaattgaaaagttggaggagtatagattacttttaaaacgtttacaaccagaatttaaaaccagaattatcccaaccgatatcatttctgatctgtctgaatgtttaattaatcaggaatgtgaagaaattctacagatttgctctactaaggggatgatggcaggtgcagagaaattggtggaatgccttctcagatcagacaaggaaaactggcccaaaactttgaaacttgctttggagaaagaaaggaacaagttcagtgaactgtggattgtagagaaaggtataaaagatgttgaaacagaagatcttgaggataagatggaaacttctgacatacagattttctaccaagaagatccagaatgccagaatcttagtgagaattcatgtccaccttcagaagtgtctgatacaaacttgtacagcccatttaaaccaagaaattaccaattagagcttgctttgcctgctatgaaaggaaaaaacacaataatatgtgctcctacaggttgtggaaaaacctttgtttcactgcttatatgtgaacatcatcttaaaaaattcccacaaggacaaaaggggaaagttgtcttttttgcgaatcagatcccagtgtatgaacagcagaaatctgtattctcaaaatactttgaaagacatgggtatagagttacaggcatttctggagcaacagctgagaatgtcccagtggaacagattgttgagaacaatgacatcatcattttaactccacagattcttgtgaacaaccttaaaaagggaacgattccatcactatccatctttactttgatgatatttgatgaatgccacaacactagtaaacaacacccgtacaatatgatcatgtttaattatctagatcagaaacttggaggatcttcaggcccactgccccaggtcattgggctgactgcctcggttggtgttggggatgccaaaaacacagatgaagccttggattatatctgcaagctgtgtgcttctcttgatgcgtcagtgatagcaacagtcaaacacaatctggaggaactggagcaagttgtttataagccccagaagtttttcaggaaagtggaatcacggattagcgacaaatttaaatacatcatagctcagctgatgagggacacagagagtctggcaaagagaatctgcaaagacctcgaaaacttatctcaaattcaaaatagggaatttggaacacagaaatatgaacaatggattgttacagttcagaaagcatgcatggtgttccagatgccagacaaagatgaagagagcaggatttgtaaagccctgtttttatacacttcacatttgcggaaatataatgatgccctcattatcagtgagcatgcacgaatgaaagatgctctggattacttgaaagacttcttcagcaatgtccgagcagcaggattcgatgagattgagcaagatcttactcagagatttgaagaaaagctgcaggaactagaaagtgtttccagggatcccagcaatgagaatcctaaacttgaagacctctgcttcatcttacaagaagagtaccacttaaacccagagacaataacaattctctttgtgaaaaccagagcacttgtggacgctttaaaaaattggattgaaggaaatcctaaactcagttttctaaaacctggcatattgactggacgtggcaaaacaaatcagaacacaggaatgaccctcccggcacagaagtgtatattggatgcattcaaagccagtggagatcacaatattctgattgccacctcagttgctgatgaaggcattgacattgcacagtgcaatcttgtcatcctttatgagtatgtgggcaatgtcatcaaaatgatccaaaccagaggcagaggaagagcaagaggtagcaagtgcttccttctgactagtaatgctggtgtaattgaaaaagaacaaataaacatgtacaaagaaaaaatgatgaatgactctattttacgccttcagacatgggacgaagcagtatttagggaaaagattctgcatatacagactcatgaaaaattcatcagagatagtcaagaaaaaccaaaacctgtacctgataaggaaaataaaaaactgctctgcagaaagtgcaaagccttggcatgttacacagctgacgtaagagtgatagaggaatgccattacactgtgcttggagatgcttttaaggaatgctttgtgagtagaccacatcccaagccaaagcagttttcaagttttgaaaaaagagcaaagatattctgtgcccgacagaactgcagccatgactggggaatccatgtgaagtacaagacatttgagattccagttataaaaattgaaagttttgtggtggaggatattgcaactggagttcagacactgtactcgaagtggaaggactttcattttgagaagataccatttgatccagcagaaatgtccaaatgatatcaggtcctcaatcttcagctacagggaatgagtaactttgagtggagaagaaacaaacatagtgggtataatcatggatcgcttgtacccctgtgaaaatatatttttt

SEQ ID NO: 179164 - DNA, 911 bp, Artificial Sequence
  derived and/or modified sequence
tagttattaaagttcctatgcagctccgcctcgcgtccggcctcatttcctcggaaaatccctgctttccccgctcgccacgccctcctcctacccggctttaaagctagtgaggcacagcctgcggggaacgtagctagctgcaagcagaggccggcatgaccaccgagcagcgacgcagcctgcaagccttccaggattatatccggaagaccctggaccctacctacatcctgagctacatggccccctggtttagggaggaagaggtgcagtatattcaggctgagaaaaacaacaagggcccaatggaggctgccacactttttctcaagttcctgttggagctccaggaggaaggctggttccgtggctttttggatgccctagaccatgcaggttattctggactttatgaagccattgaaagttgggatttcaaaaaaattgaaaagttggaggagtatagattacttttaaaacgtttacaaccagaatttaaaaccagaattatcccaaccgatatcatttctgatctgtctgaatgtttaattaatcaggaatgtgaagaaattctacagatttgctctactaaggggatgatggcaggtgcagagaaattggtggaatgccttctcagatcagacaaggaaaactggcccaaaactttgaaacttgctttggagaaagaaaggaacaagttcagtgaactgtggattgtagagaaaggtataaaagatgttgaaacagaagatcttgaggataagatggaaacttctgacatacagattttctaccaagaagatccagaatgccagaatcttagtgagaattcatgtccaccttcagaagtgtctgatacaaacttgtacagcccatttaaaccaatcaaaaaaaaaaaaaaaaaaaaa

SEQ ID NO: 179165 - DNA, 2122 bp, Artificial Sequence
  derived and/or modified sequence
aacgtagctagctgcaagcagaggccggcatgaccaccgagcagcgacgcagcctgcaagccttccaggattatatccggaagaccctggaccctacctacatcctgagctacatggccccctggtttagggaggaagaggtgcagtatattcaggctgagaaaaacaacaagggcccaatggaggctgccacactttttctcaagttcctgttggagctccaggaggaaggctggttccgtggctttttggatgccctagaccatgcaggttattctggactttatgaagccattgaaagttgggatttcaaaaaaattgaaaagttggaggagtatagattacttttaaaacgtttacaaccagaatttaaaaccagaattatcccaaccgatatcatttctgatctgtctgaatgtttaattaatcaggaatgtgaagaaattctacaggtataaaagatgttgaaacagaagatcttgaggataagatggaaacttctgacatacagattttctaccaagaagatccagaatgccagaatcttagtgagaattcatgtccaccttcagaagtgtctgatacaaacttgtacagcccatttaaaccaagaaattaccaattagagcttgctttgcctgctatgaaaggaaaaaacacaataatatgtgctcctacaggttgtggaaaaacctttgtttcactgcttatatgtgaacatcatcttaaaaaattcccacaaggacaaaaggggaaagttgtcttttttgcgaatcagatcccagtgtatgaacagcagaaatctgtattctcaaaatactttgaaagacatgggtatagagttacaggcatttctggagcaacagctgagaatgtcccagtggaacagattgttgagaacaatgacatcatcattttaactccacagattcttgtgaacaaccttaaaaagggaacgattccatcactatccatctttactttgatgatatttgatgaatgccacaacactagtaaacaacacccgtacaatatgatcatgtttaattatctagatcagaaacttggaggatcttcaggcccactgccccaggtcattgggctgactgcctcggttggtgttggggatgccaaaaacacagatgaagccttggattatatctgcaagctgtgtgcttctcttgatgcgtcagtgatagcaacagtcaaacacaatctggaggaactggagcaagttgtttataagccccagaagtttttcaggaaagtggaatcacggattagcgacaaatttaaatacatcatagctcagctgatgagggacacagagagtctggcaaagagaatctgcaaagacctcgaaaacttatctcaaattcaaaatagggaatttggaacacagaaatatgaacaatggattgttacagttcagaaagcatgcatggtgttccagatgccagacaaagatgaagagagcaggatttgtaaagccctgtttttatacacttcacatttgcggaaatataatgatgccctcattatcagtgagcatgcacgaatgaaagatgctctggattacttgaaagacttcttcagcaatgtccgagcagcaggattcgatgagattgagcaagatcttactcagagatttgaagaaaagctgcaggaactagaaagtgtttccagggatcccagcaatgagaatcctaaacttgaagacctctgcttcatcttacaagaagagtaccacttaaacccagagacaataacaattctctttgtgaaaaccagagcacttgtggacgctttaaaaaattggattgaaggaaatcctaaactcagttttctaaaacctggcatattgactggacgtggcaaaacaaatcagaacacaggaatgaccctcccggcacagaagtgtatattggatgcattcaaagccagtggagatcacaatattctgattgccacctcagttgctgatgaaggcattgacattgcacagtgcaatcttgtcatcctttatgagtatgtgggcaatgtcatcaaaatgatccaaaccagagaggaagagcaagaggtagcaagtgcttccttctgactagtaatgctggtgtaattg

SEQ ID NO: 179166 - protein, 406 aa, Artificial Sequence
  derived and/or modified sequence
MADGNEDLRADDLPGPAFESYESMELACPAERSGHVAVSDGRHMFVWGGYKSNQVRGLYDFYLPREELWIYNMETGRWKKINTEGDVPPSMSGSCAVCVDRVLYLFGGHHSRGNTNKFYMLDSRSTDRVLQWERIDCQGIPPSSKDKLGVWVYKNKLIFFGGYGYLPEDKVLGTFEFDETSFWNSSHPRGWNDHVHILDTETFTWSQPITTGKAPSPRAAHACATVGNRGFVFGGRYRDARMNDLHYLNLDTWEWNELIPQGICPVGRSWHSLTPVSSDHLFLFGGFTTDKQPLSDAWTYCISKNEWIQFNHPYTEKPRLWHTACASDEGEVIVFGGCANNLLVHHRAAHSNEILIFSVQPKSLVRLSLEAVICFKEMLANSWNCLPKHLLHSVNQRFGSNNTSGS

SEQ ID NO: 179167 - DNA, 2320 bp, Artificial Sequence
  derived and/or modified sequence
agaggcggcgcccggcaggggcggcaggagctcaggagaggcccccggggatcgggctgggccccacgtgagagctaagcgactgccctcgcgcccgcagaacagcagggcctgcatcgactctaaggcgagaccagaaacttgctagtggagcaattctggtgcccctgcccgggctgtgaaccctctgagatcatccctcaatcaaacgaatagaaatcctcgggaagaaaaaaaaaattgcggcaatccggctaaaattcagcagctttcagggaccgattcaggacattatccctgtggttccctcagtgaaaggagactcgaagcgcgactagaagtcgccgggccccatagatctgcggtgcccaggccgtaggcggaggcgcgggcagaggcggcggcggcggcggcggcggctggaggacccggcgctgggggcgctgagcggcagcctcgcttccggagctcggcgggcggcgtcagcggaacgggcggcttccggccgcggcgtaaacaaggccgtggactgcaggaggcggggcagacgggctgcaatagggagccggcccgacgcggaccgcttccctgcagtgccccgagtcccgggcccgcgccgccgccgcccggctccgctcgcggcccctctgtctgcaggcgtgccccggcggcggcggagagccgtcctcggccgaggaggctgggaaacgcgagcgcaggcggcagagaggcctcaacgccgtccctttcgccaccgccttttccttgcctcgcgccgctgtgcatttctctccttttcctttgtttttttggcccctcgcgggtgtgggcattgttggttagcaaaagtgcagcctcaagatggctgatggcaacgaggatctgcgggctgacgacttgcctgggccagccttcgagagctatgagtccatggagcttgcctgccccgctgagcgcagcggccacgtagccgtcagcgacgggcgccacatgttcgtctggggcggctacaagagtaatcaagtcagaggattatatgacttttatctgcctagagaagaactatggatctacaacatggagactggaagatggaaaaaaatcaacactgaaggtgatgttcctccttctatgtcaggaagctgtgctgtgtgtgtagacagggtgctgtacttgtttggaggacaccattcaagaggcaataccaataagttctacatgctggattcaaggtctacagacagagtgttacagtgggaaagaattgattgccaaggaattcctccatcatcaaaggacaaacttggtgtctgggtatataaaaacaagttaatattttttggagggtatggatatttgcctgaagataaagtattgggaacttttgaattcgatgaaacatctttttggaattcaagtcatccaagaggatggaatgatcatgtacatattttagatactgaaacatttacctggagccagcctataactactggtaaagcaccttcacctcgtgctgcccatgcctgtgcaactgtcggaaatagaggcttcgtgtttggaggcagatatcgagatgctagaatgaatgatcttcactatcttaatctggatacatgggagtggaatgaattaattccacaaggcatatgcccagttggtcgatcttggcactcactaacaccagtttcttcagatcatctttttctctttggaggatttaccactgataaacagccactaagtgatgcctggacttactgcatcagtaaaaatgaatggatacaatttaatcatccatataccgaaaaaccaaggttatggcacacagcttgtgccagcgatgaaggagaagtaattgtttttggtggatgtgccaacaacttgcttgtccatcacagagctgcacacagtaatgaaatactaatattttcagttcaaccaaaatctcttgtacggctaagcttagaagcagtcatttgctttaaagaaatgttagccaactcatggaactgccttccaaaacacttacttcacagtgttaatcagaggtttggtagtaacaacacttctggatcttaaggcttcataaataatgcctatgatcaccttgcatggacagcaatcctgtaaacatcacagagtggcatcatttgtataattatatgcattgttgtagtttgcacctgttggttttaatgtgcatgtgaatggcctagagaacctatttttgtgtctaaagtttacaataaatgtatttaacaccagtagctgtcctctattaaagtaaagtaatggttgggctttttaccctgaagaa

SEQ ID NO: 179168 - DNA, 1221 bp, Artificial Sequence
  derived and/or modified sequence
atggcagacgggaacgaggacttgagggcggatgacctcccaggacccgccttcgagagctacgagtcaatggagctggcatgtcctgctgagcgctccgggcatgtcgcagtgtcagacggccgccatatgttcgtgtggggcggctataaatcaaaccaggttcgaggtctgtatgatttttacctcccgagggaagagttgtggatctataatatggagacggggcggtggaagaagatcaatactgaaggcgacgtgccaccaagtatgagtggaagttgcgcagtttgtgtggatcgggtcctgtatctttttggggggcatcattcacggggcaatacaaataagttctacatgttagattcccgcagtaccgatcgtgtgctgcaatgggaaagaattgactgtcagggaattcctccatcctctaaagacaaattaggggtttgggtctacaagaacaagctgatcttcttcggcggctacggttacctgccggaggacaaagtcctcggcactttcgagtttgatgaaacatccttctggaacagcagtcatcctcggggttggaacgaccacgtgcacatactggataccgagaccttcacctggtcccagccaataaccaccggcaaggccccatcgccgagagcggcccatgcctgcgccacagttggaaatcggggttttgtgttcggaggtaggtacagggatgctaggatgaatgacctccattatctgaatttggatacatgggagtggaacgaattaataccccagggcatctgtccagtgggacgcagttggcattccttgactccggtctccagcgaccatctattcctcttcgggggatttaccactgacaagcagccgctgtctgacgcgtggacatactgtatttctaagaatgagtggatccaatttaaccacccatacacagagaagccgcgcctctggcacaccgcttgcgctagcgacgaaggtgaggttattgtcttcggcgggtgcgctaacaatctgctagtgcaccatcgggctgctcatagtaatgagatcttgatcttcagcgtacaaccaaaaagccttgtcaggctctctttggaggcagttatctgcttcaaggagatgttggccaacagttggaattgtctgccaaagcatttactgcactccgtaaatcagcgttttggatcaaacaacacgtccgggtcttag

SEQ ID NO: 179169 - DNA, 1221 bp, Artificial Sequence
  derived and/or modified sequence
atggctgatggaaatgaagacctgcgggcagatgacctgcccggccctgcctttgagagctatgaatccatggagctggcctgcccagctgagaggagcggccacgtggccgtgtctgatggccgccacatgtttgtgtggggcggctacaagagcaaccaggtgcggggcctgtatgacttctacctgccccgggaggagctgtggatctacaacatggagaccggccgctggaagaagatcaacacagaaggagatgtgccccccagcatgagcggcagctgtgctgtgtgtgtggacagagtgctgtacctgtttggaggccaccacagccggggcaacaccaacaagttctacatgctggacagccgcagcacagacagagtgctgcagtgggagagaattgactgccagggcatcccccccagcagcaaggacaagctgggcgtgtgggtgtacaagaacaagctgatcttcttcggcggctacggctacctgcctgaggacaaggtgctgggcacctttgaatttgatgagaccagcttctggaacagcagccacccccggggctggaatgaccacgtgcacatcctggacacagagaccttcacctggagccagcccatcaccaccgggaaggcccccagccccagggctgcccacgcctgtgccaccgtgggcaacagaggatttgtgtttggaggccgctacagagatgccaggatgaatgacctgcactacctgaacctggacacctgggagtggaatgagctgatcccccagggcatctgccctgtgggccgctcctggcacagcctgacccctgtgtccagtgaccacctgttcctgtttggaggcttcaccacagacaagcagcccctgagtgatgcctggacctactgcatcagcaagaatgagtggatccagttcaaccacccctacacagagaagccccggctgtggcacacagcctgtgccagtgatgaaggagaggtgattgtgtttggaggctgtgccaacaacctgctggtgcaccaccgggccgcccacagcaatgagatcctgatcttctctgtgcagcccaagagcctggtgcggctgagcctggaggccgtcatctgcttcaaggagatgctggccaacagctggaactgcctgcccaagcacctgctgcacagcgtgaaccagcgcttcggcagcaacaacaccagcggcagctag

SEQ ID NO: 179170 - DNA, 1221 bp, Artificial Sequence
  derived and/or modified sequence
atggccgacggcaacgaggacctgcgggccgacgacctgcccggccccgcgtttgagtcctacgagtctatggaactggcatgccccgcagagaggtctggacacgtggcagtgtccgatggcagacatatgtttgtctggggaggatacaagtcgaaccaggttaggggactgtacgatttttatctgccccgagaggagctctggatctacaacatggaaacgggtcgctggaaaaagatcaataccgagggagatgtccccccgagcatgagcggctcctgcgccgtgtgcgttgaccgcgtgctgtaccttttcgggggtcaccacagtagaggaaataccaataagttctatatgctggactcccgtagcacagacagagttcttcagtgggagaggattgactgccaggggatccccccgagctctaaggacaaactgggcgtgtgggtgtataagaataaattgatctttttcggcggctacgggtacctgcccgaggacaaggtgctgggaaccttcgaatttgatgagacctcattttggaactcatcccatcctcggggatggaatgatcatgtgcatattctcgatacagagacctttacttggagccaacctattaccacaggcaaggcccctagcccccgagccgcacatgcctgcgccactgtcggaaaccgaggctttgtgttcggagggcggtaccgagatgcccggatgaacgacttgcactatctcaatcttgacacctgggaatggaatgaactcattcctcaagggatctgtcccgtggggcgctcatggcactctttgacacccgtgagtagtgatcacttattcctgttcgggggcttcacaacagacaaacagccgctgtccgacgcttggacatattgtatttccaagaatgagtggattcagttcaaccatccatataccgaaaaacctaggttgtggcacaccgcctgtgcctccgacgagggcgaagttatcgtatttggagggtgtgcaaacaatctcctcgtgcatcacagagctgcccacagcaacgaaatattgattttctctgttcagcctaaatctctggtgcgattgagcctagaagctgtgatctgcttcaaagagatgttggcaaatagctggaattgtttacctaagcatttattgcattcggtgaaccagagatttggttctaacaataccagcgggagctag

SEQ ID NO: 179171 - DNA, 1221 bp, Artificial Sequence
  derived and/or modified sequence
atggctgatggaaacgaggacttgagagccgacgatctgccaggcccagcttttgaaagttacgaatccatggagcttgcttgccccgctgagcgctccggtcacgttgccgtgagcgatggacggcatatgtttgtgtggggcggatacaagagtaatcaagtacgcggactgtacgatttttatttgccccgagaggaactttggatttacaatatggaaacaggaagatggaagaagatcaataccgaaggagacgtgcccccatccatgagtggcagttgcgctgtctgtgtcgatcgggtgctttacctatttggaggtcaccatagcagagggaataccaataaattctatatgcttgatagcagatccacagatcgggtattgcagtgggaaagaattgactgtcagggcatcccacccagttccaaggataaactgggtgtttgggtgtataaaaacaagctgatattcttcggcggatacgggtatctccctgaagataaggtgctgggaacattcgaattcgacgagacctcattttggaactcgagtcatccgaggggctggaatgatcacgtccatatcctggataccgaaacgttcacatggtctcaaccaataactactgggaaggcaccgtccccaagagccgcacatgcctgtgccaccgtcggtaaccgcggatttgtcttcgggggtcgttatagggatgccaggatgaatgatctgcattacctgaatcttgacacctgggagtggaatgagttaattccacaaggcatttgccctgttggcagatcgtggcatagccttacgccagtgagtagtgaccatctgttcctcttcgggggtttcaccactgataagcagcccctcagcgacgcatggacatactgtatatccaagaatgaatggattcagttcaatcacccttacacggaaaagccacgattatggcatactgcatgcgcatccgacgagggagaggtaatcgtattcggcggttgtgcaaataacctcctcgtgcaccatcgagcagctcattctaacgagatactgatcttctcagtgcagcctaaatccctcgtaaggctttctctcgaggctgtaatttgcttcaaagagatgctcgcgaattcctggaactgtctcccaaagcatctgctgcacagtgtgaaccagaggttcggctcaaacaataccagcgggtcctag

SEQ ID NO: 179172 - DNA, 1221 bp, Artificial Sequence
  derived and/or modified sequence
atggccgacggcaacgaggacctgagagccgacgacctgcccggccccgccttcgagagctacgagagcatggagctggcctgccccgccgagagaagcggccacgtggccgtgagcgacggcagacacatgttcgtgtggggcggctacaagagcaaccaggtgagaggcctgtacgacttctacctgcccagagaggagctgtggatctacaacatggagaccggcagatggaagaagatcaacaccgagggcgacgtgccccccagcatgagcggcagctgcgccgtgtgcgtggacagagtgctgtacctgttcggcggccaccacagcagaggcaacaccaacaagttctacatgctggacagcagaagcaccgacagagtgctgcagtgggagagaatcgactgccagggcatcccccccagcagcaaggacaagctgggcgtgtgggtgtacaagaacaagctgatcttcttcggcggctacggctacctgcccgaggacaaggtgctgggcaccttcgagttcgacgagaccagcttctggaacagcagccaccccagaggctggaacgaccacgtgcacatcctggacaccgagaccttcacctggagccagcccatcaccaccggcaaggcccccagccccagagccgcccacgcctgcgccaccgtgggcaacagaggcttcgtgttcggcggcagatacagagacgccagaatgaacgacctgcactacctgaacctggacacctgggagtggaacgagctgatcccccagggcatctgccccgtgggcagaagctggcacagcctgacccccgtgagcagcgaccacctgttcctgttcggcggcttcaccaccgacaagcagcccctgagcgacgcctggacctactgcatcagcaagaacgagtggatccagttcaaccacccctacaccgagaagcccagactgtggcacaccgcctgcgccagcgacgagggcgaggtgatcgtgttcggcggctgcgccaacaacctgctggtgcaccacagagccgcccacagcaacgagatcctgatcttcagcgtgcagcccaagagcctggtgagactgagcctggaggccgtgatctgcttcaaggagatgctggccaacagctggaactgcctgcccaagcacctgctgcacagcgtgaaccagagattcggcagcaacaacaccagcggcagctag

SEQ ID NO: 179173 - protein, 306 aa, Artificial Sequence
  derived and/or modified sequence
MASRWWRWRRGCSWKPAARSPGPGSPGRAGPLGPSAAAEVRAQVHRRKGLDLSQIPYINLVKHLTSACPNVCRISRFHHTTPDSKTHSGEKYTDPFKLGWRDLKGLYEDIRKELLISTSELKEMSEYYFDGKGKAFRPIIVALMARACNIHHNNSRHVQASQRAIALIAEMIHTASLVHDDVIDDASSRRGKHTVNKIWGEKKAVLAGDLILSAASIALARIGNTTVISILTQVIEDLVRGEFLQLGSKENENERFAHYLEKTFKKTASLIANSCKAVFPRNECYDHATVQFAWRCRQSSTVCTTE

SEQ ID NO: 179174 - protein, 415 aa, Artificial Sequence
  derived and/or modified sequence
MASRWWRWRRGCSWKPAARSPGPGSPGRAGPLGPSAAAEVRAQVHRRKGLDLSQIPYINLVKHLTSACPNVCRISRFHHTTPDSKTHSGEKYTDPFKLGWRDLKGLYEDIRKELLISTSELKEMSEYYFDGKGKAFRPIIVALMARACNIHHNNSRHVQASQRAIALIAEMIHTASLVHDDVIDDASSRRGKHTVNKIWGEKKAVLAGDLILSAASIALARIGNTTVISILTQVIEDLVRGEFLQLGSKENENERFAHYLEKTFKKTASLIANSCKAVSVLGCPDPVVHEIAYQYGKNVGIAFQLIDDVLDFTSCSDQMGKPTSADLKLGLATGPVLFACQQFPEMNAMIMRRFSLPGDVDRARQYVLQSDGVQQTTYLAQQYCHEAIREISKLRPSPERDALIQLSEIVLTRDK

SEQ ID NO: 179175 - protein, 376 aa, Artificial Sequence
  derived and/or modified sequence
MPAHVHRRKGLDLSQIPYINLVKHLTSACPNVCRISRFHHTTPDSKTHSGEKYTDPFKLGWRDLKGLYEDIRKELLISTSELKEMSEYYFDGKGKAFRPIIVALMARACNIHHNNSRHVQASQRAIALIAEMIHTASLVHDDVIDDASSRRGKHTVNKIWGEKKAVLAGDLILSAASIALARIGNTTVISILTQVIEDLVRGEFLQLGSKENENERFAHYLEKTFKKTASLIANSCKAVSVLGCPDPVVHEIAYQYGKNVGIAFQLIDDVLDFTSCSDQMGKPTSADLKLGLATGPVLFACQQFPEMNAMIMRRFSLPGDVDRARQYVLQSDGVQQTTYLAQQYCHEAIREISKLRPSPERDALIQLSEIVLTRDK

SEQ ID NO: 179176 - DNA, 921 bp, Artificial Sequence
  derived and/or modified sequence
atggcatctaggtggtggcggtggaggcgcggctgttcttggaaacccgcagccaggtctccgggacctgggtctccgggcagggcaggtcccctaggcccttccgctgccgctgaggtgagagcccaggttcaccgccgcaaaggccttgatctgagccagattccctatataaatcttgtgaagcaccttaccagcgcttgtcccaatgtttgtcgtatcagtcgcttccatcacaccacccctgattccaagacgcacagcggcgaaaagtatactgatcctttcaaattagggtggagggacctgaagggcctctatgaggacataagaaaggaactgctgatctcaacgtccgagctgaaggaaatgtctgagtattatttcgatggaaagggcaaagcattcaggccaattatcgttgcccttatggctcgggcctgcaacatccatcacaacaactctaggcatgttcaagcctctcagcgagccatagctcttattgcggaaatgattcatacggcttccctcgtgcatgatgacgttattgacgatgcttcctcaagaagaggcaagcacaccgttaataaaatctggggcgaaaaaaaggcggtcttagccggagacctgattctaagcgctgccagcattgctcttgccaggatcggcaacactacagttatctcaatcctcactcaggttattgaagacctggtccggggcgagttcttgcaattgggttcaaaggagaatgaaaacgaaagattcgctcactacctggaaaagacctttaaaaaaaccgcctctctgattgcaaatagttgtaaggcggtctttccaaggaatgaatgctacgatcacgccactgtccagttcgcgtggcggtgtcgacaatcaagcaccgtgtgtacgactgaatag

SEQ ID NO: 179177 - DNA, 1248 bp, Artificial Sequence
  derived and/or modified sequence
atggcctcacgctggtggcgctggagacgggggtgctcttggaagccagccgcacgttcaccaggacccggctcacccggcagggcggggcctttggggcccagcgccgcagcagaagtccgcgcccaagtgcatcgacgcaaggggttagatttgagccaaatcccttacatcaaccttgtgaaacatctgaccagtgcctgtccaaacgtctgccgtatctccaggttccatcacacaacacccgactctaaaacccactcaggcgaaaagtacaccgacccgttcaagctgggttggagggacctgaaaggtctttacgaagatattaggaaggaattgctcatcagcactagcgaactcaaggagatgtccgaatactactttgatggtaaggggaaggcttttagacctatcattgtggcccttatggcaagggcatgtaatatacaccacaacaactctcgtcatgtacaggcctctcaacgcgctattgctctgatcgctgaaatgatccacaccgcctctctggtgcatgacgacgtgattgacgatgcaagctcacgccgaggcaagcacaccgtgaacaagatttggggcgagaaaaaggccgtgcttgccggagatcttatactatcagcagcatcaatcgcccttgcaagaatcggtaatactacagtgattagcatcctcacccaggtcattgaggatctggtgcgcggcgaatttctgcagcttggctccaaggaaaatgaaaatgaacgattcgcccattatctcgaaaagactttcaaaaaaacagcctcattaattgcaaatagctgtaaagctgttagcgtgctgggctgcccagaccccgttgtccacgagatcgcgtaccagtatggaaagaacgttggcattgcattccagctgatcgatgacgtgctggactttaccagctgctccgatcagatggggaagccaacctctgccgatctgaaactaggtctcgccacggggcctgtgctgtttgcatgtcagcagttccctgagatgaatgcgatgattatgagacgtttcagcttaccaggggacgttgatcgagcacgccaatacgtgctacagagtgatggcgtccagcaaacaacctatctggctcaacagtattgccatgaggctatcagggaaatttctaagctgaggccctcccccgagcgcgatgctcttatccaattaagtgaaattgtgctcacacgcgataagtag

SEQ ID NO: 179178 - DNA, 1131 bp, Artificial Sequence
  derived and/or modified sequence
atgcccgcccatgtgcacagaaggaaaggcctagaccttagccaaattccatatatcaatctggtcaaacatctgacttctgcttgcccaaatgtgtgccggataagtaggtttcaccacactacccccgattcaaagacccactccggagagaaatatactgacccattcaaactcggatggcgggacttgaagggcctctacgaagacattcgaaaggaattgctgatatctacatcagaattgaaggagatgagtgagtactattttgacggcaaagggaaagcctttcgccctatcatcgtagccctcatggctagggcctgcaatatccatcataataattcacgacatgtgcaagcttctcagcgggcaatcgccttgattgccgaaatgattcataccgccagcctcgtgcatgacgatgttattgacgacgcttcttcacgcagaggcaaacataccgtgaataagatttggggggagaagaaggccgtactggcaggagacctaatactttccgcagcatcaatagctttagctcggattggcaacaccacagttattagcatcttaacgcaggttatcgaagatctggtcaggggcgaattccttcaactcgggtctaaagaaaatgaaaacgagcggttcgcgcactacctggagaagacattcaagaaaacggcatctctcatcgcaaacagctgcaaggctgtctccgtactggggtgtcccgatcctgttgtgcacgaaatcgcctaccagtacggtaaaaacgttggcattgccttccagttaatcgatgatgtcctggattttacctcctgcagtgatcagatgggaaagcccacaagcgccgatctgaagttggggttggccactgggcccgtgttatttgcgtgccagcagtttcctgaaatgaacgccatgatcatgcgcagattttcgctgccgggtgacgtggatcgcgcccgacagtacgtcctccaatcagacggggtccaacagaccacttacctcgcccagcagtattgccacgaggcaattcgggaaatcagcaagctacggccatcccccgaaagagacgctcttatccaactgtccgagatcgttctaaccagggacaaatag

SEQ ID NO: 179179 - DNA, 90 bp, Artificial Sequence
  derived and/or modified sequence
tgagagatgattgctaggatgcaagctcagatgcagatgcaaatgcaggggggtgatggcgacgggggtgctcttggccaccacgtttag

SEQ ID NO: 179180 - DNA, 921 bp, Artificial Sequence
  derived and/or modified sequence
atggccagccgctggtggcgctggaggcggggctgctcctggaagccagctgcccggagccctggccctggcagccctggccgggccggccccctgggccccagcgctgctgctgaggtgcgggcccaggtgcacaggaggaagggcctggacctgagccagatcccctacatcaacctggtgaagcacctgaccagcgcctgccccaacgtgtgccgcatcagccgcttccaccacaccaccccagacagcaagacccacagcggggagaagtacacagaccccttcaagctgggctggagggacctgaagggcctgtatgaggacatcaggaaggagctgctgatcagcaccagcgagctgaaggagatgtctgagtactactttgatggcaagggcaaggccttccggcccatcatcgtggccctgatggcccgggcctgcaacatccaccacaacaacagcagacatgtgcaggccagccagagggccatcgccctgattgctgagatgatccacacagccagcctggtgcatgatgatgtgattgatgatgccagcagcagaagaggcaagcacacagtgaacaagatctggggcgagaagaaggctgtgctggccggggacctgatcctgtctgctgccagcatcgccctggcccgcatcggcaacaccaccgtcatcagcatcctgacccaggtgattgaggacctggtgcggggggagttcctgcagctgggcagcaaagaaaatgaaaatgaaagatttgcccactacctggagaagaccttcaagaagacagccagcctgattgccaacagctgcaaggctgtgttccccagaaatgaatgttatgaccacgccaccgtgcagtttgcctggcgctgccggcagagcagcacagtgtgcaccacagaatag

SEQ ID NO: 179181 - DNA, 1248 bp, Artificial Sequence
  derived and/or modified sequence
atggccagccgctggtggcgctggaggcggggctgctcctggaagccagctgcccggagccctggccctggcagccctggccgggccggccccctgggccccagcgctgctgctgaggtgcgggcccaggtgcacaggaggaagggcctggacctgagccagatcccctacatcaacctggtgaagcacctgaccagcgcctgccccaacgtgtgccgcatcagccgcttccaccacaccaccccagacagcaagacccacagcggggagaagtacacagaccccttcaagctgggctggagggacctgaagggcctgtatgaggacatcaggaaggagctgctgatcagcaccagcgagctgaaggagatgtctgagtactactttgatggcaagggcaaggccttccggcccatcatcgtggccctgatggcccgggcctgcaacatccaccacaacaacagcagacatgtgcaggccagccagagggccatcgccctgattgctgagatgatccacacagccagcctggtgcatgatgatgtgattgatgatgccagcagcagaagaggcaagcacacagtgaacaagatctggggcgagaagaaggctgtgctggccggggacctgatcctgtctgctgccagcatcgccctggcccgcatcggcaacaccaccgtcatcagcatcctgacccaggtgattgaggacctggtgcggggggagttcctgcagctgggcagcaaagaaaatgaaaatgaaagatttgcccactacctggagaagaccttcaagaagacagccagcctgattgccaacagctgcaaggctgtgtctgtgctgggctgcccagaccctgtggtgcatgaaattgcctaccagtatggcaagaatgtgggcatcgccttccagctgattgatgatgtgctggacttcaccagctgcagcgaccagatgggcaagcccaccagcgctgacctgaagctgggcctggccactggacctgtgctgtttgcctgccagcagtttcctgagatgaatgccatgatcatgaggcgcttcagcctgcctggagatgtggaccgggcccggcagtatgtgctgcagagtgatggagtgcagcagaccacctacctggcccagcagtactgccacgaggccatccgggagatcagcaagctgcggcccagccctgagagagatgccctgatccagctgtctgaaattgtgctgacccgggacaagtag

SEQ ID NO: 179182 - DNA, 1131 bp, Artificial Sequence
  derived and/or modified sequence
atgcctgcccacgtgcacaggaggaagggcctggacctgagccagatcccctacatcaacctggtgaagcacctgaccagcgcctgccccaacgtgtgccgcatcagccgcttccaccacaccaccccagacagcaagacccacagcggggagaagtacacagaccccttcaagctgggctggagggacctgaagggcctgtatgaggacatcaggaaggagctgctgatcagcaccagcgagctgaaggagatgtctgagtactactttgatggcaagggcaaggccttccggcccatcatcgtggccctgatggcccgggcctgcaacatccaccacaacaacagccgccacgtgcaggccagccagagggccatcgccctgattgctgagatgatccacacagccagcctggtgcatgatgatgtgattgatgatgccagcagccggcggggcaagcacacagtgaacaagatctggggcgagaagaaggctgtgctggccggggacctgatcctgtctgctgccagcatcgccctggccagaattggcaacaccaccgtcatcagcatcctgacccaggtgattgaggacctggtgcggggggagttcctgcagctgggcagcaaagaaaatgaaaatgaaagatttgcccactacctggagaagaccttcaagaagacagccagcctcatcgccaacagctgcaaggctgtgtctgtgctgggctgcccagaccctgtggtgcatgagatcgcctaccagtatggcaagaatgtgggcatcgccttccagctgattgatgatgtgctggacttcaccagctgcagcgaccagatgggcaagcccaccagcgctgacctgaagctgggcctggccaccggccctgtgctgtttgcctgccagcagtttcctgagatgaatgccatgatcatgaggcgcttcagcctgcctggagatgtggaccgggcccggcagtatgtgctgcagagtgatggagtgcagcagaccacctacctggcccagcagtactgccacgaggccatccgggagatcagcaagctgcggcccagccctgagagagatgccctgatccagctgtctgagatcgtgctgacccgggacaagtag

SEQ ID NO: 179183 - DNA, 921 bp, Artificial Sequence
  derived and/or modified sequence
atggccagccggtggtggcggtggcggcggggctgcagctggaagcccgcggcgagaagtcccggccccggatccccgggcagagctggccctttagggccatcagctgcggcggaagtacgggcccaggtgcatagacggaagggtctcgacttgagtcagataccttatattaatctggtgaaacatctcacgtctgcgtgccctaacgtgtgtagaatcagtcgattccaccacacaacccccgactccaagacacactccggcgaaaagtatactgaccccttcaaactggggtggcgggacctgaagggtctatacgaagacataagaaaggaactgcttattagtacttctgaactgaaggagatgagcgaatactacttcgatgggaaaggaaaggcatttcgccctatcatcgtagcgttaatggcgcgtgcatgtaatatacaccacaacaattcacggcatgtccaggccagtcaacgcgccattgccttgatcgctgagatgatacatacagcaagcttagtgcacgatgatgtgatcgatgatgcttcgagcagacgaggcaagcacacggtgaacaagatttggggcgagaagaaggccgttctagctggagatctgatcctgtctgccgctagtattgccttagctcggattggtaacacgacagtgatttcaatcttgacacaagttattgaagacctagtgaggggagagttcttgcagcttggaagtaaggagaacgagaatgagagattcgcccactatctcgaaaagaccttcaagaaaaccgcaagtctcattgcaaactcgtgcaaggctgtttttcctcgtaacgaatgttatgaccacgccaccgtgcagttcgcctggcgctgtcgacagagtagtaccgtgtgtaccacagaatag

SEQ ID NO: 179184 - DNA, 1248 bp, Artificial Sequence
  derived and/or modified sequence
atggccagccggtggtggcggtggcggcggggctgcagctggaagcccgctgctcggagcccaggacctggaagcccaggacgcgccggccccctgggtccatccgctgccgcagaagtgcgggcgcaggtccaccgccggaaaggattagacctatcccagataccttacatcaatctagtgaagcacctgacgtccgcgtgccccaacgtgtgcagaatctctcggttccaccacaccacacctgattctaagactcattccggcgaaaagtatacagaccctttcaaactggggtggcgtgatctgaaaggcttgtacgaggacatcagaaaagaactgctgatctcaacgagcgaactgaaggagatgtctgagtactactttgatggtaaaggcaaggccttcaggccaattatcgtggccttgatggccagggcgtgtaatatccatcacaacaacagtcgtcacgtccaggcatcccagcgggctatagccctgattgccgagatgattcacactgcgagcctggtgcacgatgacgtgatcgacgacgcttctagcaggcgaggtaagcacaccgtcaacaagatctggggggaaaaaaaggccgtgctggcgggagacctgatcctaagcgccgcctctatagcgctggcccgcattggcaatacaaccgtcatcagcatccttactcaggtgattgaggatctggttcggggcgagttcctccaactaggcagcaaggagaacgagaacgaacggttcgcccattacctcgagaaaacttttaaaaagactgcatcattgatagcaaatagctgtaaggcagtgagtgtgctaggctgccctgatcccgtagtgcacgagatagcctaccaatacgggaaaaacgtgggaattgctttccaactgatcgacgatgtgctggattttacctcctgttccgaccaaatgggcaaacctacatcagccgacttaaaattaggtctcgccactggcccggtgctgttcgcatgccaacagttcccggagatgaatgcaatgattatgcgtagattcagcctgccgggggatgtggatagggcaagacaatacgtgctccagtctgatggggtccagcagactacgtatctagcccagcagtactgtcacgaggctattcgagagatttcaaaacttcggcctagtccagagagggacgcgctgatccaattgtctgagatcgtgctcacccgagacaaatag

SEQ ID NO: 179185 - DNA, 1131 bp, Artificial Sequence
  derived and/or modified sequence
atgcccgcccacgtgcaccggcggaagggcctggacctgagccagatcccctatataaacctggtgaagcatctcactagtgcctgcccaaatgtctgcagaatttccaggtttcaccacaccactcccgactccaagacacacagcggcgagaagtacactgacccgttcaagctgggttggcgcgatttgaagggcctttacgaagatatccgaaaggaactgttaatcagtacatcagaactcaaggagatgtccgaatactacttcgacggtaagggaaaagcgttccggcctatcattgtggctcttatggcacgggcatgcaatatccaccacaacaactcccgccacgtgcaggcttcccagcgagctatagctttgatcgcagaaatgattcatactgcgagcctcgtgcacgatgacgtcattgacgatgcctccagcaggaggggaaagcatactgtgaacaaaatctggggcgagaagaaagctgtgctggccggcgacctgatactgtccgcggcttctattgccctggccaggattggcaataccaccgtgatcagtattctcacacaggtaatagaagatctcgtgcggggggaattcctacagctcgggtctaaagaaaatgaaaacgagcgattcgcccattatttggaaaagacctttaagaagaccgcttcgctgatcgctaattcttgcaaggccgtttccgtactgggatgccctgaccctgtggtgcacgagatcgcataccaatatgggaaaaacgtgggaattgcctttcagttgattgacgacgtgctcgactttacatcctgtagcgaccagatgggaaagcctacctctgctgatctcaagttaggcttggcaactggtccggtcctgttcgcctgccagcagtttccagagatgaatgccatgatcatgcgcaggttttctctgccaggcgacgttgaccgtgcccgccagtatgtgctgcagagtgatggcgttcagcagaccacttacctggcccagcagtactgtcacgaggccattagagagattagcaagcttcgacctagccctgagcgggatgcccttatccagttgtccgagattgtcctgacgcgggataagtag

SEQ ID NO: 179186 - DNA, 1425 bp, Artificial Sequence
  derived and/or modified sequence
gccagaggcggagccgccgccctgccgcgactttcagactccgaccatggcctcgcgctggtggcggtggcggcgcggctgctcctggaagccggcggcgcggagccccgggcccggctcccccggccgtgcgggaccgttggggccgagcgccgctgccgaagtccgcgcgcaggttcataggcggaagggacttgacttgtctcagataccctatattaatcttgtgaagcatttaacatctgcctgtccaaatgtatgtcgtatatcacggtttcatcacacaaccccagacagtaaaacacacagtggtgaaaaatacaccgatcctttcaaactcggttggagagacttgaaaggtctgtatgaggacattagaaaggaactgcttatatcaacatcagaacttaaggaaatgtctgagtactactttgatgggaaagggaaagcctttcgaccaattattgtggcgctaatggcccgagcatgcaatattcatcataacaactcccgacatgtgcaagccagccagcgcgccatagccttaattgcagaaatgatccacactgctagtctggttcacgatgacgttattgacgatgcaagttctcgaagaggaaaacacacagttaataagatctggggtgaaaagaaggctgttcttgctggagatttaattctttctgcagcatctatagctctggcacgaattggaaatacaactgttatatctattttaacccaagttattgaagatttggtgcgtggtgaatttcttcagctcgggtcaaaagaaaatgagaatgaaagatttgcacactaccttgagaagacattcaagaagaccgccagcctgatagccaacagttgtaaagcagtatttcccagaaatgaatgctatgatcatgcgacggttcagtttgcctggagatgtagacagagctcgacagtatgtactacagagtgatggtgtgcaacaaacaacctacctcgcccagcagtactgccatgaagcaataagagagatcagtaaacttcgaccatccccagaaagagatgccctcattcagctttcagaaattgtactcacaagagataaatgacaactctttctgttctttctggcagctatcttaccagactgtgcctaaagaattttgtggaatacactttgtttgcttcatgtgcagataaccaaaaatcattttaaaagatatcaaacttattgatgggcaatttatttttttttattgcaaaagttttttcagaaaactttttaaatgtaattaataaaccacctgaatctgtcattctagtcctataaattataatcaaggtatcttgatggttatatgtggtattgtttacactgttaatatccacatgtaaggccattacacaaataaataaccaatgttaaaattc

SEQ ID NO: 179187 - DNA, 1626 bp, Artificial Sequence
  derived and/or modified sequence
atcgcgggccagaggcggagccgccgccctgccgcgactttcagactccgaccatggcctcgcgctggtggcggtggcggcgcggctgctcctggaagccggcggcgcggagccccgggcccggctcccccggccgtgcgggaccgttggggccgagcgccgctgccgaagtccgcgcgcaggttcataggcggaagggacttgacttgtctcagataccctatattaatcttgtgaagcatttaacatctgcctgtccaaatgtatgtcgtatatcacggtttcatcacacaaccccagacagtaaaacacacagtggtgaaaaatacaccgatcctttcaaactcggttggagagacttgaaaggtctgtatgaggacattagaaaggaactgcttatatcaacatcagaacttaaggaaatgtctgagtactactttgatgggaaagggaaagcctttcgaccaattattgtggcgctaatggcccgagcatgcaatattcatcataacaactcccgacatgtgcaagccagccagcgcgccatagccttaattgcagaaatgatccacactgctagtctggttcacgatgacgttattgacgatgcaagttctcgaagaggaaaacacacagttaataagatctggggtgaaaagaaggctgttcttgctggagatttaattctttctgcagcatctatagctctggcacgaattggaaatacaactgttatatctattttaacccaagttattgaagatttggtgcgtggtgaatttcttcagctcgggtcaaaagaaaatgagaatgaaagatttgcacactaccttgagaagacattcaagaagaccgccagcctgatagccaacagttgtaaagcagtctctgttctaggatgtcccgacccagtggtgcatgagatcgcctatcagtacggaaaaaatgtaggaatagcttttcagctaatagatgatgtattggacttcacctcgtgttctgaccagatgggcaaaccaacatcagctgatctgaagctcgggttagccactggtcctgtcctgtttgcctgtcagcagttcccagaaatgaatgctatgatcatgcgacggttcagtttgcctggagatgtagacagagctcgacagtatgtactacagagtgatggtgtgcaacaaacaacctacctcgcccagcagtactgccatgaagcaataagagagatcagtaaacttcgaccatccccagaaagagatgccctcattcagctttcagaaattgtactcacaagagataaatgacaactctttctgttctttctggcagctatcttaccagactgtgcctaaagaattttgtggaatacactttgtttgcttcatgtgcagataaccaaaaatcattttaaaagatatcaaacttattgatgggcaatttatttttttttattgcaaaagttttttcagaaaactttttaaatgtaattaataaaccacctgaatctgtcattctagtcctataaattataatcaaggtatcttgatggttatatgtggtattgtttacactgttaatatccacatgtaaggccattacacaaataaataaccaatgttaaaattcaaa

SEQ ID NO: 179188 - DNA, 1453 bp, Artificial Sequence
  derived and/or modified sequence
atgccagcccatgttcataggcggaagggacttgacttgtctcagataccctatattaatcttgtgaagcatttaacatctgcctgtccaaatgtatgtcgtatatcacggtttcatcacacaaccccagacagtaaaacacacagtggtgaaaaatacaccgatcctttcaaactcggttggagagacttgaaaggtctgtatgaggacattagaaaggaactgcttatatcaacatcagaacttaaggaaatgtctgagtactactttgatgggaaagggaaagcctttcgaccaattattgtggcgctaatggcccgagcatgcaatattcatcataacaactcccgacatgtgcaagccagccagcgcgccatagccttaattgcagaaatgatccacactgctagtctggttcacgatgacgttattgacgatgcaagttctcgaagaggaaaacacacagttaataagatctggggtgaaaagaaggctgttcttgctggagatttaattctttctgcagcatctatagctctggcacgaattggaaatacaactgttatatctattttaacccaagttattgaagatttggtgcgtggtgaatttcttcagctcgggtcaaaagaaaatgagaatgaaagatttgcacactaccttgagaagacattcaagaagaccgccagcctgatagccaacagttgtaaagcagtctctgttctaggatgtcccgacccagtggtgcatgagatcgcctatcagtacggaaaaaatgtaggaatagcttttcagctaatagatgatgtattggacttcacctcgtgttctgaccagatgggcaaaccaacatcagctgatctgaagctcgggttagccactggtcctgtcctgtttgcctgtcagcagttcccagaaatgaatgctatgatcatgcgacggttcagtttgcctggagatgtagacagagctcgacagtatgtactacagagtgatggtgtgcaacaaacaacctacctcgcccagcagtactgccatgaagcaataagagagatcagtaaacttcgaccatccccagaaagagatgccctcattcagctttcagaaattgtactcacaagagataaatgacaactctttctgttctttctggcagctatcttaccagactgtgcctaaagaattttgtggaatacactttgtttgcttcatgtgcagataaccaaaaatcattttaaaagatatcaaacttattgatgggcaatttatttttttttattgcaaaagttttttcagaaaactttttaaatgtaattaataaaccacctgaatctgtcattctagtcctataaattataatcaaggtatcttgatggttatatgtggtattgtttacactgttaatatccacatgtaaggccattacacaaataaataaccaatgttaaaattc

SEQ ID NO: 179189 - DNA, 921 bp, Artificial Sequence
  derived and/or modified sequence
atggcaagtaggtggtggagatggaggagggggtgctcatggaagcccgcagctcgcagcccaggcccagggtcccccggaagagctggccctctggggccatcagccgctgctgaggtaagagcacaagtccatagacgaaaaggactggaccttagtcagatcccctacattaatcttgtcaaacaccttacatcagcttgtcctaatgtgtgccgcatcagccgttttcaccatactactcccgattcaaaaacccactcaggagagaagtacactgacccgttcaaactgggctggagagacttgaaaggcctgtatgaggacataaggaaggaattattgatatccacctcagagttgaaagagatgtctgagtactacttcgacggcaaaggcaaggccttccgccctataatcgtcgctctcatggcccgagcttgcaatatccaccataataacagtaggcatgtacaagcaagccaacgggctatagccctaattgctgaaatgatccataccgcttctctggtgcacgacgatgtgatcgacgatgcctccagccgtcggggaaagcacacagtgaacaagatatggggtgagaaaaaggctgtcctggcaggggacctgatcctgtcagcagcgtccattgccctcgcaaggatcggcaacaccacagtcatttccatactaacacaggtcatcgaggatctggtcaggggggaattcctgcaattgggaagcaaagaaaacgagaacgagcgcttcgcacattacttagaaaagacgttcaaaaaaactgccagcctgattgccaattcgtgtaaagccgtctttccaagaaacgagtgttacgatcatgcgaccgtccagttcgcctggcggtgtcggcagtcctcaacggtctgcaccaccgaatag

SEQ ID NO: 179190 - DNA, 1248 bp, Artificial Sequence
  derived and/or modified sequence
atggcatctcgctggtggaggtggaggagaggatgtagttggaagcctgccgctagaagcccaggtcctgggtcacctggaagggcaggccctctgggaccatctgccgcagctgaagtgcgggctcaggtccaccggcgtaaaggactggatctctcccagataccttatattaacctcgtgaaacatttaaccagcgcgtgcccaaatgtgtgcagaatctctcgctttcaccacaccacccccgactcaaaaacgcactctggagagaagtatacggaccccttcaaattaggttggagagatctgaaaggtctctacgaagacatccggaaggaattgctgatcagcacaagcgaacttaaagaaatgtccgaatattatttcgatggaaaaggcaaagcatttagacccattatcgtagcactgatggccagggcctgtaatatccaccacaataacagtagacacgttcaagcgtctcaaagagctatcgcacttatcgccgagatgatccacacagcgagcctggtacacgacgatgtgattgatgatgcaagctcccggagaggcaaacataccgtcaacaaaatatggggggagaaaaaagctgtgcttgctggcgatctgatcctctccgcagccagcatcgcactcgccagaattgggaataccaccgtaatttcaatcctgacccaggtgatagaggacctcgtgagaggagagttcctacaattaggcagtaaagagaatgagaacgaacggtttgcccattatctggaaaagacctttaagaaaaccgcatccctcatcgccaattcctgcaaggcagtgagcgtactcggatgtcccgatccggtggtacatgagatcgcctaccagtacgggaagaacgttggaattgcctttcagctcatcgacgacgtcctggactttacttcatgctctgatcaaatgggtaaacctactagcgcagatcttaagctagggctggcaacaggcccagtgctcttcgcatgtcagcagtttcccgagatgaacgcgatgatcatgagacggttcagtttgcccggtgatgttgatcgcgctcgacagtacgtcctccagagcgatggggtccagcaaactacatacctggcccagcagtactgtcacgaggctatccgcgagatcagcaaactacgcccatcacccgagcgggacgccctaatccagctgtcggaaattgttctgacacgggacaagtag

SEQ ID NO: 179191 - DNA, 1131 bp, Artificial Sequence
  derived and/or modified sequence
atgcccgcacacgtacacagacgaaagggactggatctgagtcagatcccgtatattaatttagtgaagcatctcaccagcgcatgtccaaatgtatgccggatctccagatttcatcacaccacgcctgatagtaagacccattctggggaaaagtacacagacccgtttaagctggggtggcgggacctgaagggcctgtacgaggatatacggaaagagttgttaatatccacatccgagttgaaggaaatgagtgaatactattttgacggtaaggggaaagcctttagaccaattatcgtggctttaatggcgagggcctgcaacatccatcacaacaacagcagacacgtgcaggcaagccagagagcgatcgccttaattgccgagatgattcacactgccagcttagtgcacgacgatgtcatagacgacgcatcttctcggagaggcaaacatactgtgaacaaaatctggggtgagaagaaagcagtgttggccggagacctcatcctgtcggcagcttcaatcgccctggccaggattggcaataccaccgttatcagcattctgacgcaggttatagaggatttggtgagaggcgagttcctgcaactgggatctaaggagaacgagaacgaacggttcgctcactaccttgagaaaacctttaaaaagacagcctcccttatcgccaatagttgtaaagcagtctctgtgcttggttgtccagaccctgtggtgcatgagatcgcataccaatacggcaaaaacgtggggattgcctttcaactgatcgacgacgtcctggacttcaccagttgctctgatcagatggggaaaccgaccagtgcagacctgaagctggggctggcgaccggcccagtgcttttcgcatgtcaacaattccctgagatgaacgccatgatcatgagacgcttcagtctccctggagatgtagatagagccaggcagtacgtgctacagagtgatggcgtgcagcagactacctacttggcacagcagtactgccacgaagctatcagggagatatccaagttacgcccaagccccgaacgggatgcgctgattcagttaagcgaaattgttctgacccgtgacaaatag

SEQ ID NO: 179192 - DNA, 921 bp, Artificial Sequence
  derived and/or modified sequence
atggccagcagatggtggagatggagaagaggctgcagctggaagcccgccgccagaagccccggccccggcagccccggcagagccggccccctgggccccagcgccgccgccgaggtgagagcccaggtgcacagaagaaagggcctggacctgagccagatcccctacatcaacctggtgaagcacctgaccagcgcctgccccaacgtgtgcagaatcagcagattccaccacaccacccccgacagcaagacccacagcggcgagaagtacaccgaccccttcaagctgggctggagagacctgaagggcctgtacgaggacatcagaaaggagctgctgatcagcaccagcgagctgaaggagatgagcgagtactacttcgacggcaagggcaaggccttcagacccatcatcgtggccctgatggccagagcctgcaacatccaccacaacaacagcagacacgtgcaggccagccagagagccatcgccctgatcgccgagatgatccacaccgccagcctggtgcacgacgacgtgatcgacgacgccagcagcagaagaggcaagcacaccgtgaacaagatctggggcgagaagaaggccgtgctggccggcgacctgatcctgagcgccgccagcatcgccctggccagaatcggcaacaccaccgtgatcagcatcctgacccaggtgatcgaggacctggtgagaggcgagttcctgcagctgggcagcaaggagaacgagaacgagagattcgcccactacctggagaagaccttcaagaagaccgccagcctgatcgccaacagctgcaaggccgtgttccccagaaacgagtgctacgaccacgccaccgtgcagttcgcctggagatgcagacagagcagcaccgtgtgcaccaccgagtag

SEQ ID NO: 179193 - DNA, 1248 bp, Artificial Sequence
  derived and/or modified sequence
atggccagcagatggtggagatggagaagaggctgcagctggaagcccgccgccagaagccccggccccggcagccccggcagagccggccccctgggccccagcgccgccgccgaggtgagagcccaggtgcacagaagaaagggcctggacctgagccagatcccctacatcaacctggtgaagcacctgaccagcgcctgccccaacgtgtgcagaatcagcagattccaccacaccacccccgacagcaagacccacagcggcgagaagtacaccgaccccttcaagctgggctggagagacctgaagggcctgtacgaggacatcagaaaggagctgctgatcagcaccagcgagctgaaggagatgagcgagtactacttcgacggcaagggcaaggccttcagacccatcatcgtggccctgatggccagagcctgcaacatccaccacaacaacagcagacacgtgcaggccagccagagagccatcgccctgatcgccgagatgatccacaccgccagcctggtgcacgacgacgtgatcgacgacgccagcagcagaagaggcaagcacaccgtgaacaagatctggggcgagaagaaggccgtgctggccggcgacctgatcctgagcgccgccagcatcgccctggccagaatcggcaacaccaccgtgatcagcatcctgacccaggtgatcgaggacctggtgagaggcgagttcctgcagctgggcagcaaggagaacgagaacgagagattcgcccactacctggagaagaccttcaagaagaccgccagcctgatcgccaacagctgcaaggccgtgagcgtgctgggctgccccgaccccgtggtgcacgagatcgcctaccagtacggcaagaacgtgggcatcgccttccagctgatcgacgacgtgctggacttcaccagctgcagcgaccagatgggcaagcccaccagcgccgacctgaagctgggcctggccaccggccccgtgctgttcgcctgccagcagttccccgagatgaacgccatgatcatgagaagattcagcctgcccggcgacgtggacagagccagacagtacgtgctgcagagcgacggcgtgcagcagaccacctacctggcccagcagtactgccacgaggccatcagagagatcagcaagctgagacccagccccgagagagacgccctgatccagctgagcgagatcgtgctgaccagagacaagtag

SEQ ID NO: 179194 - DNA, 1131 bp, Artificial Sequence
  derived and/or modified sequence
atgcccgcccacgtgcacagaagaaagggcctggacctgagccagatcccctacatcaacctggtgaagcacctgaccagcgcctgccccaacgtgtgcagaatcagcagattccaccacaccacccccgacagcaagacccacagcggcgagaagtacaccgaccccttcaagctgggctggagagacctgaagggcctgtacgaggacatcagaaaggagctgctgatcagcaccagcgagctgaaggagatgagcgagtactacttcgacggcaagggcaaggccttcagacccatcatcgtggccctgatggccagagcctgcaacatccaccacaacaacagcagacacgtgcaggccagccagagagccatcgccctgatcgccgagatgatccacaccgccagcctggtgcacgacgacgtgatcgacgacgccagcagcagaagaggcaagcacaccgtgaacaagatctggggcgagaagaaggccgtgctggccggcgacctgatcctgagcgccgccagcatcgccctggccagaatcggcaacaccaccgtgatcagcatcctgacccaggtgatcgaggacctggtgagaggcgagttcctgcagctgggcagcaaggagaacgagaacgagagattcgcccactacctggagaagaccttcaagaagaccgccagcctgatcgccaacagctgcaaggccgtgagcgtgctgggctgccccgaccccgtggtgcacgagatcgcctaccagtacggcaagaacgtgggcatcgccttccagctgatcgacgacgtgctggacttcaccagctgcagcgaccagatgggcaagcccaccagcgccgacctgaagctgggcctggccaccggccccgtgctgttcgcctgccagcagttccccgagatgaacgccatgatcatgagaagattcagcctgcccggcgacgtggacagagccagacagtacgtgctgcagagcgacggcgtgcagcagaccacctacctggcccagcagtactgccacgaggccatcagagagatcagcaagctgagacccagccccgagagagacgccctgatccagctgagcgagatcgtgctgaccagagacaagtag

SEQ ID NO: 179195 - protein, 911 aa, Artificial Sequence
  derived and/or modified sequence
MAAAAASAPQQLSDEELFSQLRRYGLSPGPVTESTRPVYLKKLKKLREEEQQQHRSGGRGNKTRNSNNNNTAAATVAAAGPAAAAAAGMGVRPVSGDLSYLRTPGGLCRISASGPESLLGGPGGASAAPAAGSKVLLGFSSDESDVEASPRDQAGGGGRKDRASLQYRGLKAPPAPLAASEVTNSNSAERRKPHSWWGARRPAGPELQTPPGKDGAVEDEEGEGEDGEERDPETEEPLWASRTVNGSRLVPYSCRENYSDSEEEDDDDVASSRQVLKDDSLSRHRPRRTHSKPLPPLTAKSAGGRLETSVQGGGGLAMNDRAAAAGSLDRSRNLEEAAAAEQGGGCDQVDSSPVPRYRVNAKKLTPLLPPPLTDMDSTLDSSTGSLLKTNNHIGGGAFSVDSPRIYSNSLPPSAAVAASSSLRINHANHTGSNHTYLKNTYNKPKLSEPEEELLQQFKREEVSPTGSFSAHYLSMFLLTAACLFFLILGLTYLGMRGTGVSEDGELSIENPFGETFGKIQESEKTLMMNTLYKLHDRLAQLAGDHECGSSSQRTLSVQEAAAYLKDLGPEYEGIFNTSLQWILENGKDVGIRCVGFGPEEELTNITDVQFLQSTRPLMSFWCRFRRAFVTVTHRLLLLCLGVVMVCVVLRYMKYRWTKEEEETRQMYDMVVKIIDVLRSHNEACQENKDLQPYMPIPHVRDSLIQPHDRKKMKKVWDRAVDFLAANESRVRTETRRIGGADFLVWRWIQPSASCDKILVIPSKVWQGQAFHLDRRNSPPNSLTPCLKIRNMFDPVMEIGDQWHLAIQEAILEKCSDNDGIVHIAVDKNSREGCVYVKCLSPEYAGKAFKALHGSWFDGKLVTVKYLRLDRYHHRFPQALTSNTPLKPSNKHMNSMSHLRLRTGLTNSQGSS

SEQ ID NO: 179196 - DNA, 2736 bp, Artificial Sequence
  derived and/or modified sequence
atggctgcagcggccgccagcgcaccccagcagcttagcgatgaggagctgtttagccaattgcggagatatggcctgtctccggggcctgtaaccgaaagcactcggcccgtgtacctcaaaaagctgaaaaaactcagggaggaggaacagcagcagcatcggtcgggcggccgcgggaataaaactaggaacagcaataacaacaataccgctgccgcgacagtcgccgctgccgggccggcagccgccgccgccgcaggcatgggtgtcagacccgtgtctggtgacttgtcatatctgcgcacccctggggggctatgccggataagcgctagtggcccggagtctctgctgggtggcccaggcggtgcgtctgccgctccagccgccggttctaaagtgttgctcggcttttcgagcgacgaatccgatgtggaggcttccccccgagatcaagcaggcggcgggggccgaaaggatagagccagtctgcagtacagagggctcaaagctccaccggccccactggccgcttcagaggtcacgaactccaactccgccgagagaaggaagccacactcgtggtggggagctaggaggcccgccgggccggaactacagacccctccgggcaaggatggagctgtggaagatgaggagggggaaggagaggacggcgaggaacgcgacccggagactgaggagcctttgtgggcatctcgcacagttaacggctctagactcgtaccttacagctgtagagagaactattctgacagcgaagaagaggatgacgatgacgtcgccagttcccggcaggtcctgaaagatgacagtctttctcggcatagaccaagacgaactcattctaagcctctccctccactgaccgccaaatccgccgggggacgccttgaaacctcagtgcagggtggcggcggactggccatgaatgacagggctgctgcagctggatccctcgacagatcccggaatcttgaggaggccgccgccgctgagcaaggaggcggctgcgaccaagtggacagctcaccggtgccccggtaccgcgtcaatgcaaagaagctcactccactgctcccgccccctttgacagacatggactcaaccctcgattccagcaccggctccctgttaaaaaccaacaaccatatcggaggaggcgccttcagcgttgattctcctagaatttactcaaacagtctccccccaagcgccgcagttgccgccagctccagtctccgcatcaatcacgccaatcacacgggctcaaaccatacctacttgaaaaacacctataacaaacctaagctgagtgagcccgaggaagaactgctgcaacagtttaagagagaggaagtctccccgaccggcagcttttcagctcactacttatctatgttcctattgacagccgcatgcttgttctttcttatactcggccttacctatttgggcatgaggggaacaggggtatcggaagatggcgaactcagtatagagaatccttttggcgaaacattcggcaagattcaggagtccgaaaaaacacttatgatgaataccctgtacaaactgcacgatagacttgcacagctggccggtgaccacgagtgcgggagcagtagccagagaaccctcagcgtccaggaagccgcagcctatctgaaagacctgggtcccgagtacgagggcatatttaacacgagcctgcagtggatcctggaaaacgggaaggatgtgggcattaggtgcgtgggctttggccctgaggaagagctcacgaacatcacagacgtccagttcctgcagtccactcgtcctttaatgagcttctggtgccgctttagacgcgcattcgtcacagttactcaccgtcttctgctgctgtgcctgggagtagtgatggtgtgtgtggtgctgcgctacatgaagtatagatggacgaaggaagaggaggaaacacgccaaatgtacgacatggttgtgaagattatcgatgtcttgcggagtcacaatgaggcctgccaggaaaataaagaccttcagccctacatgcctattccacatgtgcgagacagcttaatccaaccacatgaccgaaagaagatgaaaaaggtctgggatagagctgtggacttcctggcggccaacgagtctcgggttagaaccgaaactcggcgcattggcggtgctgattttctggtatggaggtggattcagccttctgcatcatgcgacaagatcctcgtcattcccagcaaggtgtggcagggccaggcgtttcacctcgacagaaggaattctccacctaattcactgacgccctgccttaaaattcgcaatatgttcgacccagtcatggagattggagatcagtggcatttagcaatacaggaagccattcttgagaaatgcagcgacaacgatggtatcgtgcacattgccgtggacaagaactccagggaagggtgcgtatacgtaaagtgcctgtctcccgagtacgccgggaaagctttcaaggcattacatgggagctggttcgacggaaagttggtcacagtaaagtacctacgactcgatcggtatcaccacaggtttcctcaggcgctgacttccaacacaccgctcaagcctagcaacaagcacatgaattctatgtctcatctgaggttgcgtaccggcttaaccaatagccagggatcatcttag

SEQ ID NO: 179197 - DNA, 2736 bp, Artificial Sequence
  derived and/or modified sequence
atggctgctgctgctgccagcgccccccagcagctgagtgatgaggagctgttcagccagctgcggcgctatggcctgagccctggccctgtgacagagagcaccaggcctgtgtacctgaagaagctgaagaagctgcgggaggaggagcagcagcagcacaggtctgggggccggggcaacaagaccaggaacagcaacaacaacaacacagctgctgccaccgtggccgctgctggccctgctgctgctgctgctgctggcatgggcgtgcggcctgtgtctggggacctgagctacctgcggacccctgggggcctgtgccgcatcagcgccagcggccctgagagcctgctgggcggccctgggggcgccagcgctgccccagctgctggcagcaaggtgctgctgggcttcagcagtgatgaaagtgatgtggaggccagcccccgggaccaggccggcggcggcggcaggaaggaccgggccagcctgcagtaccggggcctgaaggcccccccagcccccctggccgccagcgaggtgaccaacagcaacagcgctgagaggaggaagccccacagctggtggggcgcccggcggcctgctggccctgagctgcagaccccacctgggaaggatggagctgtggaggatgaggagggggagggagaagatggagaggagcgggaccctgagacagaggagcccctgtgggccagcaggacagtgaatggcagccggctggtgccctacagctgccgggagaactacagcgacagcgaggaggaggatgatgatgatgtggccagcagccggcaggtgctgaaggatgacagcctgagccgccaccggcccaggaggacccacagcaagcccctgccccccctgacagccaagtctgctgggggccgcctggagacctctgtgcagggcggcggcggcctggccatgaatgacagagctgctgctgctggcagcctggacaggagcaggaacctggaggaggccgctgctgctgagcagggcggcggctgtgaccaggtggacagcagccctgtgccccgctacagagtgaatgccaagaagctgacccccctgctgcccccacccctgacagacatggacagcaccctggacagcagcacaggcagcctgctgaagaccaacaaccacatcggcggcggggccttctctgtggacagcccccgcatctacagcaacagcctgcccccatctgctgctgtggccgccagcagcagcctgcgcatcaaccacgccaaccacacaggcagcaaccacacctacctgaagaacacctacaacaagcccaagctgtctgagcctgaggaggagctgctgcagcagttcaagcgggaggaggtgagccccaccggcagcttcagcgcccactacctgtccatgttcctgctgacagctgcctgcctcttcttcctgatcctgggcctgacctacctgggcatgaggggcaccggggtgtctgaagatggagagctgagcattgagaacccctttggagagaccttcggcaagatccaggagagcgagaagaccctgatgatgaacaccctgtacaagctgcatgaccggctggcccagctggccggggaccatgaatgtggcagcagcagccagaggaccctgtctgtgcaggaggccgccgcctacctgaaggacctgggcccagaatatgagggcatcttcaacaccagcctgcagtggatcctggagaatggcaaggatgtgggcatccgctgtgtgggcttcggccctgaggaggagctgaccaacatcacagatgtgcagttcctgcagagcacccggcccctgatgtccttctggtgccgcttcagaagagcctttgtgacagtgacccaccggctgctgctgctgtgcctgggcgtggtgatggtgtgtgtggtgctgcgctacatgaagtaccgctggaccaaggaggaggaggagacccggcagatgtatgacatggtggtgaagatcattgatgtgctgcggagccacaatgaggcctgccaggagaacaaggacctgcagccctacatgcccatcccccacgtgcgggacagcctcatccagccccatgacaggaagaagatgaagaaggtgtgggacagagctgtggacttcctggccgccaatgaaagccgggtgaggacagagaccaggagaattggaggagctgacttcctggtgtggcgctggatccagcccagcgccagctgtgacaagatcctggtgatccccagcaaggtgtggcagggccaggccttccacctggacagaagaaacagcccccccaacagcctgaccccctgcctgaagatccggaacatgtttgatcctgtgatggagatcggggaccagtggcacctggccatccaggaggccatcctggagaagtgcagcgacaatgatggcatcgtgcacatcgctgtggacaagaacagccgggagggctgtgtgtatgtgaagtgcctgagcccagaatatgctgggaaggccttcaaggccctgcacggctcctggtttgatggcaagctggtgacagtgaagtacctgcggctggaccgctaccaccaccgcttcccccaggccctgaccagcaacacccccctgaagcccagcaacaagcacatgaacagcatgagccacctgcggctgaggacaggcctgaccaacagccagggcagcagctag

SEQ ID NO: 179198 - DNA, 4764 bp, Artificial Sequence
  derived and/or modified sequence
agcttgtaaaacaccctggagagaaaatggcggcggcagcagcttcggcgcctcagcagctctcggatgaggagcttttctctcagctccgccgttacggcctgtctcccggaccagtgacggagagcacccgcccggtctacctcaagaagctgaagaagcttcgagaggaagagcagcaacagcaccggtcagggggccgcggcaacaagacgcggaacagtaataacaataacacggcagccgccacggtcgcagccgcgggaccagcggcggcggcggccgcggggatgggggtccggccggtctcgggcgacctctcctacttacggactcctgggggcctgtgccgaatctcggcctctggcccagagagcctcctgggagggcccgggggcgcctccgccgcccccgcggctggcagcaaagtgctgctgggcttcagctcggacgagtcggacgtggaggccagtccccgggaccaggccggcggcggcgggaggaaagaccgggcttcgctccagtaccgcgggctcaaagcgccgccggcgcccctggccgccagcgaggtgactaacagcaactctgcagagcgaaggaagccccactcgtggtggggggccaggaggccggcgggccccgagctgcagaccccgccggggaaagatggagcagtggaggacgaggaaggggagggagaggacggtgaggagagggacccggagaccgaggagccgctctgggcgagccggaccgtgaatggcagccggcttgtcccctacagctgccgggaaaactattcggactcagaggaagaggacgacgacgacgtggcctccagcagacaggtattaaaggacgactccctttcccggcatcggcccagacgaacccatagtaagcctctccccccgctgactgctaaatcggccggcggcaggctggagacttcagttcagggagggggaggactcgcgatgaatgacagggcggcggctgccgggagtctagacaggagccgaaacctcgaagaggcggcggccgcggagcagggaggagggtgtgatcaagtggactccagccccgttcctagataccgtgttaacgctaagaaactgacccctctcctgcccccgccacttactgacatggactcaaccttggattcgtcaacaggctcccttctgaaaaccaataatcatattggcggtggggccttcagtgtggactcccccaggatttattctaacagtctccctcccagtgcggcggtggccgcctctagttcactcaggatcaatcacgccaatcatacgggctccaatcatacctacctgaaaaacacatacaacaaaccgaagctttccgaacccgaagaggaacttctccagcaatttaaacgggaggaggtgtccccaacagggagtttcagtgcccactacttgtcgatgtttctcttaactgctgcctgcttatttttcctaatactgggactgacttacctaggaatgagagggacaggagtatctgaggatggagaactcagcatagaaaacccctttggtgaaacatttggaaaaatacaagaaagtgaaaaaactcttatgatgaacacattatataagcttcatgatcgattggcacagcttgcaggagatcatgaatgtggcagttctagtcaaagaacgctttctgttcaagaggcagctgcgtatttaaaagatttaggtcctgaatatgaaggtatatttaacacttcattgcagtggatcttagaaaatggaaaagatgttggaataaggtgtgttggttttggccctgaggaagaattgacaaatataactgatgtgcagtttttacagtccacaagaccactgatgtctttttggtgtcgttttcgacgtgcttttgttactgtaactcacagattattgttgttatgcttaggtgtagtgatggtttgtgtcgttctgcgttacatgaaatatcgatggacaaaagaagaggaggaaacaaggcagatgtatgatatggtggtaaagattatagatgttttacgaagtcataatgaagcctgccaggaaaacaaagatttacaaccttacatgcctattccacatgtacgcgattccttaatacagcctcatgacaggaaaaaaatgaagaaagtctgggatagagctgttgacttccttgctgctaatgagtctagagttcgcacggaaacacgaagaataggtggtgcagattttctggtttggcggtggatccagccttctgcatcctgtgacaaaatattagttataccttctaaagtatggcaaggtcaagcatttcatttagatagaagaaattcaccaccaaatagtttgacaccgtgtctaaagattcggaatatgtttgatcccgttatggaaataggggatcagtggcatttggcaattcaagaagcaattttagaaaaatgcagtgataatgatggcattgttcacattgcagtagacaaaaattcacgtgagggttgtgtatatgttaaatgtctgtctccagaatatgctggaaaggcttttaaagcattgcatggctcttggtttgatgggaaattggttacagtaaaatatttacgactagatagataccaccatcgctttccccaggctctcacttccaacactccattgaagccatcaaataaacatatgaactccatgtctcatcttcgtcttcggactggcctaaccaattctcaaggaagttcctgaaaagattttcttccatttctaagactgttatttacaataggaaaattcctgtttggctttttgtcttcctttttaaatgctttttgtatgtaatatttttattgatgaatacatctctgaacgttccagaagtcttaaggttccaaagggatttagcagtgaggcagcaatgctgagtaggtaggataattatttcattcagtttttggagctcagttaagccaatacatttaaagttttgcatgaggaacactgactttattaagcattttcagatgtggtggttgtatttttgccccaagaagtgtttggataaccacacaaaagcatgatgaaaaggcttcttgtagtcccataatttcttgtgaactaatgttgtgaatttttgtatacagtcacctgcatagttcctacaggctaatgtggtaaaactgttgatttcccaatttaaccttaggtttctgttgcttataagcgattcatttgctacggctggaatatgggaaaattaatttgggcttagtggttacaaatatgtgtaagtggatgtatatgtacttaaactggctttgtatatatgtataaatgctggtggtggtgaaagtagtcttgttttatgaggatgtctgcattaaagcagtaaaataagctttccattttattcataatctaatgtgtgtgtatatatgtatgtgtgtatgtgtgtgtatatatagatgtatatatatacacacacagagatatatacatatggctgtacttttgcatagatcaaacagccaaacacctggaagtattagatacaagtttaaaatatcttttataggttttatataaaaatgtctgagtatgattttgtgtgaaagttctgataccagttgtaatagagtcaaatttatgtgagcaataaagaagaaattggcagatattggaaaaatattttgtgaaaagctgtatttattataaatactagggccatgacatagtaccattggggttaagtcattttcccaatctatttataatttaatgatatgttagtgcctctgttatatgtcaagtttaaagcagggcacattgttgcagcaaaatgtgtatttgacaaattatacttgcaattttgggtcatgaaagtttgcaatatagtaaatgcacgattgactgttgctttgtgcctcagtatttaatttgtttcagtaaacttactttattactgtttatgatttcagataaaaatagttgctgagtaaattttacttgtaatctacaattggctttttaaaaataacctgttgatatataattgtcagtccaaatgaatatgtgaaacagctggaattgtacaaattttggttgtatttaaagctcagtttcctttttgttttattgtatgcgttgggtttgcagcatgaacttgcacagataatgcacgttttctggttaagtaaacatgatgcacactattctgtaacagaaagccctattgtgccttacctgtgtgcttttgtgggcaccttgtttatgaagaataaaaaatgatttgttatctgaagagaataaattttaaattctcagtttatgtctcagatgctaacgtgtgaaaatataaatatatataatatataaagtaaccagtcttcctgtattttatgtgcatcatagtgatttatctgagcttagtgacccccatcttgtaacctgttgcaagagtgaatgtaaaaaatagttgtggcattttaaaaggtcgcctttgatgcagatgcatctttttcttgcttctaaaacatatttcatgtaaacattgtacatttattattgtaatatatactattatgcagcttattttacctgaaactgttaagccgaccaagatccctccctgcaagacagatgggaatgtgtataataactaggtatttgagaagttctgaagtttgatgtaatctgttacttgtcctgttaaaaaaaggaaaaaattctaattaaaaatttattagttttt

SEQ ID NO: 179199 - DNA, 2736 bp, Artificial Sequence
  derived and/or modified sequence
atggccgccgccgccgccagcgccccccagcagctgagcgacgaggagcttttttctcagctgcggcgatacggcttgtcccctggaccagtgactgagtctacacgaccagtgtatctgaaaaaactgaaaaagttgcgtgaggaagaacagcagcagcacagaagcggaggcaggggcaacaagactcgcaattctaacaataacaataccgctgccgccaccgtcgctgccgccggcccagcggccgctgccgcagctggaatgggtgtgcggccggtgtctggggatctgtcttacttgcgaactccaggtggactgtgtcgcataagtgcctccggccccgaatccttgcttggggggcctggaggcgccagtgcggcgcccgccgccggcagtaaggtactactaggattcagtagcgacgaaagcgatgtggaggctagccccagggaccaggcgggcggaggcggtcgaaaggaccgcgccagcctacagtatagaggtctcaaagcaccacctgctcccctggccgcatcagaagtaaccaactccaattctgcagagcgcaggaaaccccattcatggtggggggccagacggccagccggccctgagctccaaactccacccggtaaggatggtgccgtagaagatgaggaaggcgagggtgaggacggcgaggagagagatccggagacggaggagcctttgtgggcgtctaggaccgtaaacggcagcagattggtgccgtacagttgtcgagaaaactacagtgactctgaggaagaggacgatgatgacgttgccagcagccgccaggtcctgaaagatgacagtctttctaggcatagaccccgtcgaactcactcaaaacctctgccccccttaactgctaaatctgccggaggccggctagaaacaagcgtgcagggagggggcgggctggctatgaacgaccgcgccgcagcggcggggagtctcgatcgcagtcggaatctcgaggaggctgctgcagctgagcagggtggcggatgcgatcaggtcgattctagtcccgtgccaaggtaccgggtgaacgccaagaagctgacccctttgctgccaccacccctgaccgacatggactctacgctggactcatctacaggttccctgctgaaaaccaacaatcacatcggcggcggagcattttccgtggactcccccaggatttactccaactcccttccgccaagtgcagctgtggccgcttccagctctcttagaatcaaccacgctaaccataccggcagtaatcacacctacctcaagaatacctacaacaagccaaagctgagcgaacccgaagaggaactgcttcagcagttcaagcgggaggaggtgtctccaaccggcagctttagtgctcattacctctctatgtttctgttgacagccgcctgtttgttctttttgattctaggattgacctatttggggatgagaggaaccggcgtctccgaggacggcgaactctccattgagaacccgtttggtgagacgttcgggaaaatccaggaatctgagaagacactgatgatgaataccctatacaaactccatgacaggttggcccagctggccggcgaccacgagtgtggttcaagtagccagcgaacgctttctgtgcaggaagccgccgcctacttgaaggaccttggcccagaatatgaagggatcttcaataccagtttgcagtggattctggagaacgggaaggacgtgggcatacgatgcgttgggtttgggcccgaagaggaattgaccaatatcaccgatgtgcaatttctccagtcgaccaggcccttgatgagtttttggtgtcgctttaggcgtgcatttgtcacagttacgcacagacttctgctcttatgcctaggggtagtgatggtatgtgtggttctgcggtatatgaaatatagatggaccaaggaggaagaggaaacgcgccagatgtacgatatggttgtgaaaattatcgacgtcctccgctctcacaatgaggcttgccaagagaataaggatcttcagccatacatgcctattccccacgtaagggattcgctgatacagccgcatgacaggaaaaagatgaagaaggtctgggaccgggccgtggatttcttggctgctaacgagtcacgtgtgcgaacagaaacaagacgtattggaggtgcggattttcttgtctggagatggattcagccaagtgcctcttgcgacaagatcctcgtcatcccgtcaaaggtatggcaaggtcaggcctttcacctggacagaagaaatagtccaccaaactcgctgaccccatgcctcaaaatcaggaatatgttcgacccagttatggaaatcggtgatcaatggcatttggctattcaggaggctattctggagaaatgctcggacaatgacggaatcgtgcacatagcagtggacaaaaacagcagggaggggtgcgtgtacgtgaaatgcctgtctccagaatatgccgggaaggccttcaaggccttacacggaagctggttcgatggaaaacttgtgaccgtgaagtacttgaggttagaccgataccaccaccggttccctcaggcgctcacatctaatacccctctgaaaccttctaacaagcacatgaactctatgtcccatcttcgactgcgcacaggcctgactaactctcagggctcttcctag

SEQ ID NO: 179200 - DNA, 2736 bp, Artificial Sequence
  derived and/or modified sequence
atggcagccgcagctgcttcggcaccccagcagctgagtgacgaggagctcttctcccagcttcgcaggtatggcctgtcaccgggtcctgtcactgaatctacccggcctgtttatctgaagaaactgaagaaactccgagaggaagaacagcagcaacatcgaagtggaggcaggggcaataagacacggaacagcaataacaacaacaccgccgctgccacagtggcagccgctggccctgctgccgctgcagctgcaggaatgggtgtgcgaccagtgtcgggcgatctgtcttatctccgcactcctggcggactgtgtcgcatctccgcatccggtccggaatcactccttggcggaccaggtggcgcatccgcggcacccgctgccggtagcaaagtgctgcttgggttcagtagcgacgagtccgacgttgaggcctccccgagggatcaggccggagggggaggacgcaaggatcgggcatctcttcagtaccgaggcctgaaagcacccccagctccattggcagctagtgaggtgactaactccaacagtgccgaaaggcggaaacctcactcgtggtggggtgctagaaggccagcaggcccagagctccagacacctcccggtaaggatggagccgtcgaggacgaagagggcgagggggaggatggtgaggagcgcgaccctgaaacagaagagccattgtgggcaagccggaccgtaaatggctctagattggtaccatattcctgccgtgaaaactatagtgattccgaagaagaagacgatgatgatgttgccagtagtcgccaggttctgaaagacgactcacttagtcgacaccggccacggagaacccacagtaaaccactgccccctctgaccgctaaaagtgcaggtggtcgcctcgaaacttccgtgcagggaggtggaggcctcgcaatgaatgatagggccgcagctgcgggatctctggacagatcgaggaacctcgaggaggcggcagcagctgagcagggtggcggatgcgaccaagtggatagtagccccgtaccgagatatagggtaaatgctaagaagctgacaccgctgcttcctccaccactcacggatatggattccacacttgacagctcgaccggctctctgctgaaaactaataaccacatcggagggggtgccttttccgtggattcccctcggatttacagtaactctctgccaccatcggcggctgttgccgcttcctctagtctgcgtatcaaccacgccaatcacactggctcaaatcatacatatctgaaaaacacctataacaagccaaagctatcagagcccgaagaagagcttcttcagcagttcaaaagggaggaggtttctcctactggatccttcagtgctcattacttgtcaatgtttctgctgaccgccgcatgtctgttctttttgattctggggttgacctacctaggaatgaggggcactggggtcagcgaggatggagagttgtccattgaaaatcctttcggggagacatttggaaagatccaggagagcgaaaagactctgatgatgaataccttgtataagctccatgacagactggcccagctagccggtgaccatgagtgtggcagcagctctcagcgtactctttcagtgcaggaagcagcagcatacctgaaggacctgggaccggaatacgaaggcatttttaacacctcgcttcaatggatcctggaaaacggtaaagatgtgggcattcggtgtgttggctttggtccagaagaggaactgacaaacatcacggacgtccagttccttcagagcaccagaccacttatgtccttctggtgtcggtttaggcgtgcgttcgtgactgttacccatagactgctgctcctgtgcctcggcgtggtgatggtgtgcgttgtgctccgatatatgaaataccgctggaccaaagaagaagaagaaaccaggcaaatgtacgatatggtggtgaagatcattgatgtgttgcggagtcacaatgaggcatgccaggagaataaggacctgcagccatacatgccaataccccatgtgagggactcccttatacaacctcatgacagaaaaaagatgaagaaggtctgggacagggctgtagacttcctggccgctaatgaatcacgggtcaggacagaaacccgcaggatagggggtgcagatttcttggtctggagatggatccagccatccgcatcttgtgacaaaatattggtcatccctagtaaggtctggcagggccaggctttccatctggatcggagaaacagtccaccgaacagcctcaccccatgccttaagatccgaaacatgttcgatccggtgatggagatcggcgatcagtggcacctggctattcaggaggcaattcttgagaagtgctccgataatgacgggatcgtccacatcgccgtggataagaacagcagagaaggctgtgtgtatgtcaagtgcctctctccagaatacgccggaaaggccttcaaggccctgcatgggtcatggttcgacggcaagctagtcactgtcaaatatctcaggttggatcgctatcaccatcgatttcctcaggcactgacctccaatacccctctgaaaccgtccaacaagcacatgaacagtatgtcacacctccgactgaggaccggtctgaccaactctcaaggttcgtcctag

SEQ ID NO: 179201 - DNA, 2736 bp, Artificial Sequence
  derived and/or modified sequence
atggccgccgccgccgccagcgccccccagcagctgagcgacgaggagctgttcagccagctgagaagatacggcctgagccccggccccgtgaccgagagcaccagacccgtgtacctgaagaagctgaagaagctgagagaggaggagcagcagcagcacagaagcggcggcagaggcaacaagaccagaaacagcaacaacaacaacaccgccgccgccaccgtggccgccgccggccccgccgccgccgccgccgccggcatgggcgtgagacccgtgagcggcgacctgagctacctgagaacccccggcggcctgtgcagaatcagcgccagcggccccgagagcctgctgggcggccccggcggcgccagcgccgcccccgccgccggcagcaaggtgctgctgggcttcagcagcgacgagagcgacgtggaggccagccccagagaccaggccggcggcggcggcagaaaggacagagccagcctgcagtacagaggcctgaaggccccccccgcccccctggccgccagcgaggtgaccaacagcaacagcgccgagagaagaaagccccacagctggtggggcgccagaagacccgccggccccgagctgcagaccccccccggcaaggacggcgccgtggaggacgaggagggcgagggcgaggacggcgaggagagagaccccgagaccgaggagcccctgtgggccagcagaaccgtgaacggcagcagactggtgccctacagctgcagagagaactacagcgacagcgaggaggaggacgacgacgacgtggccagcagcagacaggtgctgaaggacgacagcctgagcagacacagacccagaagaacccacagcaagcccctgccccccctgaccgccaagagcgccggcggcagactggagaccagcgtgcagggcggcggcggcctggccatgaacgacagagccgccgccgccggcagcctggacagaagcagaaacctggaggaggccgccgccgccgagcagggcggcggctgcgaccaggtggacagcagccccgtgcccagatacagagtgaacgccaagaagctgacccccctgctgcccccccccctgaccgacatggacagcaccctggacagcagcaccggcagcctgctgaagaccaacaaccacatcggcggcggcgccttcagcgtggacagccccagaatctacagcaacagcctgccccccagcgccgccgtggccgccagcagcagcctgagaatcaaccacgccaaccacaccggcagcaaccacacctacctgaagaacacctacaacaagcccaagctgagcgagcccgaggaggagctgctgcagcagttcaagagagaggaggtgagccccaccggcagcttcagcgcccactacctgagcatgttcctgctgaccgccgcctgcctgttcttcctgatcctgggcctgacctacctgggcatgagaggcaccggcgtgagcgaggacggcgagctgagcatcgagaaccccttcggcgagaccttcggcaagatccaggagagcgagaagaccctgatgatgaacaccctgtacaagctgcacgacagactggcccagctggccggcgaccacgagtgcggcagcagcagccagagaaccctgagcgtgcaggaggccgccgcctacctgaaggacctgggccccgagtacgagggcatcttcaacaccagcctgcagtggatcctggagaacggcaaggacgtgggcatcagatgcgtgggcttcggccccgaggaggagctgaccaacatcaccgacgtgcagttcctgcagagcaccagacccctgatgagcttctggtgcagattcagaagagccttcgtgaccgtgacccacagactgctgctgctgtgcctgggcgtggtgatggtgtgcgtggtgctgagatacatgaagtacagatggaccaaggaggaggaggagaccagacagatgtacgacatggtggtgaagatcatcgacgtgctgagaagccacaacgaggcctgccaggagaacaaggacctgcagccctacatgcccatcccccacgtgagagacagcctgatccagccccacgacagaaagaagatgaagaaggtgtgggacagagccgtggacttcctggccgccaacgagagcagagtgagaaccgagaccagaagaatcggcggcgccgacttcctggtgtggagatggatccagcccagcgccagctgcgacaagatcctggtgatccccagcaaggtgtggcagggccaggccttccacctggacagaagaaacagcccccccaacagcctgaccccctgcctgaagatcagaaacatgttcgaccccgtgatggagatcggcgaccagtggcacctggccatccaggaggccatcctggagaagtgcagcgacaacgacggcatcgtgcacatcgccgtggacaagaacagcagagagggctgcgtgtacgtgaagtgcctgagccccgagtacgccggcaaggccttcaaggccctgcacggcagctggttcgacggcaagctggtgaccgtgaagtacctgagactggacagataccaccacagattcccccaggccctgaccagcaacacccccctgaagcccagcaacaagcacatgaacagcatgagccacctgagactgagaaccggcctgaccaacagccagggcagcagctag

SEQ ID NO: 179202 - protein, 205 aa, Artificial Sequence
  derived and/or modified sequence
MAEPLQPDPGAAEDAAAQAVETPGWKAPEDAGPQPGSYEIRHYGPAKWVSTSVESMDWDSAIQTGFTKLNSYIQGKNEKEMKIKMTAPVTSYVEPGSGPFSESTITISLYIPSEQQFDPPRPLESDVFIEDRAEMTVFVRSFDGFSSAQKNQEQLLTLASILREDGKVFDEKVYYTAGYNSPVKLLNRNNEVWLIQKNEPTKENE

SEQ ID NO: 179203 - DNA, 618 bp, Artificial Sequence
  derived and/or modified sequence
atggccgaaccccttcaaccagacccaggtgccgccgaagatgccgctgcgcaggctgtcgaaacccccgggtggaaagcccctgaagatgctggaccacagccaggtagctacgaaatccgtcactatgggccggctaaatgggtcagtacatctgtcgagtctatggactgggattcggccatacaaaccggtttcactaagcttaactcatacatccaagggaagaacgagaaggaaatgaagatcaagatgactgccccggtgacaagctatgttgaacctggatctggaccttttagcgagtccacgatcactattagcttatatatcccaagcgaacaacagtttgacccacctaggcccctggagtccgacgtgttcatcgaagaccgggccgaaatgacagtgttcgtcaggtcctttgacggattttcgtccgctcagaagaaccaggaacagctcctgacattggcctccattctcagagaggatggtaaagtgttcgatgagaaggtctattacaccgcaggctataacagccccgtgaagctgctcaatcgaaacaacgaggtttggctgattcagaaaaacgaaccaactaaagagaacgaatag

SEQ ID NO: 179204 - DNA, 990 bp, Artificial Sequence
  derived and/or modified sequence
ggctccctgtcgccgcggaggggcgggggcaggacgcgcaactccggccggagctgtccggggtcgtgagccggccccgccttggtggcggcgccccctcgcggtccagaggcagacgcatcgggtgggctcgggtctccagcccggccgggaggagggaccgggtctgcggagcggggactcggggcctcggcggggcgcgcacacgcaggcggggcggcccggggtgcggggcctctgcgcggctgaccaggctcccagagcgtcagcgccgcccatggccgagccgctccagccagaccccggggcggccgaggacgcggcggcccaagctgtggagacgccgggctggaaggccccggaggacgccggcccccagcccggaagttatgagatccgacactatggaccagccaagtgggtcagcacgtccgtggagtctatggactgggattcagccatccagacgggctttacgaaactgaacagctacattcaaggcaaaaacgagaaagagatgaaaataaagatgacagctccagtgacaagctacgtggagcctggttcaggtccttttagtgagtctaccattaccatttccctgtatattccctctgaacagcaatttgatccacccaggcctttagagtcagatgtcttcattgaagatagagccgaaatgactgtgtttgtacggtctttcgatggattttctagtgcccaaaagaatcaagaacaacttttgacattagcaagcattttaagggaagatggaaaagttttcgatgagaaggtttactacactgcaggctacaacagtcctgtcaaattgcttaatagaaataatgaagtgtggttgattcaaaaaaatgaacccaccaaagaaaacgaatgagaaaaatgaaaggaagttctgctgtcagaggcaaaacatctgtttatcatagacatcaacatgacctataagtaaagtgcgtgtctagtgtcttc

SEQ ID NO: 179205 - DNA, 618 bp, Artificial Sequence
  derived and/or modified sequence
atggccgagcccctgcagcctgaccctggagctgctgaagatgctgctgcccaggccgtggagaccccaggctggaaggccccagaagatgctggcccccagcccggcagctatgagatccgccactacggccctgccaagtgggtgtccacctctgtggagagcatggactgggacagcgccatccagacaggcttcaccaagctgaacagctacatccagggcaagaatgagaaggagatgaagatcaagatgacagcccctgtgaccagctatgtggagcccggcagcggccccttcagcgagagcaccatcaccatcagcctgtacatccccagcgagcagcagtttgatcctccccggcccctggagagtgatgtgttcatcgaggacagagctgagatgacagtgtttgtgcgcagctttgatggcttcagcagcgcccagaagaaccaggagcagctgctgaccctggccagcatcctgcgggaggatggcaaggtgtttgatgagaaggtgtactacacagctggctacaacagccctgtgaagctgctgaacagaaataatgaggtgtggctgatccagaagaatgagcccaccaaggaaaatgaatag

SEQ ID NO: 179206 - DNA, 618 bp, Artificial Sequence
  derived and/or modified sequence
atggccgagcccctgcagcccgaccccggcgccgccgaggacgccgccgcccaggcagtggagacccccggctggaaagcaccagaggatgccgggcctcaacctggctcctacgaaatccgtcactatggcccggccaaatgggtgagcacatctgttgagagcatggactgggactctgccattcaaactgggtttacgaagctgaactcatatatccagggtaagaacgagaaggagatgaaaatcaaaatgacagcgcccgtgacaagttacgtggaacctgggtccgggccgtttagcgaaagcactattacgatttctctttacatcccctccgaacagcagtttgatccccctaggccccttgaatcagacgtgtttattgaagaccgtgctgaaatgacagtatttgtgagatctttcgatggattctcctccgcccaaaagaatcaggaacaattattaactctggcaagtatcctcagggaggacggcaaagtgttcgatgagaaggtgtactacactgctggctataactcccccgtaaaactgttgaataggaataatgaagtgtggttgatacaaaaaaacgagccaaccaaggaaaacgaatag

SEQ ID NO: 179207 - DNA, 618 bp, Artificial Sequence
  derived and/or modified sequence
atggcagaacctctgcagccagaccccggagctgccgaggacgctgctgctcaagctgtagagacccccggttggaaggctccggaggatgccggtccccaacctgggagttatgagattcgccattacggccctgccaagtgggtgtcaacctccgtggaatcaatggattgggactcagctatccagactgggttcactaaacttaattcatacattcagggcaaaaacgaaaaggagatgaagattaagatgaccgcccctgttactagttatgttgagcccggttccgggcctttcagcgagagcaccatcaccattagcctctacatcccatcagaacagcagttcgatcctccaaggcctcttgaaagcgacgtgttcattgaagacagggcagaaatgaccgtgtttgtgagaagctttgatggtttctccagtgcgcaaaagaaccaggaacagctactgaccctagccagcattctgcgggaggacggaaaagtttttgacgaaaaggtctactataccgctgggtataattcgcccgtcaagttgttgaatcgcaataacgaagtctggttaattcagaagaacgaaccaacaaaagaaaacgagtag

SEQ ID NO: 179208 - DNA, 618 bp, Artificial Sequence
  derived and/or modified sequence
atggccgagccacttcagccggatcccggtgctgcggaggacgcagccgcccaggccgtcgagacacctggctggaaagccccggaagatgcaggacctcaaccaggctcatacgagattcgccactacggcccagccaaatgggtaagcacatcagtcgagtcaatggactgggatagcgcaattcaaaccggatttacaaagttaaactcatacatacaggggaaaaatgaaaaagagatgaaaataaagatgacagctcccgtgacatcttacgtagagcccggcagcgggccctttagcgagtccactattacaatcagcctttatattcccagcgagcagcaattcgacccgcctaggcctctagagagcgacgtgtttattgaagacagggcagagatgacagtctttgtgagaagttttgacggtttcagtagcgcacaaaaaaaccaggaacaattactcacacttgcatctatcctgagagaggatggcaaggtctttgatgagaaggtatattatacggccggatataattcgccagtgaaattactgaacagaaataacgaggtctggttaatacaaaagaatgagccaaccaaagaaaacgagtag

SEQ ID NO: 179209 - DNA, 618 bp, Artificial Sequence
  derived and/or modified sequence
atggcagaacccctgcagcctgacccaggggccgctgaggacgctgccgcacaggccgtagagactcccggatggaaggctcctgaagacgcaggtccgcagcccggatcttacgaaatcagacactatggaccggcaaaatgggtgtcaacaagcgtcgaatccatggattgggatagcgccatccagacaggctttacaaaactgaactcctatatacaaggaaaaaatgagaaagaaatgaaaattaagatgacagctcccgtgaccagctatgtcgagcccggctctggccctttcagcgagtccactattacaatcagcctttatattcccagcgagcagcaattcgacccgcctaggcctctagagagcgacgtgtttattgaagacagggcagagatgacagtctttgtgagaagttttgacggtttcagtagcgcacaaaaaaaccaggaacaattactcacacttgcatctatcctgagagaggatggcaaggtctttgatgagaaggtatattatacggccggatataattcgccagtgaaattactgaacagaaataacgaggtctggttaatacaaaagaatgagccaactaaggaaaatgagtag

SEQ ID NO: 179210 - DNA, 618 bp, Artificial Sequence
  derived and/or modified sequence
atggccgagcccctgcagcccgaccccggcgccgccgaggacgccgccgcccaggccgtggagacccccggctggaaggcccccgaggacgccggcccccagcccggcagctacgagatcagacactacggccccgccaagtgggtgagcaccagcgtggagagcatggactgggacagcgccatccagaccggcttcaccaagctgaacagctacatccagggcaagaacgagaaggagatgaagatcaagatgaccgcccccgtgaccagctacgtggagcccggcagcggccccttcagcgagagcaccatcaccatcagcctgtacatccccagcgagcagcagttcgacccccccagacccctggagagcgacgtgttcatcgaggacagagccgagatgaccgtgttcgtgagaagcttcgacggcttcagcagcgcccagaagaaccaggagcagctgctgaccctggccagcatcctgagagaggacggcaaggtgttcgacgagaaggtgtactacaccgccggctacaacagccccgtgaagctgctgaacagaaacaacgaggtgtggctgatccagaagaacgagcccaccaaggagaacgagtag

SEQ ID NO: 179211 - RNA, 618 nt, Artificial Sequence
  derived and/or modified sequence
auggccgagccacuucagccggaucccggugcugcggaggacgcagccgcccaggccgucgagacaccuggcuggaaagccccggaagaugcaggaccucaaccaggcucauacgagauucgccacuacggcccagccaaauggguaagcacaucagucgagucaauggacugggauagcgcaauucaaaccggauuuacaaaguuaaacucauacauacaggggaaaaaugaaaaagagaugaaaauaaagaugacagcucccgugacaucuuacguagagcccggcagcgggcccuuuagcgaguccacuauuacaaucagccuuuauauucccagcgagcagcaauucgacccgccuaggccucuagagagcgacguguuuauugaagacagggcagagaugacagucuuugugagaaguuuugacgguuucaguagcgcacaaaaaaaccaggaacaauuacucacacuugcaucuauccugagagaggauggcaaggucuuugaugagaagguauauuauacggccggauauaauucgccagugaaauuacugaacagaaauaacgaggucugguuaauacaaaagaaugagccaaccaaagaaaacgaguag

SEQ ID NO: 179212 - RNA, 618 nt, Artificial Sequence
  derived and/or modified sequence
auggcagaaccccugcagccugacccaggggccgcugaggacgcugccgcacaggccguagagacucccggauggaaggcuccugaagacgcagguccgcagcccggaucuuacgaaaucagacacuauggaccggcaaaaugggugucaacaagcgucgaauccauggauugggauagcgccauccagacaggcuuuacaaaacugaacuccuauauacaaggaaaaaaugagaaagaaaugaaaauuaagaugacagcucccgugaccagcuaugucgagcccggcucuggcccuuucagcgaguccacuauuacaaucagccuuuauauucccagcgagcagcaauucgacccgccuaggccucuagagagcgacguguuuauugaagacagggcagagaugacagucuuugugagaaguuuugacgguuucaguagcgcacaaaaaaaccaggaacaauuacucacacuugcaucuauccugagagaggauggcaaggucuuugaugagaagguauauuauacggccggauauaauucgccagugaaauuacugaacagaaauaacgaggucugguuaauacaaaagaaugagccaacuaaggaaaaugaguag

SEQ ID NO: 179213 - protein, 252 aa, Artificial Sequence
  derived and/or modified sequence
MGSELIGRLAPRLGLAEPDMLRKAEEYLRLSRVKCVGLSARTTETSSAVMCLDLAASWMKCPLDRAYLIKLSGLNKETYQSCLKSFECLLGLNSNIGIRDLAVQFSCIEAVNMASKILKSYESSLPQTQQVDLDLSRPLFTSAALLSACKILKLKVDKNKMVATSGVKKAIFDRLCKQLEKIGQQVDREPGDVATPPRKRKKIVVEAPAKEMEKVEEMPHKPQKDEDLTQDYEEWKRKILENAASAQKATAE

SEQ ID NO: 179214 - DNA, 759 bp, Artificial Sequence
  derived and/or modified sequence
atgggcagcgagctgatcggcagactggcccccagactgggcctggccgagcccgacatgctgagaaaggccgaggagtacctgagactgagcagagtgaagtgcgtgggcctgagcgccagaaccaccgagaccagcagcgccgtgatgtgcctggacctggccgccagctggatgaagtgccccctggacagagcctacctgatcaagctgagcggcctgaacaaggagacctaccagagctgcctgaagagcttcgagtgcctgctgggcctgaacagcaacatcggcatcagagacctggccgtgcagttcagctgcatcgaggccgtgaacatggccagcaagatcctgaagagctacgagagcagcctgccccagacccagcaggtggacctggacctgagcagacccctgttcaccagcgccgccctgctgagcgcctgcaagatcctgaagctgaaggtggacaagaacaagatggtggccaccagcggcgtgaagaaggccatcttcgacagactgtgcaagcagctggagaagatcggccagcaggtggacagagagcccggcgacgtggccaccccccccagaaagagaaagaagatcgtggtggaggcccccgccaaggagatggagaaggtggaggagatgccccacaagccccagaaggacgaggacctgacccaggactacgaggagtggaagagaaagatcctggagaacgccgccagcgcccagaaggccaccgccgagtag

SEQ ID NO: 179215 - DNA, 759 bp, Artificial Sequence
  derived and/or modified sequence
atgggcagcgagctgatcggtcgcttagctccacgcctaggcctcgctgaacccgatatgctgcgcaaggccgaagagtatctcaggctatccagagtgaaatgtgttggtctgagtgcccggactacagaaacctcatcagctgtgatgtgcttggacttggccgcgtcttggatgaaatgtcctctggaccgtgcctacttgatcaagctgagtggattaaataaagagacctaccagtcctgtctcaagtccttcgagtgcctcctggggctgaactctaacatcgggatacgtgacctggcagtgcagttttcttgtatcgaggcagtgaatatggcttccaagatactcaagtcctacgagtcctctctgccccagacccagcaggttgatctcgatttgtcccggccattgttcacctctgccgcgctgctttccgcctgtaaaattcttaagctcaaggtggataagaataaaatggtagccactagcggcgttaaaaaagccatcttcgaccgactttgtaagcagctggagaaaattgggcagcaggtggatcgggaacccggcgacgtcgcaacacctcctaggaagaggaagaagattgtggtcgaggcccctgctaaggagatggaaaaagttgaggagatgcctcataaaccccagaaagacgaggacctgacacaggattatgaagaatggaagcgcaagattctcgagaatgcagcttctgctcagaaggccactgccgagtag

SEQ ID NO: 179216 - DNA, 759 bp, Artificial Sequence
  derived and/or modified sequence
atgggcagcgagctgattggccgcctggccccccggctgggcctggccgagccagacatgctgaggaaggccgaggagtacctgcggctgagccgggtgaagtgtgtgggcctgagcgcccggaccacagagaccagcagcgctgtgatgtgcctggacctggccgcctcctggatgaagtgccccctggaccgggcctacctgatcaagctgagcggcctgaacaaggagacctaccagagctgcctgaagagctttgaatgtctgctgggcctgaacagcaacatcggcatccgggacctggccgtgcagttcagctgcatcgaggccgtgaacatggccagcaagatcctgaagagctatgagagcagcctgccccagacccagcaggtggacctggacctgagccggcccctcttcaccagcgctgccctgctgagcgcctgcaagatcctgaagctgaaggtggacaagaacaagatggtggccaccagcggcgtgaagaaggccatctttgaccggctgtgcaagcagctggagaagattggccagcaggtggaccgggagcctggagatgtggccaccccacccaggaagaggaagaagatcgtggtggaggccccagccaaggagatggagaaggtggaggagatgccccacaagccccagaaggatgaggacctgacccaggactatgaggagtggaagaggaagatcctggagaatgctgccagcgcccagaaggccacagctgagtag

SEQ ID NO: 179217 - DNA, 759 bp, Artificial Sequence
  derived and/or modified sequence
atgggcagcgagctgatcggccggctggccccccggctgggcctggctgagcccgatatgctccgcaaagccgaggaatatctgcgattatctcgcgtgaagtgtgtgggcctgagtgcaagaactactgaaaccagtagcgcagtcatgtgtttggatctggcggcaagttggatgaaatgccccctggatcgcgcctatctgatcaagctgtccgggttgaacaaggagacttaccagagctgtctgaagtcctttgaatgtctgttgggcctgaattccaatattggaatcagagacctcgccgtccagttttcatgtatagaagccgtgaacatggctagtaagatccttaagtcctatgagtcctcccttccccagacacaacaagttgacctcgacctatcccgacctttgtttacatccgctgctttgctctctgcatgcaagatacttaagctgaaagttgacaaaaacaaaatggtcgctaccagtggggtcaaaaaggccatcttcgacagactgtgtaagcagcttgaaaaaatcggacaacaggttgaccgtgagcctggagacgtggccacaccacccagaaagagaaaaaagattgttgtcgaagcgcctgctaaggagatggaaaaagtggaggagatgccccacaagccccagaaagacgaggatcttacccaggactacgaggagtggaaacggaaaattctcgagaacgcagcaagcgcgcaaaaagccaccgcggaatag

SEQ ID NO: 179218 - DNA, 759 bp, Artificial Sequence
  derived and/or modified sequence
atggggagcgagctcatcgggagacttgcacctcgcttgggcctggctgagccggacatgctgagaaaagctgaagaatatctcaggctttctcgcgtcaaatgtgtcgggctttcggctcggactaccgaaactagctctgccgtcatgtgcctcgacctggctgcctcctggatgaagtgcccgctggacagggcctacctgattaagctttccggcctgaacaaggagacctatcagagttgcctcaagagtttcgaatgcctcctgggattgaattcgaacataggcattagagacctggctgtgcagtttagctgcattgaagccgtcaacatggcctccaaaatactgaaatcctatgagtcctctctcccacaaacccagcaggtcgatctggacctgtctcgacctctgttcacaagtgcggctttgctctcggcctgtaagattctcaagttgaaggtggataagaacaagatggtagcgacctctggtgtcaaaaaagctatttttgaccgactatgcaaacagctggaaaagattggtcagcaagtggatcgagaaccaggtgacgtggccaccccgcctagaaaaaggaagaagatcgtagttgaggctccagccaaagaaatggaaaaagtagaagagatgccacacaagccacagaaggacgaagatcttacacaggactacgaggaatggaagcggaagattctggagaacgcagccagtgcccaaaaggctaccgcggaatag

SEQ ID NO: 179219 - DNA, 1628 bp, Artificial Sequence
  derived and/or modified sequence
gcgcgcgggtttcgttgacccgcggcgttcacgggaattgttcgctttagtgccggcgccatggggtcggagctgatcgggcgcctagccccgcgcctgggcctcgccgagcccgacatgctgaggaaagcagaggagtacttgcgcctgtcccgggtgaagtgtgtcggcctctccgcacgcaccacggagaccagcagtgcagtcatgtgcctggaccttgcagcttcctggatgaagtgccccttggacagggcttatttaattaaactttctggtttgaacaaggagacatatcagagctgtcttaaatcttttgagtgtttactgggcctgaattcaaatattggaataagagacctagctgtacagtttagctgtatagaagcagtgaacatggcttcaaagatactaaaaagctatgagtccagtcttccccagacacagcaagtggatcttgacttatccaggccacttttcacttctgctgcactgctttcagcatgcaagattctaaagctgaaagtggataaaaacaaaatggtagccacatccggtgtaaaaaaagctatatttgatcgactgtgtaaacaactagagaagattggacagcaggtcgacagagaacctggagatgtagctactccaccacggaagagaaagaagatagtggttgaagccccagcaaaggaaatggagaaggtagaggagatgccacataaaccacagaaagatgaagatctgacacaggattatgaagaatggaaaagaaaaattttggaaaatgctgccagtgctcaaaaggctacagcagagtgatttcagcttccaaactggtatacattccaaactgatagtacattgccatctccaggaagacttgacggctttgggattttgtttaaacttttataataaggatcctaagactgttgcctttaaatagcaaagcagcctacctggaggctaagtctgggcagtgggctggcccctggtgtgagcattagaccagccacagtgcctgattggtatagccttatgtgctttcctacaaaatggaattggaggccgggcgcagtggctcacgcctgtaatcccagcactttgggaggccaaggtgggtggatcacctgaggtcaggagctcgagaccagcctggccaacatggtgaaaccccatctctactaaaaatacaaaaattagccaggtgtgatggtgcatgcctgtaatcccagctcctcagtaggctgagacaggagcatcacttgaacgtgggaggcagaggttgcagtgagccgagattgcaccaccgcactccagcctgggtgacagagcgagacttatctcataaataaatagatagatactccagcctgggtgacagagcgagacttatagatagatagatagatagatggatagatagatagatagatagatagatagataaacggaattggagccattttgctttaagtgaatggcagtcccttgtcttattcagaatataaaattcagtctgaatggcatcttacagattttacttcaatttttgtgtacggtattttttatttgactaaatcaatatattgtacagcctaagttaataaatgttatttatatatgca

SEQ ID NO: 179220 - protein, 323 aa, Artificial Sequence
  derived and/or modified sequence
MYSGNRSGGHGYWDGGGAAGAEGPAPAGTLSPAPLFSPGTYERLALLLGSIGLLGVGNNLLVLVLYYKFQRLRTPTHLLLVNISLSDLLVSLFGVTFTFVSCLRNGWVWDTVGCVWDGFSGSLFGWISQLQAATREARASMGPVQQGTICMQLRCVEDLQTIQVIKILKYEKKLAKMCFLMIFTFLVCWMPYIVICFLVVNGHGHLVTPTISIVSYLFAKSNTVYNPVIYVFMIRKFRRSLLQLLCLRLLRCQRPAKDLPAAGSEMQIRPIVMSQKDGDRPKKKVTFNSSSIIFIITSDESLSVDDSDKTNGSKVDVIQVRPL

SEQ ID NO: 179221 - protein, 402 aa, Artificial Sequence
  derived and/or modified sequence
MYSGNRSGGHGYWDGGGAAGAEGPAPAGTLSPAPLFSPGTYERLALLLGSIGLLGVGNNLLVLVLYYKFQRLRTPTHLLLVNISLSDLLVSLFGVTFTFVSCLRNGWVWDTVGCVWDGFSGSLFGIVSIATLTVLAYERYIRVVHARVINFSWAWRAITYIWLYSLAWAGAPLLGWNRYILDVHGLGCTVDWKSKDANDSSFVLFLFLGCLVVPLGVIAHCYGHILYSIRMLRCVEDLQTIQVIKILKYEKKLAKMCFLMIFTFLVCWMPYIVICFLVVNGHGHLVTPTISIVSYLFAKSNTVYNPVIYVFMIRKFRRSLLQLLCLRLLRCQRPAKDLPAAGSEMQIRPIVMSQKDGDRPKKKVTFNSSSIIFIITSDESLSVDDSDKTNGSKVDVIQVRPL

SEQ ID NO: 179222 - DNA, 972 bp, Artificial Sequence
  derived and/or modified sequence
atgtactcagggaatcgtagtggaggtcatggatactgggacggcggcggcgccgccggcgctgaagggcccgcacctgccggcaccttgtcccccgccccactcttctcacctggcacctacgagagactagccctgctgctcggctccatcggcttacttggagtgggaaacaacctactagttttggtgttatattacaaatttcagcgcctgagaacccctacccacttgctcctcgtgaatatcagtttgagtgacctgctcgtgagcttattcggagttacatttacatttgtgtcttgccttcggaacggatgggtctgggacacagtgggatgcgtatgggacggctttagcggctcactgtttgggtggatctcgcagttacaagccgctacgcgcgaggcgagggcttctatggggcctgtgcagcagggtacaatctgtatgcagttgcgctgcgtggaggacctgcagactattcaggtgatcaagatcctcaaatacgagaaaaagctggccaaaatgtgtttcctgatgatatttactttcttagtctgctggatgccctatattgtgatctgttttctggtcgtaaacggccatggacacctggtcacccctaccataagtatcgtatcctatttgttcgctaaatcaaacaccgtgtataacccagtgatctatgtgtttatgatcagaaaatttagacggtctctcctgcagttgctctgtctaaggctgttaaggtgccaaaggcccgcaaaggatctcccagccgccgggtctgaaatgcagatacgcccaatagtaatgagccagaaagacggggacaggccaaagaaaaaggtgacttttaacagttcttccatcattttcataataacatccgacgaaagcctcagcgtggacgatagcgacaagaccaacggcagtaaggtggatgtgatccaggtgcggcccctgtag

SEQ ID NO: 179223 - DNA, 1209 bp, Artificial Sequence
  derived and/or modified sequence
atgtacagtggaaacaggtcgggaggccacggctattgggacggcggtggtgccgctggggccgagggcccagctcctgcaggcacattgtctcctgctcccctcttctcccccggtacgtatgaacggctggcccttcttctggggagcatcggattactgggagtcggcaacaacctgctcgttttagtgctctattacaagtttcaacggctccgaacgcctactcacctgctgttagttaatatcagcctgtccgatctgcttgtctcattattcggtgtcacgttcacatttgtctcttgtctgagaaacggctgggtgtgggataccgtcggctgcgtgtgggacggattcagcggcagtctttttggcatagtgtccattgcgacacttacagtgctggcatacgagagatatatccgggttgtccacgctcgcgtcataaactttagctgggcctggcgggccataacttacatttggctgtattccctcgcctgggctggagctcccttattggggtggaatcgctatatcctggatgttcacggtttgggatgtactgtcgactggaaatcaaaagacgccaacgatagctctttcgtcttgtttcttttcctgggctgcctggtcgtccccctgggcgtaattgcacattgttatggccatattctctattctattcggatgcttcgctgtgtggaggacctgcaaaccatacaggtcatcaagatcctaaaatatgaaaagaaactagccaaaatgtgttttcttatgattttcacgtttcttgtgtgctggatgccgtacatcgtaatctgctttctggtggtgaatggccatggccatttggttaccccaaccatatccattgtgtcttacctgttcgccaagagcaatactgtttacaatccggttatctacgtgttcatgataagaaagttccgacgcagtctgctgcaactcctgtgtttacgactgctccggtgtcaaaggcccgcgaaggatcttccagctgcaggtagcgagatgcagatccgccccattgtgatgagccagaaagatggcgaccggcctaagaaaaaagtcaccttcaattcaagcagcatcatctttatcatcacatctgacgaaagtctgtctgtcgacgattcggataaaactaatggctctaaggtggacgtgatccaggttcggcctctctag

SEQ ID NO: 179224 - DNA, 972 bp, Artificial Sequence
  derived and/or modified sequence
atgtacagcggcaacagaagtggcggccacggctactgggatggcggcggcgctgctggagctgagggccctgccccagctggcaccctgagccctgcccccctcttcagccctggcacctatgagcggctggccctgctgctgggcagcatcggcctgctgggcgtgggcaacaacctgctggtgctggtgctgtactacaagttccagaggctgcggacccccacccacctgctgctggtgaacatcagcctgagtgacctgctggtgtccctgtttggagtgaccttcacctttgtgtcctgcctgagaaatggctgggtgtgggacacagtgggctgtgtgtgggatggcttcagcggcagcctgtttggctggatcagccagctgcaggccgccacccgggaggcccgggcctccatgggccctgtgcagcagggcaccatctgcatgcagctgcgctgtgtggaggacctgcagaccatccaggtgatcaagatcctgaagtatgagaagaagctggccaagatgtgcttcctgatgatcttcaccttcctggtgtgctggatgccctacatcgtcatctgcttcctggtggtgaatggacatggccacctggtgacccccaccatcagcatcgtgtcctacctgtttgccaagagcaacacagtgtacaaccctgtgatctacgtgttcatgatcaggaagttccgccgcagcctgctgcagctgctgtgcctgcggctgctgcgctgccagaggcctgccaaggacctgcctgctgctggcagcgagatgcagatccggcccatcgtgatgagccagaaggatggagaccggcccaagaagaaggtgaccttcaacagcagcagcatcatcttcatcatcaccagtgatgagagcctgtctgtggatgacagcgacaagaccaacggcagcaaggtggatgtgatccaggtgcggcccctgtag

SEQ ID NO: 179225 - DNA, 1209 bp, Artificial Sequence
  derived and/or modified sequence
atgtacagcggcaacagaagtggcggccacggctactgggatggcggcggcgctgctggagctgagggccctgccccagctggcaccctgagccctgcccccctcttcagccctggcacctatgagcggctggccctgctgctgggcagcatcggcctgctgggcgtgggcaacaacctgctggtgctggtgctgtactacaagttccagaggctgcggacccccacccacctgctgctggtgaacatcagcctgagtgacctgctggtgtccctgtttggagtgaccttcacctttgtgtcctgcctgagaaatggctgggtgtgggacacagtgggctgtgtgtgggatggcttcagcggcagcctgtttggcatcgtgtccatcgccaccctgactgtgctggcctatgagcgctacatccgggtggtgcacgcccgggtcatcaacttctcctgggcctggagggccatcacctacatctggctgtacagcctggcctgggccggggcccccctgctgggctggaaccgctacatcctggatgtgcacggcctgggctgcaccgtggactggaagagcaaggatgccaatgacagcagctttgtgctcttcctgttcctgggctgcctggtggtgcccctgggcgtcatcgcccactgctacggccacatcctgtacagcatccgcatgctgcgctgtgtggaggacctgcagaccatccaggtgatcaagatcctgaagtatgagaagaagctggccaagatgtgcttcctgatgatcttcaccttcctggtgtgctggatgccctacatcgtcatctgcttcctggtggtgaatggccacggccacctggtgacccccaccatcagcatcgtgtcctacctgtttgccaagagcaacacagtgtacaaccctgtgatctacgtgttcatgatcaggaagttcagaagaagcctgctgcagctgctgtgcctgcggctgctgcgctgccagaggcctgccaaggacctgcctgctgctggcagcgagatgcagatccggcccatcgtgatgagccagaaggatggagaccggcccaagaagaaggtgaccttcaacagcagcagcatcatcttcatcatcaccagtgatgagagcctgtctgtggatgacagcgacaagaccaacggcagcaaggtggatgtgatccaggtgcggcccctgtag

SEQ ID NO: 179226 - DNA, 972 bp, Artificial Sequence
  derived and/or modified sequence
atgtacagcggcaaccggagcggcggccacggctactgggacggcggcggagccgctggcgctgagggtcccgcccctgcagggaccctcagccccgccccgcttttctctcccggaacgtacgaacggctggcactgctccttgggagcattggacttctgggcgtgggaaataacctcctggtgctggtactttactacaaatttcaacgcttgaggaccccaacccatctgctgttagtgaatatttctctgtctgatctgctggtctccctgtttggagtgacatttacctttgtgagctgcctgagaaatggctgggtgtgggacacagtgggctgcgtgtgggacggctttagcggttccctcttcggatggattagccagctgcaggcagcaacacgggaggcccgagcctctatgggtcccgtccagcagggaaccatttgtatgcagcttagatgtgtggaggacctgcaaactatccaggtcatcaaaatcttgaagtacgagaagaagctcgcgaagatgtgttttcttatgatttttaccttcctggtatgctggatgccatacattgtgatctgctttctcgtggtcaatggacacggacatttagtgacacccaccatcagcattgtttcctatctatttgctaaaagcaatactgtgtacaatcccgtgatctacgtgtttatgatccgaaagtttaggcggtcccttcttcagctactctgtctgcgattgctcagatgccagcggcccgctaaagatctacccgctgctgggtctgagatgcagatcagacctatcgtgatgtctcaaaaggatggggacagacctaagaaaaaggtgacgtttaattcttctagcataatcttcattatcaccagcgacgaaagcctgagtgtggacgacagtgacaaaacaaacgggtccaaggtggacgtcatccaggtgcgccccttgtag

SEQ ID NO: 179227 - DNA, 1209 bp, Artificial Sequence
  derived and/or modified sequence
atgtacagcggcaaccggagcggcggccacggctactgggacggcgggggggcagcgggagcagagggccccgcacctgcaggcacactgtcgcccgcaccactgttcagccccggcacctacgagcgcctggctcttctcctcggaagcattgggcttctaggtgttggaaacaacctgcttgtgctggtcctgtattacaagttccagcgcttgcggacccctacacatctcttgctggtgaacatcagcttatcagacttattggtgtctttatttggagtaacattcacattcgtaagctgtcttaggaatgggtgggtatgggatacagtggggtgcgtgtgggacgggtttagtggaagcttgttcggcatcgtgtcaatcgccacccttactgtgctggcatacgagcgatacattcgagttgtgcacgctagagtaattaatttctcttgggcatggcgagcgataacctacatctggctatacagcctggcctgggccggcgcacctttactgggttggaaccgatatattctggacgtacacggattggggtgtactgttgattggaagagtaaagatgcgaacgactcctcctttgtgctgtttctgtttctcgggtgcctagtggttccattgggtgttatcgcccattgttacggtcacattctctattctatccgcatgcttcgctgtgtggaggacctgcagacaatccaggttattaagatactgaaatatgagaaaaaactggcgaaaatgtgtttcctcatgatatttacattcctcgtatgctggatgccatatatagtcatttgttttctcgtcgttaatggccatgggcacttagtcacccctaccatttcgatagtgtcatacctatttgctaaatctaacaccgtgtacaacccagtaatctacgtgtttatgatcagaaaattccgaaggagcctcctccagcttctttgcttacgactgctccgctgccagagacctgccaaggatctgccagccgcagggtctgagatgcaaatccggcccattgtcatgagtcagaaagacggagacaggccaaagaaaaaggtcacattcaactcctcttccattatctttattatcacaagcgatgagtccctcagtgtggatgactccgataaaacaaatggatccaaggtggacgttattcaagtccgacccctctag

SEQ ID NO: 179228 - DNA, 2395 bp, Artificial Sequence
  derived and/or modified sequence
gggcccggcgcgcggtagcgcgggcccctcagtgcacaatggctagagcaggcggcggagccccaaccccacccagtgcggagcgcgccgcgagccccgccgcaagctgagcgcctccgcccgccaggcgcgccggcgccgggccatgtactcggggaaccgcagcggcggccacggctactgggacggcggcggggccgcgggcgctgaggggccggcgccggcggggacactgagccccgcgcccctcttcagccccggcacctacgagcgcctggcgctgctgctgggctccattgggctgctgggcgtcggcaacaacctgctggtgctcgtcctctactacaagttccagcggctccgcactcccactcacctcctcctggtcaacatcagcctcagcgacctgctggtgtccctcttcggggtcacctttaccttcgtgtcctgcctgaggaacggctgggtgtgggacaccgtgggctgcgtgtgggacgggtttagcggcagcctcttcggttggatcagccagcttcaggcagccactagggaagccagagcctccatgggtccagtgcagcaaggcactatctgcatgcagcttcgttgtgtggaagatcttcagacaattcaagtgatcaagattttaaaatatgaaaagaaactggccaaaatgtgctttttaatgatattcaccttcctggtctgttggatgccttatatcgtgatctgcttcttggtggttaatggtcatggtcacctggtcactccaacaatatctattgtttcgtacctctttgctaaatcgaacactgtatacaatccagtgatttatgtcttcatgatcagaaagtttcgaagatcccttttgcagcttctgtgcctccgactgctgaggtgccagaggcctgctaaagacctaccagcagctggaagtgaaatgcagatcagacccattgtgatgtcacagaaagatggggacaggccaaagaaaaaagtgactttcaactcttcttccatcatttttatcatcaccagtgatgaatcactgtcagttgacgacagcgacaaaaccaatgggtccaaagttgatgtaatccaagttcgtcctttgtaggaatgaagaatggcaacgaaagatggggccttaaattggatgccacttttggactttcatcataagaagtgtctggaatacccgttctatgtaatatcaacagaaccttgtggtccagcaggaaatccgaattgcccatatgctcttgggcctcaggaagaggttgaacaaaaacaaattcttttaattcaacgggtgctttacataatgaaaaaaccacttgtggcacacgatgggcatctaacatcatcatcttctaatgtgttggagattttcatttcaaatatattttttaaattactctattttccaaaacacgtaatgcatttttctcgaaaataccttactgtaaaaataactgtcgcgtacacatgtgtgaagtagctagaacatactgaattttttttgtactgttggactctattcagtgtcatgtcctatatctgatcaagttatcaaggagataattctagaatgaaaaagaaaatcctcttgttggaaacaaaagacgttttatatgtgcagtatgacaaagaggagtttcagagacaactttgaatccttgtcagcctggagaccagcaccagaggaatctacaaggcaaactcccatatatttgcttcccccaaattgctgcccctacagactcaaagctctttttctttgttttgttgtttctctaaaaatttactgttctttgtcgatgctatataagccagggagttctaagacgccagctctttgagatttgctcattcccctgtatttcccacatatatattacatatacccgctaataaatttatgtttgtttttctcttgtcaatctgtcttttgttataggggccccagccaaggaacctaaagtgggtagaaggaaaaattattttttctttccctacaaactgaacatggattattagaactcaaggttttcattgacaatatagaaaagaaacactgaatcattttattttattgcccaatttttatttcttatatgactctagtgtttcatcttcataattaatcatgtttgaaggatttctgagtgactcagcagcctgttaaagaaggatgaaccaaagaaaacatttcactaaatgtgcttttaaaaatcaagtgtattgctggttctgctgcagtatgtagtcgaagaataaattagtaaattgcttctgagggtctgaaattgaataaagtaatggctttgtatttctataaaagttgtctccccttgtttcctttccattctggcacatgtagacatttaattta

SEQ ID NO: 179229 - DNA, 2620 bp, Artificial Sequence
  derived and/or modified sequence
atggctagagcaggcggcggagccccaaccccacccagtgcggagcgcgccgcgagccccgccgcaagctgagcgcctccgcccgccaggcgcgccggcgccgggccatgtactcggggaaccgcagcggcggccacggctactgggacggcggcggggccgcgggcgctgaggggccggcgccggcggggacactgagccccgcgcccctcttcagccccggcacctacgagcgcctggcgctgctgctgggctccattgggctgctgggcgtcggcaacaacctgctggtgctcgtcctctactacaagttccagcggctccgcactcccactcacctcctcctggtcaacatcagcctcagcgacctgctggtgtccctcttcggggtcacctttaccttcgtgtcctgcctgaggaacggctgggtgtgggacaccgtgggctgcgtgtgggacgggtttagcggcagcctcttcgggattgtttccattgccaccctaaccgtgctggcctatgaacgttacattcgcgtggtccatgccagagtgatcaatttttcctgggcctggagggccattacctacatctggctctactcactggcgtgggcaggagcacctctcctgggatggaacaggtacatcctggacgtacacggactaggctgcactgtggactggaaatccaaggatgccaacgattcctcctttgtgcttttcttatttcttggctgcctggtggtgcccctgggtgtcatagcccattgctatggccatattctatattccattcgaatgcttcgttgtgtggaagatcttcagacaattcaagtgatcaagattttaaaatatgaaaagaaactggccaaaatgtgctttttaatgatattcaccttcctggtctgttggatgccttatatcgtgatctgcttcttggtggttaatggtcatggtcacctggtcactccaacaatatctattgtttcgtacctctttgctaaatcgaacactgtatacaatccagtgatttatgtcttcatgatcagaaagtttcgaagatcccttttgcagcttctgtgcctccgactgctgaggtgccagaggcctgctaaagacctaccagcagctggaagtgaaatgcagatcagacccattgtgatgtcacagaaagatggggacaggccaaagaaaaaagtgactttcaactcttcttccatcatttttatcatcaccagtgatgaatcactgtcagttgacgacagcgacaaaaccaatgggtccaaagttgatgtaatccaagttcgtcctttgtaggaatgaagaatggcaacgaaagatggggccttaaattggatgccacttttggactttcatcataagaagtgtctggaatacccgttctatgtaatatcaacagaaccttgtggtccagcaggaaatccgaattgcccatatgctcttgggcctcaggaagaggttgaacaaaaacaaattcttttaattcaacgggtgctttacataatgaaaaaaccacttgtggcacacgatgggcatctaacatcatcatcttctaatgtgttggagattttcatttcaaatatattttttaaattactctattttccaaaacacgtaatgcatttttctcgaaaataccttactgtaaaaataactgtcgcgtacacatgtgtgaagtagctagaacatactgaattttttttgtactgttggactctattcagtgtcatgtcctatatctgatcaagttatcaaggagataattctagaatgaaaaagaaaatcctcttgttggaaacaaaagacgttttatatgtgcagtatgacaaagaggagtttcagagacaactttgaatccttgtcagcctggagaccagcaccagaggaatctacaaggcaaactcccatatatttgcttcccccaaattgctgcccctacagactcaaagctctttttctttgttttgttgtttctctaaaaatttactgttctttgtcgatgctatataagccagggagttctaagacgccagctctttgagatttgctcattcccctgtatttcccacatatatattacatatacccgctaataaatttatgtttgtttttctcttgtcaatctgtcttttgttataggggccccagccaaggaacctaaagtgggtagaaggaaaaattattttttctttccctacaaactgaacatggattattagaactcaaggttttcattgacaatatagaaaagaaacactgaatcattttattttattgcccaatttttatttcttatatgactctagtgtttcatcttcataattaatcatgtttgaaggatttctgagtgactcagcagcctgttaaagaaggatgaaccaaagaaaacatttcactaaatgtgcttttaaaaatcaagtgtattgctggttctgctgcagtatgtagtcgaagaataaattagtaaattgcttctgagggtctgaaattgaataaagtaatggctttgtatttctataaaagttgtctccccttgtttcctttccattctggcacatgtagacatttaatttatgaataaaaccctttcctgtccttca

SEQ ID NO: 179230 - DNA, 972 bp, Artificial Sequence
  derived and/or modified sequence
atgtattccgggaatcgctctgggggacacggctactgggatggtggaggggcagccggtgcagaaggcccagcacctgccggaaccctgtccccagccccattgttctcccccggaacatacgaacgccttgctctcctgctgggaagcatcggcctgcttggcgtagggaacaacctcctcgtcctggttctatactataagtttcagagactgcgaactccaacacaccttctgcttgtgaatatctccctcagtgatttgctggtttctctttttggagttaccttcacttttgtgtcatgtcttcggaatgggtgggtctgggacacagtgggctgtgtttgggatggatttagcggttctctgtttggctggatatcccaactgcaggcagcaacacgcgaagctcgcgcttctatgggccctgttcagcaggggaccatctgcatgcagcttcggtgcgtcgaggatttgcagaccatccaagtaattaagattctgaagtatgaaaaaaagctggccaaaatgtgctttctgatgattttcacctttctcgtgtgttggatgccctacatcgtcatatgttttcttgtggtgaacggtcacgggcaccttgtaacacccactatcagcatagtttcttacctgttcgccaagagcaacaccgtgtacaacccggtgatttatgtctttatgatacgtaagtttcgcaggagtttgctacagctgctctgtctgaggttactgcggtgccagagaccagccaaagatctcccggctgccggaagcgagatgcagatccggccaatcgtgatgtcacagaaggacggagaccgacccaagaaaaaggtgacttttaattcctcttccattatctttattattacttctgatgagtccctgtctgtcgacgacagcgacaagactaacggatctaaagttgacgtcatacaagtcagaccgctttag

SEQ ID NO: 179231 - DNA, 1209 bp, Artificial Sequence
  derived and/or modified sequence
atgtattcaggtaatcgaagcgggggtcatgggtattgggacggaggcggtgccgcaggtgctgaggggcctgctcccgctggcactctctcccccgctccactgttttctcccggtacttacgagcggctggctctcttgctcggtagtatcggcctcttgggcgtgggcaacaatctcctggtgctggtattatattataagttccagcgcctccgcacacccacacacttgttacttgtaaacatttccctaagtgacctgctggtttctttatttggcgtgaccttcaccttcgtctcttgtcttagaaacggatgggtctgggatacggtagggtgcgtgtgggatgggttctcaggatctctcttcgggatcgtatcaattgccactctgactgtgctcgcatatgaacgttacatccgggtggttcatgcacgggtcatcaacttctcatgggcctggagagcgatcacctacatctggttgtatagcctcgcatgggccggagctccactgctggggtggaaccgctatattctcgacgtgcacgggctcggatgcaccgtggactggaagtccaaggatgctaacgactctagctttgtactgtttctgtttctgggatgtcttgtagtgccactgggagtgattgcacactgttatgggcacatcctttatagcattcggatgttgcgctgcgtggaagacctgcagactatacaggtcataaagatcctgaagtacgagaagaagctagccaagatgtgcttcctcatgatttttacatttctggtctgttggatgccatacatcgttatctgtttcttggtggtcaatggacacggacatctggtgacacccacaataagcatcgtgagctatctattcgccaagtcaaacactgtctacaaccctgtgatttatgtgtttatgatccggaaatttcggaggagcttactgcagctgctgtgtctgaggcttctccgatgccagaggcccgcaaaggatcttcccgcagcaggttcagagatgcagatccggcctatcgtgatgtcccagaaggatggagaccggccaaaaaagaaggtgacttttaactctagctctatcatattcattattacatccgacgagtcccttagtgtcgacgattctgataagactaatggatccaaagtcgacgttatccaggtacgacccctgtag

SEQ ID NO: 179232 - DNA, 972 bp, Artificial Sequence
  derived and/or modified sequence
atgtacagcggcaacagaagcggcggccacggctactgggacggcggcggcgccgccggcgccgagggccccgcccccgccggcaccctgagccccgcccccctgttcagccccggcacctacgagagactggccctgctgctgggcagcatcggcctgctgggcgtgggcaacaacctgctggtgctggtgctgtactacaagttccagagactgagaacccccacccacctgctgctggtgaacatcagcctgagcgacctgctggtgagcctgttcggcgtgaccttcaccttcgtgagctgcctgagaaacggctgggtgtgggacaccgtgggctgcgtgtgggacggcttcagcggcagcctgttcggctggatcagccagctgcaggccgccaccagagaggccagagccagcatgggccccgtgcagcagggcaccatctgcatgcagctgagatgcgtggaggacctgcagaccatccaggtgatcaagatcctgaagtacgagaagaagctggccaagatgtgcttcctgatgatcttcaccttcctggtgtgctggatgccctacatcgtgatctgcttcctggtggtgaacggccacggccacctggtgacccccaccatcagcatcgtgagctacctgttcgccaagagcaacaccgtgtacaaccccgtgatctacgtgttcatgatcagaaagttcagaagaagcctgctgcagctgctgtgcctgagactgctgagatgccagagacccgccaaggacctgcccgccgccggcagcgagatgcagatcagacccatcgtgatgagccagaaggacggcgacagacccaagaagaaggtgaccttcaacagcagcagcatcatcttcatcatcaccagcgacgagagcctgagcgtggacgacagcgacaagaccaacggcagcaaggtggacgtgatccaggtgagacccctgtag

SEQ ID NO: 179233 - DNA, 1209 bp, Artificial Sequence
  derived and/or modified sequence
atgtacagcggcaacagaagcggcggccacggctactgggacggcggcggcgccgccggcgccgagggccccgcccccgccggcaccctgagccccgcccccctgttcagccccggcacctacgagagactggccctgctgctgggcagcatcggcctgctgggcgtgggcaacaacctgctggtgctggtgctgtactacaagttccagagactgagaacccccacccacctgctgctggtgaacatcagcctgagcgacctgctggtgagcctgttcggcgtgaccttcaccttcgtgagctgcctgagaaacggctgggtgtgggacaccgtgggctgcgtgtgggacggcttcagcggcagcctgttcggcatcgtgagcatcgccaccctgaccgtgctggcctacgagagatacatcagagtggtgcacgccagagtgatcaacttcagctgggcctggagagccatcacctacatctggctgtacagcctggcctgggccggcgcccccctgctgggctggaacagatacatcctggacgtgcacggcctgggctgcaccgtggactggaagagcaaggacgccaacgacagcagcttcgtgctgttcctgttcctgggctgcctggtggtgcccctgggcgtgatcgcccactgctacggccacatcctgtacagcatcagaatgctgagatgcgtggaggacctgcagaccatccaggtgatcaagatcctgaagtacgagaagaagctggccaagatgtgcttcctgatgatcttcaccttcctggtgtgctggatgccctacatcgtgatctgcttcctggtggtgaacggccacggccacctggtgacccccaccatcagcatcgtgagctacctgttcgccaagagcaacaccgtgtacaaccccgtgatctacgtgttcatgatcagaaagttcagaagaagcctgctgcagctgctgtgcctgagactgctgagatgccagagacccgccaaggacctgcccgccgccggcagcgagatgcagatcagacccatcgtgatgagccagaaggacggcgacagacccaagaagaaggtgaccttcaacagcagcagcatcatcttcatcatcaccagcgacgagagcctgagcgtggacgacagcgacaagaccaacggcagcaaggtggacgtgatccaggtgagacccctgtag

SEQ ID NO: 179234 - protein, 687 aa, Artificial Sequence
  derived and/or modified sequence
MERVNDASCGPSGCYTYQVSRHSTEMLHNLNQQRKNGGRFCDVLLRVGDESFPAHRAVLAACSEYFESVFSAQLGDGGAADGGPADVGGATAAPGGGAGGSRELEMHTISSKVFGDILDFAYTSRIVVRLESFPELMTAAKFLLMRSVIEICQEVIKQSNVQILVPPARADIMLFRPPGTSDLGFPLDMTNGAALAANSNGIAGSMQPEEEAARAAGAAIAGQASLPVLPGVDRLPMVAGPLSPQLLTSPFPSVASSAPPLTGKRGRGRPRKANLLDSMFGSPGGLREAGILPCGLCGKVFTDANRLRQHEAQHGVTSLQLGYIDLPPPRLGENGLPISEDPDGPRKRSRTRKQVACEICGKIFRDVYHLNRHKLSHSGEKPYSCPVCGLRFKRKDRMSYHVRSHDGSVGKPYICQSCGKGFSRPDHLNGHIKQVHTSERPHKCQTCNASFATRDRLRSHLACHEDKVPCQVCGKYLRAAYMADHLKKHSEGPSNFCSICNRGFSSASYLKVHVKTHHGVPLPQVSRHQEPILNGGAAFHCARTYGNKEGQKCSHQDPIESSDSYGDLSDASDLKTPEKQSANGSFSCDMAVPKNKMESDGEKKYPCPECGSFFRSKSYLNKHIQKVHVRALGGPLGDLGPALGSPFSPQQNMSLLESFGFQIVQSAFASSLVDPEVDQQPMGPEGK

SEQ ID NO: 179235 - DNA, 3812 bp, Artificial Sequence
  derived and/or modified sequence
gggcctactctgccgccgccgccgcccgcccgctccagccgccgccgccgccgccaccgccctccaggctccgggacccggcccgcgccaccgcccccgtgcgcgccccgccgccgccgccttcgccttcgccttttgtttcctccgctccggcgcccccgccccggctcgcgctttgcaggggacgcagcgcgcgcccccagcgggcccgggaaaagccgcggcgcgcgcgcgcgcctgcgcggcggacccctccttctcctccccgcgtgcgcgtgcccttcttggctgcgcgccggcgccgcctggcgggcgggaggggaggtggcaggcgcgtttgcaggaggggcgcacctcttcgctcgcgcacccccccggaaggtagaccgggaaggggaggcgggcgggcggagaggagagagtggcgcgcagtccagcgagggcgggggttggctatgtggggggtggtgcaccccgcagtctagacagtctgatccgggctgggggcgtgtacactcggcgcacctgcgagactacagagcctcgggccggcacgtgtggggagtgtggacacgtctgctgcgccccgcttctcgctgctgaggggaagggagggggcgggcaggtgcagcggccgggctagtgggagggggcggcggccatggagcgggtgaacgacgcttcgtgcggcccgtctggctgctacacataccaggtgagcagacacagcacggagatgctgcacaacctgaaccagcagcgcaaaaacggcgggcgcttctgcgacgtgctcttgcgggtaggcgacgagagcttcccagcgcaccgcgccgtgctggccgcctgcagcgagtactttgagtcggtgttcagcgcccagttgggcgacggcggagctgcggacgggggtccggctgatgtagggggcgcgacggcagcaccaggcggcggggccgggggcagccgggagctggagatgcacactatcagctccaaggtatttggggacattctggacttcgcctacacttcccgcatcgtggtgcgcttggagagctttcccgaactcatgacggccgccaagttcctgctgatgaggtcggttatcgagatctgccaggaagtcatcaaacagtccaacgtacagatcctggtaccccctgcccgcgccgatataatgctctttcgcccccctgggacctcggacttgggcttccctttggacatgaccaacggggcagccttggcagccaacagcaatggcatcgccggcagcatgcagccagaggaggaggcagctcgggcggctggtgcagccattgcaggccaagcctctttgcctgtgttacctggggtggaccgcttgcccatggtggctggacccctatccccccaactgctgacttccccattccccagtgtggcatccagtgcccctcccctgactggcaagcgaggccggggccgcccaaggaaggccaacctgctggactcaatgtttgggtccccagggggcctgagggaggcaggcatccttccatgcggtctatgtggtaaggtgttcactgatgccaaccggctccggcagcacgaggcccagcacggtgtcaccagcctccagctgggctacatcgaccttcctcctccgaggctgggtgagaatgggctacccatctctgaagaccccgacggcccccgaaagaggagccggaccaggaagcaggtggcttgtgagatctgcggcaagatcttccgtgatgtgtatcatcttaaccggcacaagctgtcccactctggggagaagccctactcctgccctgtgtgtgggttgcggttcaagagaaaagaccgcatgtcctaccatgtgcggtcccatgatgggtccgtgggcaagccttacatctgccagagctgtgggaaaggcttctccaggcctgatcacttgaacggacatatcaagcaggtgcacacttctgagcggcctcacaagtgtcagacctgcaatgcttcttttgccacccgagaccgtctgcgctcccacctggcctgtcatgaagacaaggtgccctgccaggtgtgtgggaagtacttgcgggcagcatacatggcagaccacctgaagaagcacagcgaggggcccagcaacttctgcagtatctgtaaccgaggtttctcctctgcctcctacttaaaggtccatgttaaaacccaccacggtgttccccttccccaggtctccaggcaccaggagcccatcctgaatgggggagcagcgttccactgcgccaggacctatggcaacaaagaaggccagaaatgctcacatcaggatccgattgagagctctgactcctatggtgacctctcagatgccagcgacctgaagacgccagagaagcagagtgccaatggctctttctcctgcgacatggcagtccccaaaaacaaaatggagtctgatggggagaagaagtacccatgccctgaatgtgggagcttcttccgctctaagtcctacttgaacaaacacatccagaaggtgcatgtccgggctctcgggggccccctgggggacctgggccctgcccttggctcacctttctctcctcagcagaacatgtctctcctcgagtcctttgggtttcagattgttcagtcggcatttgcgtcatctttagtagatcctgaggttgaccagcagcccatggggcctgaagggaaatgaggcagctgctgtgtccccacggaaacaaccatctggggactgctgggaaatgctgtgaatgcggagggaagtgatgtttgggttctgtagctgagagatttttattcatttttaactgccccccaaccccactccaactccttctccaccacccattctcccaatggtctttagaaatagattttcatctgatattctgcagaaatatcaatgagacttggtatgggacaggggcagaaaacactacataggcctccaaggcaaaaccagtcccagtttctttaatgggaagaagctggaattcctggtgctcaattcttagtgaccccaatcctatacccaaatctatgatattctgggacctcagtgattttggtcccctcccacttctctagttcgtcatcctcccttcccatatccttcaaaagaaccacactagggtctccacctacttatacaatgcggatgcccaactgtttttaaggaagccagaagcatcccatggaccatggggtgagtgtcctccaagagccccctgagctcagccctctgcctggagggctccagacctttctgagccctgcttggaggcgagcattttcactgctaggacaagctcagctgttgaggacacccccaccccaaatttcagttcttacgtgattttaaccattcaacatgctgttgggttttaattctctaattattattattattgttattattttttaggaccagttgtagtgaattgctactgaaagctatcccaggtgatacagagctctttgtaaaccgcagtcacacattagggttagtattaaactttgtttagatgtaccataattaacttggctagttgattgtttgaagtctatggaagaaatagttttatgcaaaattttaaaaaatgccagtctggtcagggaagtagggggtttcaatgctgttgggaaccaggaaggtgggacagccggcaggtagggacattgtgtacctcagttgtgtcacatgtgagcaagcccaggttgaccttgtgatgtgaattgatctgatcagactgtattaaaaatgttagtacattactcta

SEQ ID NO: 179236 - DNA, 2064 bp, Artificial Sequence
  derived and/or modified sequence
atggagcgagtgaatgacgcatcttgcggacccagtgggtgctacacctaccaggtcagccggcactccacagaaatgcttcataatctgaatcagcagcgaaagaacggcggccgattctgcgatgttctgctccgggttggtgatgagtctttcccagcgcacagggctgtattagctgcctgtagcgagtattttgagtccgtctttagtgcacagcttggtgacgggggggcggccgacggggggcctgctgacgttggtggtgctaccgctgcacccggcggaggggctggtggtagtcgtgaactggagatgcacaccattagctctaaagtatttggggacatacttgacttcgcctatacatctaggattgtggtgaggctggaaagcttccccgaattaatgacggcagctaaattcctcctcatgagatccgtgattgaaatttgccaggaagtgatcaagcagagcaacgttcagatactggtgcctccggcacgggcggatattatgctcttcagaccacccggcacaagcgacctcggctttccactcgatatgaccaatggagcagcgctcgccgcgaatagcaacggcatagcggggtctatgcagccagaggaagaggcagccagggccgcaggcgccgccattgcaggacaggccagcctgccagtgctgccaggagtggaccggcttcctatggttgctggtcccctatctccccagttgttgacgagcccatttccatctgtcgcctcttcagcacctccgctgactgggaaaaggggtagagggcgtcctaggaaagccaatctcctggacagcatgtttgggtcccctggtggcctgcgagaagccggaatacttccctgcgggctctgtggcaaggtttttacggatgctaatcggctgcgccaacatgaggctcagcatggagtcacctctctgcagctgggttatattgacctgcccccaccaagactcggcgagaacgggctgcccatctccgaagaccccgacggtccccggaaaagaagtcgaacacgcaaacaggtcgcctgtgagatttgcggaaaaatctttagggacgtgtaccaccttaacaggcacaagctgagccattccggagagaagccatatagttgtcctgtgtgcgggttgcgatttaagaggaaagacaggatgtcctatcacgtgcgaagtcatgatggctccgtagggaaaccatatatttgtcagtcctgcggcaagggcttctctcgccctgatcatctgaatggtcatattaagcaggtgcacaccagtgaacgaccccataaatgtcagacttgcaacgcctctttcgccactcgcgatcggctgcgctctcacctcgcctgccacgaagacaaagtgccgtgtcaggtgtgcggaaaatatctccgagctgcatacatggccgaccacttgaaaaagcacagcgagggaccaagtaatttctgtagcatttgcaacagaggatttagttctgccagttatctgaaggtccacgtaaaaacccaccacggagttcctctgccacaggtaagccgccatcaggaaccgattctcaacggcggagcagcctttcattgcgcacgaacctatgggaataaagagggacagaaatgtagccaccaggaccctatagagagttctgacagttatggcgatctctcagacgccagcgatctgaagacgccagagaagcagagtgccaacggcagtttcagttgtgatatggctgttccaaaaaataaaatggaaagtgacggagagaagaagtacccctgtccggaatgcgggagcttcttccgcagcaagtcatacctgaataagcacattcagaaggttcatgtccgggccctgggcggccccttgggcgacctagggcctgcattggggtcaccattctcccctcagcagaacatgagtctgttagaatcatttggatttcagatcgtccagtctgccttcgcctccagcctggtggatccagaagtagatcagcagccgatgggtccagaagggaagtag

SEQ ID NO: 179237 - DNA, 2064 bp, Artificial Sequence
  derived and/or modified sequence
atggagcgggtgaatgatgccagctgtggccccagcggctgctacacctaccaggtgagccgccacagcacagagatgctgcacaacctgaaccagcagaggaagaatggaggccgcttctgtgatgtgctgctgcgggtgggagatgagagcttccctgcccacagagctgtgctggccgcctgcagcgagtactttgagagcgtcttcagcgcccagctgggagatggaggagctgctgatggcggccctgcagatgtgggcggggccacagctgcccctgggggcggggccggcggcagccgggagctggagatgcacaccatcagcagcaaggtgtttggagacatcctggactttgcctacaccagccgcatcgtggtgcggctggagagcttccctgagctgatgacagctgccaagttcctgctgatgaggtctgtgattgagatctgccaggaggtgatcaagcagagcaatgtgcagatcctggtgcccccagcccgggctgacatcatgctgttccggcccccaggcaccagtgacctgggcttccccctggacatgaccaatggagctgccctggccgccaacagcaatggaattgctggctccatgcagcctgaggaggaggccgcccgggccgccggggccgccatcgccggccaggccagcctgcctgtgctgcccggggtggaccggctgcccatggtggccggccccctgagcccccagctgctgaccagccccttccccagcgtggccagcagcgccccacccctgaccgggaagaggggccggggccggcccaggaaggccaacctgctggacagcatgtttggcagccctgggggcctgcgggaggccggcatcctgccctgtggcctgtgtgggaaggtgttcacagatgccaaccggctgcggcagcacgaggcccagcacggcgtgaccagcctgcagctgggctacatcgacctgcccccaccccggctgggagaaaatggcctgcccatcagcgaggaccctgatggccccaggaagaggagcaggaccaggaagcaggtggcctgtgagatctgtgggaagatcttcagagatgtgtaccacctgaacagacacaagctgagccacagcggggagaagccctacagctgccctgtgtgtggcctgcgcttcaagaggaaggacaggatgagctaccacgtgcgcagccatgatggctctgtgggcaagccctacatctgccagagctgtgggaagggcttcagcaggccagaccacctgaatggccacatcaagcaggtgcacaccagcgagcggccccacaagtgccagacctgcaatgccagctttgccacccgggaccggctgcggagccacctggcctgccacgaggacaaggtgccctgccaggtgtgtgggaagtacctgcgggccgcctacatggctgaccacctgaagaagcacagcgagggccccagcaacttctgcagcatctgcaacagaggcttcagcagcgccagctacctgaaggtgcacgtgaagacccaccacggcgtgcccctgccccaggtgagccgccaccaggagcccatcctgaatggaggagctgccttccactgtgcccggacctacggcaacaaggagggccagaagtgcagccaccaggaccccatcgagagcagtgacagctatggagacctgagtgatgccagtgacctgaagaccccagagaagcagagcgccaacggcagcttcagctgtgacatggctgtgcccaagaacaagatggagagtgatggagagaagaagtacccctgcccagaatgtggcagcttcttccgcagcaagagctacctgaacaagcacatccagaaggtgcacgtgcgggccctgggcggccccctgggggacctgggccctgccctgggcagccccttcagcccccagcagaacatgagcctgctggagagctttggcttccagatcgtgcagagcgcctttgccagcagcctggtggaccctgaggtggaccagcagcccatgggccctgagggcaagtag

SEQ ID NO: 179238 - DNA, 3781 bp, Artificial Sequence
  derived and/or modified sequence
gctccagccgccgccgccgccgccaccgccctccaggctccgggacccggcccgcgccaccgcccccgtgcgcgccccgccgccgccgccttcgccttcgccttttgtttcctccgctccggcgcccccgccccggctcgcgctttgcaggggacgcagcgcgcgcccccagcgggcccgggaaaagccgcggcgcgcgcgcgcgcctgcgcggcggacccctccttctcctccccgcgtgcgcgtgcccttcttggctgcgcgccggcgccgcctggcgggcgggaggggaggtggcaggcgcgtttgcaggaggggcgcacctcttcgctcgcgcacccccccggaaggtagaccgggaaggggaggcgggcgggcggagaggagagagtggcgcgcagtccagcgagggcgggggttggctatgtggggggtggtgcaccccgcagtctagacagtctgatccgggctgggggcgtgtacactcggcgcacctgcgagactacagagcctcgggccggcacgtgtggggagtgtggacacgtctgctgcgccccgcttctcgctgctgaggggaagggagggggcgggcaggtgcagcggccgggctagtgggagggggcggcggccatggagcgggtgaacgacgcttcgtgcggcccgtctggctgctacacataccaggtgagcagacacagcacggagatgctgcacaacctgaaccagcagcgcaaaaacggcgggcgcttctgcgacgtgctcttgcgggtaggcgacgagagcttcccagcgcaccgcgccgtgctggccgcctgcagcgagtactttgagtcggtgttcagcgcccagttgggcgacggcggagctgcggacgggggtccggctgatgtagggggcgcgacggcagcaccaggcggcggggccgggggcagccgggagctggagatgcacactatcagctccaaggtatttggggacattctggacttcgcctacacttcccgcatcgtggtgcgcttggagagctttcccgaactcatgacggccgccaagttcctgctgatgaggtcggttatcgagatctgccaggaagtcatcaaacagtccaacgtacagatcctggtaccccctgcccgcgccgatataatgctctttcgcccccctgggacctcggacttgggcttccctttggacatgaccaacggggcagccttggcagccaacagcaatggcatcgccggcagcatgcagccagaggaggaggcagctcgggcggctggtgcagccattgcaggccaagcctctttgcctgtgttacctggggtggaccgcttgcccatggtggctggacccctatccccccaactgctgacttccccattccccagtgtggcatccagtgcccctcccctgactggcaagcgaggccggggccgcccaaggaaggccaacctgctggactcaatgtttgggtccccagggggcctgagggaggcaggcatccttccatgcggtctatgtggtaaggtgttcactgatgccaaccggctccggcagcacgaggcccagcacggtgtcaccagcctccagctgggctacatcgaccttcctcctccgaggctgggtgagaatgggctacccatctctgaagaccccgacggcccccgaaagaggagccggaccaggaagcaggtggcttgtgagatctgcggcaagatcttccgtgatgtgtatcatcttaaccggcacaagctgtcccactctggggagaagccctactcctgccctgtgtgtgggttgcggttcaagagaaaagaccgcatgtcctaccatgtgcggtcccatgatgggtccgtgggcaagccttacatctgccagagctgtgggaaaggcttctccaggcctgatcacttgaacggacatatcaagcaggtgcacacttctgagcggcctcacaagtgtcagacctgcaatgcttcttttgccacccgagaccgtctgcgctcccacctggcctgtcatgaagacaaggtgccctgccaggtgtgtgggaagtacttgcgggcagcatacatggcagaccacctgaagaagcacagcgaggggcccagcaacttctgcagtatctgtaaccgaggtttctcctctgcctcctacttaaaggtccatgttaaaacccaccacggtgttccccttccccaggtctccaggcaccaggagcccatcctgaatgggggagcagcgttccactgcgccaggacctatggcaacaaagaaggccagaaatgctcacatcaggatccgattgagagctctgactcctatggtgacctctcagatgccagcgacctgaagacgccagagaagcagagtgccaatggctctttctcctgcgacatggcagtccccaaaaacaaaatggagtctgatggggagaagaagtacccatgccctgaatgtgggagcttcttccgctctaagtcctacttgaacaaacacatccagaaggtgcatgtccgggctctcgggggccccctgggggacctgggccctgcccttggctcacctttctctcctcagcagaacatgtctctcctcgagtcctttgggtttcagattgttcagtcggcatttgcgtcatctttagtagatcctgaggttgaccagcagcccatggggcctgaagggaaatgaggcagctgctgtgtccccacggaaacaaccatctggggactgctgggaaatgctgtgaatgcggagggaagtgatgtttgggttctgtagctgagagatttttattcatttttaactgccccccaaccccactccaactccttctccaccacccattctcccaatggtctttagaaatagattttcatctgatattctgcagaaatatcaatgagacttggtatgggacaggggcagaaaacactacataggcctccaaggcaaaaccagtcccagtttctttaatgggaagaagctggaattcctggtgctcaattcttagtgaccccaatcctatacccaaatctatgatattctgggacctcagtgattttggtcccctcccacttctctagttcgtcatcctcccttcccatatccttcaaaagaaccacactagggtctccacctacttatacaatgcggatgcccaactgtttttaaggaagccagaagcatcccatggaccatggggtgagtgtcctccaagagccccctgagctcagccctctgcctggagggctccagacctttctgagccctgcttggaggcgagcattttcactgctaggacaagctcagctgttgaggacacccccaccccaaatttcagttcttacgtgattttaaccattcaacatgctgttgggttttaattctctaattattattattattgttattattttttaggaccagttgtagtgaattgctactgaaagctatcccaggtgatacagagctctttgtaaaccgcagtcacacattagggttagtattaaactttgtttagatgtaccataattaacttggctagttgattgtttgaagtctatggaagaaatagttttatgcaaaattttaaaaaatgccagtctggtcagggaagtagggggtttcaatgctgttgggaaccaggaaggtgggacagccggcaggtagggacattgtgtacctcagttgtgtcacatgtgagcaagcccaggttgaccttgtgatgtgaattgatctgatcagactgtattaaaaatgttagtacattactcta

SEQ ID NO: 179239 - DNA, 2064 bp, Artificial Sequence
  derived and/or modified sequence
atggagcgggtgaacgacgccagctgcggccccagcggctgctacacttatcaggtttcacgacacagtactgagatgctgcacaacctcaatcaacaaaggaaaaacgggggccgcttctgtgatgttctgctgcgagtgggagatgagagtttccctgcccaccgggcagtgctggccgcatgctcagaatacttcgaatcagtatttagcgcccagctgggggatggaggagcagctgatggcggcccggcggacgtcgggggggctacagcagccccgggcggcggtgcaggcggaagccgggagctggagatgcatacaatttcctcaaaagtattcggggacatccttgattttgcctacaccagcagaattgttgtgcgactcgagagctttcctgaattaatgacagcggccaaattcctccttatgaggagcgtgatcgaaatatgccaagaagtgataaaacagtcaaatgtgcagatcctcgttccacctgcccgtgcggatatcatgctcttccggcctcctggaactagcgatctaggctttcctctggacatgacgaacggtgccgccctagcagctaactccaacggtatagccggctcgatgcagcccgaagaggaagccgcccgggcggcgggggcagccatcgcaggacaggctagtttacctgtgctgcctggtgtcgacaggctgccaatggtggctggccccctgtctcctcagcttctcacaagtcctttcccttctgtggcctcctccgcccctccgctgactggaaagagagggagggggagaccgcgaaaggctaatcttctcgatagtatgtttggctccccagggggacttcgcgaggcaggtattttgccgtgcgggctgtgtggaaaggttttcacagacgccaacaggctgcggcagcacgaagcccagcatggagttacatcccttcagctaggctatatcgatctgccacctcctaggctcggagaaaacggtctgcctatttctgaagatccggatggtccaagaaagcgcagtcggacacgtaagcaggttgcttgtgaaatctgtggcaagatcttcagggatgtctatcatctgaaccgtcacaaattaagccattcaggcgagaagccatacagctgtccggtttgtggattgcggttcaagcggaaagaccgcatgagctatcacgtgagaagtcatgatgggagtgttggtaagccatacatctgccaatcttgcgggaaggggttctcaaggccggatcatctgaatgggcacataaaacaggtgcacacctccgaaaggccgcacaaatgtcaaacttgtaatgccagcttcgcgacacgggatcgattacggtcacacttggcttgtcatgaggataaggtaccctgtcaagtgtgcggcaagtatcttcgggctgcatatatggccgaccacctcaaaaagcactccgagggccctagcaacttctgctctatctgtaaccgtgggttttcatccgcctcctatctgaaggtgcacgtcaagacccaccacggagtccctctgccccaggtctcccggcaccaagagcctattctgaacggaggcgccgcatttcattgcgcgcgcacttacgggaataaggagggccagaagtgcagccaccaggatccaatcgaatctagtgactcctatggcgacctgagcgatgcctctgacttgaaaacccccgaaaaacagtctgccaatggttccttctcctgcgacatggcggtcccaaagaataagatggagagtgacggcgaaaagaagtacccatgccctgaatgtgggtcgttttttcggagtaagagctacctcaataaacacattcagaaggtgcatgtccgcgcactagggggccctcttggagatctggggcctgctctaggaagtccatttagtccacagcagaatatgtctttgctggagagcttcggctttcagattgtgcagtcggcgtttgcgtccagccttgtcgacccggaagtggaccagcagcctatgggccctgagggcaaatag

SEQ ID NO: 179240 - DNA, 2064 bp, Artificial Sequence
  derived and/or modified sequence
atggaaagggtgaatgacgccagttgcggtccgtcaggctgctacacttaccaggtgtctcggcacagcaccgaaatgctacataaccttaaccagcaacgcaaaaacggaggccgtttttgcgacgtgctcttacgtgtcggagacgagagcttccccgctcaccgcgctgtgctagcggcatgttcggagtattttgaatccgtgttttctgcacagctcggggacggtggcgcagccgatgggggtcccgcagatgttggaggggcaactgccgctcctggcggtggtgcgggaggctcccgggagctggaaatgcacacaatttcgtcgaaggtattcggcgacattttggatttcgcatataccagtagaatcgtggtaagactagaaagtttccccgaactgatgacagcagccaaatttctgctgatgcgtagtgttattgaaatctgccaggaggtcattaagcagtctaacgttcaaatcttggtccccccagccagagccgatattatgctgttccggcctcctggcacttccgacctcggctttccactggacatgaccaacggggcagcactggctgccaattctaacggaatagcgggttccatgcagcccgaggaggaggccgctcgcgctgcaggcgcagcaatagccggacaggcctctctgcccgttctcccaggcgttgaccggctgccgatggttgcgggtcctctgagccctcagcttctcacatcccccttcccaagtgttgccagctccgcgcctccactgacggggaagaggggaagagggagaccgaggaaggctaacctcctcgactccatgttcgggagtccaggtggtttaagggaagccggaatcttgccttgcggactgtgtggcaaggtgtttacagacgctaacaggcttcggcagcacgaagcccagcatggcgtgacgagtctgcagcttggttatattgacctgccaccacctagactcggcgaaaacggactacctatctctgaggatcctgacgggccaagaaagcgatcacggacccgtaagcaggtcgcctgcgagatttgtggcaagatctttagggacgtgtatcacttaaatcgccataagctgtcgcattccggagaaaaaccatactcatgtcctgtctgcggcctacggttcaagcgtaaggaccgaatgtcttaccatgtgagatcccatgacgggtcggtaggtaaaccttatatctgccaaagttgcggcaagggctttagcagacctgatcatctgaatggacacattaagcaagtgcatacctcagagaggccccacaaatgccagacttgcaacgcctcctttgcgacaagggacaggctgcgctcacacctcgcctgccacgaagataaggtgccctgccaggtgtgcggaaaatacctacgcgcagcatacatggcagaccatttaaagaagcactccgaggggccttccaacttctgttccatttgcaataggggatttagcagcgccagttacctgaaggtgcatgtgaagacacaccatggggtgccactgccccaagtaagtcgacatcaggaaccgatccttaacggtggcgctgccttccactgcgctcgaacctatggaaataaagaggggcagaagtgttctcaccaggatccgatcgagtcaagtgacagttacggagatctgagcgacgcaagcgatctgaaaacccccgagaagcagtccgcgaacgggtcattctcctgtgacatggcggtgcctaagaataagatggaatctgatggggagaaaaagtatccttgcccagaatgcggtagcttttttagatcgaaatcatatttaaacaagcatatccaaaaagtccacgttagggctctgggtggcccactgggcgacctcgggccagctttgggcagccccttctcgccgcagcaaaatatgagtctattggaatctttcgggtttcagatcgtgcagtccgcattcgcttcttccctggtggatccagaggtcgatcagcagcctatgggaccagaaggcaagtag

SEQ ID NO: 179241 - DNA, 2064 bp, Artificial Sequence
  derived and/or modified sequence
atggagagagtgaacgacgccagctgcggccccagcggctgctacacctaccaggtgagcagacacagcaccgagatgctgcacaacctgaaccagcagagaaagaacggcggcagattctgcgacgtgctgctgagagtgggcgacgagagcttccccgcccacagagccgtgctggccgcctgcagcgagtacttcgagagcgtgttcagcgcccagctgggcgacggcggcgccgccgacggcggccccgccgacgtgggcggcgccaccgccgcccccggcggcggcgccggcggcagcagagagctggagatgcacaccatcagcagcaaggtgttcggcgacatcctggacttcgcctacaccagcagaatcgtggtgagactggagagcttccccgagctgatgaccgccgccaagttcctgctgatgagaagcgtgatcgagatctgccaggaggtgatcaagcagagcaacgtgcagatcctggtgccccccgccagagccgacatcatgctgttcagaccccccggcaccagcgacctgggcttccccctggacatgaccaacggcgccgccctggccgccaacagcaacggcatcgccggcagcatgcagcccgaggaggaggccgccagagccgccggcgccgccatcgccggccaggccagcctgcccgtgctgcccggcgtggacagactgcccatggtggccggccccctgagcccccagctgctgaccagccccttccccagcgtggccagcagcgccccccccctgaccggcaagagaggcagaggcagacccagaaaggccaacctgctggacagcatgttcggcagccccggcggcctgagagaggccggcatcctgccctgcggcctgtgcggcaaggtgttcaccgacgccaacagactgagacagcacgaggcccagcacggcgtgaccagcctgcagctgggctacatcgacctgcccccccccagactgggcgagaacggcctgcccatcagcgaggaccccgacggccccagaaagagaagcagaaccagaaagcaggtggcctgcgagatctgcggcaagatcttcagagacgtgtaccacctgaacagacacaagctgagccacagcggcgagaagccctacagctgccccgtgtgcggcctgagattcaagagaaaggacagaatgagctaccacgtgagaagccacgacggcagcgtgggcaagccctacatctgccagagctgcggcaagggcttcagcagacccgaccacctgaacggccacatcaagcaggtgcacaccagcgagagaccccacaagtgccagacctgcaacgccagcttcgccaccagagacagactgagaagccacctggcctgccacgaggacaaggtgccctgccaggtgtgcggcaagtacctgagagccgcctacatggccgaccacctgaagaagcacagcgagggccccagcaacttctgcagcatctgcaacagaggcttcagcagcgccagctacctgaaggtgcacgtgaagacccaccacggcgtgcccctgccccaggtgagcagacaccaggagcccatcctgaacggcggcgccgccttccactgcgccagaacctacggcaacaaggagggccagaagtgcagccaccaggaccccatcgagagcagcgacagctacggcgacctgagcgacgccagcgacctgaagacccccgagaagcagagcgccaacggcagcttcagctgcgacatggccgtgcccaagaacaagatggagagcgacggcgagaagaagtacccctgccccgagtgcggcagcttcttcagaagcaagagctacctgaacaagcacatccagaaggtgcacgtgagagccctgggcggccccctgggcgacctgggccccgccctgggcagccccttcagcccccagcagaacatgagcctgctggagagcttcggcttccagatcgtgcagagcgccttcgccagcagcctggtggaccccgaggtggaccagcagcccatgggccccgagggcaagtag

SEQ ID NO: 179242 - protein, 382 aa, Artificial Sequence
  derived and/or modified sequence
MALQGISVVELSGLAPGPFCAMVLADFGARVVRVDRPGSRYDVSRLGRGKRSLVLDLKQPRGAAVLRRLCKRSDVLLEPFRRGVMEKLQLGPEILQRENPRLIYARLSGFGQSGSFCRLAGHDINYLALSGVLSKIGRSGENPYAPLNLLADFAGGGLMCALGIIMALFDRTRTGKGQVIDANMVEGTAYLSSFLWKTQKLSLWEAPRGQNMLDGGAPFYTTYRTADGEFMAVGAIEPQFYELLIKGLGLKSDELPNQMSMDDWPEMKKKFADVFAEKTKAEWCQIFDGTDACVTPVLTFEEVVHHDHNKERGSFITSEEQDVSPRPAPLLLNTPAIPSFKRDPFIGEHTEEILEEFGFSREEIYQLNSDKIIESNKVKASL

SEQ ID NO: 179243 - DNA, 3424 bp, Artificial Sequence
  derived and/or modified sequence
gtgagtagtgcctcctcccatctctcttgctcctggtctcatcgtgacgggcctggtcctgcctcactttctgccatgactaagagctccctgaggcctctccagaagcagtctccacaaaccggaggactacccccagactgcagtaagtgttgtcatggagactacagctttcgaggctaccaaggcccccctgggccaccgggccctcctggcattccaggaaaccatggaaacaatggcaacaatggagccactggtcatgaaggagccaaaggtgagaagggcgacaaaggtgacctggggcctcgaggggagcgggggcagcatggccccaaaggagagaagggctacccggggattccaccagaacttcagattgcattcatggcttctctggcaacccacttcagcaatcagaacagtgggattatcttcagcagtgttgagaccaacattggaaacttctttgatgtcatgactggtagatttggggccccagtatcaggtgtgtatttcttcaccttcagcatgatgaagcatgaggatgttgaggaagtgtatgtgtaccttatgcacaatggcaacacagtcttcagcatgtacagctatgaaatgaagggcaaatcagatacatccagcaatcatgctgtgctgaagctagccaaaggggatgaggtttggctgcgaatgggcaatggcgctctccatggggaccaccaacgcttctccacctttgcaggattcctgctctttgaaactaagtgtcatggagaaactccagctgggcccagagattctgcagcgggaaaatccaaggcttatttatgccaggctgagtggatttggccagtcaggaagcttctgccggttagctggccacgatatcaactatttggctttgtcaggtggaaggaacagcatatttaagttcttttctgtggaaaactcagaaattgagtctgtgggaagcacctcgaggacagaacatgttggatggtggagcacctttctatacgacttacaggacagcagatggggaattcatggctgttggagcaatagaaccccagttctacgagctgctgatcaaaggacttggactaaagtctgatgaacttcccaatcagatgagcatggatgattggccagaaatgaagaagaagtttgcagatgtatttgcagagaagacgaaggcagagtggtgtcaaatctttgacggcacagatgcctgtgtgactccggttctgacttttgaggaggttgttcatcatgatcacaacaaggaacggggctcgtttatcaccagtgaggagcaggacgtgagcccccgccctgcacctctgctgttaaacaccccagccatcccttctttcaaaagggatcctttcataggagaacacactgaggagatacttgaagaatttggattcagccgcgaagagatttatcagcttaactcagataaaatcattgaaagtaataaggtaaaagctagtctctaacttccaggcccacggctcaagtgaatttgaatactgcatttacagtgtagagtaacacataacattgtatgcatggaaacatggaggaacagtattacagtgtcctaccactctaatcaagaaaagaattacagactctgattctacagtgatgattgaattctaaaaatggttatcattagggcttttgatttataaaactttgggtacttatactaaattatggtagttattctgccttccagtttgcttgatatatttgttgatattaagattcttgacttatattttgaatgggttctagtgaaaaaggaatgatatattcttgaagacatcgatatacatttatttacactcttgattctacaatgtagaaaatgaggaaatgccacaaattgtatggtgataaaagtcacgtgaaacagagtgattggttgcatccaggccttttgtcttggtgttcatgatctccctctaagcacattccaaactttagcaacagttatcacactttgtaatttgcaaagaaaagtttcacctgtattgaatcagaatgccttcaactgaaaaaaacatatccaaaataatgaggaaatgtgttggctcactacgtagagtccagagggacagtcagttttagggttgcctgtatccagtaactcggggcctgtttccccgtgggtctctgggctgtcagctttcctttctccatgtgtttgatttctcctcaggctggtagcaagttctggatcttatacccaacacacagcaacatccagaaataaagatctcaggaccccccagcaagtcgttttgtgtctccttggactgagttaagttacaagcctttcttatacctgtctttgacaaagaagacgggattgtctttacataaaaccagcctgctcctggagcttccctggactcaacttcctaaaggcatgtgaggaaggggtagattccacaatctaatccgggtgccatcagagtagagggagtagagaatggatgttgggtaggccatcaataaggtccattctgcgcagtatctcaactgccgttcaacaatcgcaagaggaaggtggagcaggtttcttcatcttacagttgagaaaacagagactcagaagggcttcttagttcatgtttcccttagcgcctcagtgattttttcatggtggcttaggccaaaagaaatatctaaccattcaatttataaataattaggtccccaacgaattaaatattatgtcctaccaacttattagctgcttgaaaaatataatacacataaataaaaaaatatatttttcatttctatttcattgttaatcacaactacttactaaggagatgtatgcacctattggacactgtgcaacttctcacctggaatgagattggacactgctgccctcattttctgctccatgttggtgtccatatagtacttgattttttatcagatggcctggaaaacccagtctcacaaaaatatgaaattatcagaaggattatagtgcaatcttatgttgaaagaatgaactacctcactagtagttcacgtgatgtctgacagatgttgagtttcattgtgtttgtgtgttcaaatttttaaatattctgagatactcttgtgaggtcactctaatgccctgggtgccttggcacagttttagaaataccagttgaaaatatttgctcaggaatatgcaactaggaaggggcagaatcagaatttaagctttcatattctagccttcagtcttgttcttcaaccatttttaggaactttcccataaggttatgttttccagcccaggcatggaggatcacttgaggccaagagttcgagaccagcctggggaacttggctggacctccgtttctacgaaataaaaataaaaaaattatccagg

SEQ ID NO: 179244 - DNA, 1307 bp, Artificial Sequence
  derived and/or modified sequence
gggaaataagagagaaaagaagagtaagaagaaatataagagccaccatggcgctgcagggaattagcgtggtcgagctgtcgggactcgcccctggcccattttgcgcaatggtgttggcagactttggagcacgggtcgtccgggtggatcgtcccggtagcagatacgacgtgtcccgattgggtagaggaaagaggtccctcgtgcttgatctgaaacaaccccgtggagccgcagtccttagacgcctttgtaagaggtcagacgtcctgcttgaaccttttagaaggggcgtgatggaaaaacttcaactcggtccggaaattcttcagcgcgaaaacccacggctgatatacgctagactgtccggattcggccagtcaggatccttttgtagactggccggacacgatatcaattaccttgcattgtcgggggtgctgtcaaagattggacggagcggagaaaacccgtacgcaccattgaaccttctcgcagactttgcgggtggcggtcttatgtgtgcactggggattatcatggcactgtttgatcgaactcgcaccggaaagggccaagtgattgacgccaatatggtggaagggactgcatacctcagctcgtttctttggaaaacgcaaaaactttcactctgggaagctcctcggggtcagaacatgctcgatggtggtgccccattctacaccacctaccgaaccgccgatggcgagtttatggcagtgggagcaattgaaccccaattctatgagctcctgatcaagggactggggcttaagagcgacgaacttcctaaccaaatgtcgatggatgactggccagagatgaaaaagaagttcgcggatgtgtttgccgaaaagaccaaagctgaatggtgtcagattttcgatgggactgatgcatgcgtcacccctgtcctcacttttgaggaagtggtgcatcatgatcacaacaaggagaggggatcgtttatcacgagcgaggaacaagatgtgtcccctagaccagcacctctgctgctgaatacccctgcgattccatcgttcaagcgcgatcccttcatcggtgagcatactgaagaaatactggaggaatttggcttctcgcgcgaggaaatctaccagctgaattccgacaagatcattgaatccaacaaggttaaggcatctctttgataataggctggagcctcggtggccatgcttcttgccccttgggcctccccccagcccctcctccccttcctgcacccgtacccccgtggtctttgaataaagtctgagtgg

SEQ ID NO: 179245 - DNA, 1149 bp, Artificial Sequence
  derived and/or modified sequence
atggcattgcagggaatctcagtagtggagctgtcaggattggctccaggtcccttttgcgccatggtgctggcagatttcggtgccagggtcgtcagagtggatcgccccggaagtagatacgacgtttcccggctgggtcgtgggaaacgatcccttgtgttggatctcaagcagccgcgtggcgcggccgtccttagacgcttgtgtaaaagaagcgatgtgttgctagagccatttcggcgtggagtgatggagaagctgcaactgggccctgagatattgcagcgagagaacccaagattaatttatgccagactgtccggatttgggcaaagcggctccttctgcagactggcgggacacgacatcaattatctagcactgtcaggggtgctaagcaaaatcggaaggtctggggagaatccctacgcacccctaaatctgctggctgatttcgccggcggggggctcatgtgcgccctgggcatcataatggcactgtttgatcgtaccaggaccggaaagggacaggtgatcgatgccaatatggtcgaaggcactgcttatttatcttcattcctctggaagacccagaagctgtcattgtgggaggctccccgaggccagaacatgctggacggcggcgcgcctttttacactacatataggacagctgacggggaattcatggcagtgggtgcaatcgaaccacagttctacgaactgctaatcaaaggcttgggcctgaaatctgacgaactccccaaccagatgagcatggatgattggcccgagatgaaaaagaagtttgccgacgtcttcgccgaaaaaaccaaggcagagtggtgccaaattttcgacggtacagatgcctgtgtgactccagttctcacgttcgaagaggtggtccaccatgaccacaacaaagagagggggtccttcatcacctctgaagaacaggacgtctctcctcgcccagctccacttctcctcaacacaccggccattcccagcttcaagcgcgacccattcatcggtgaacacacggaagagattctcgaggagtttggcttctcccgggaggagatctaccagttaaacagtgacaagattattgagagtaacaaggtcaaggcgagcttgtag

SEQ ID NO: 179246 - DNA, 1149 bp, Artificial Sequence
  derived and/or modified sequence
atggccctgcagggcatctctgtggtggagctgagcggcctggcccctggccccttctgtgccatggtgctggccgactttggagcccgggtggtgcgggtggacaggcctggcagccgctatgatgtgtcccggctgggccggggcaagaggagcctggtgctggacctgaagcagcccagaggagctgctgtgctgcggcggctgtgcaagagaagtgatgtgctgctggagcccttcagaagaggagtgatggagaagctgcagctgggccctgagatcctgcagcgggagaaccccaggctcatctatgcccggctgagcggcttcggccagagcggcagcttctgccgcctggccggccatgacatcaactacctggccctgagcggcgtgctgagcaagattggccgctctggagagaacccctatgcccccctgaacctgctggccgactttgctgggggcggcctgatgtgtgccctgggcatcatcatggccctgtttgacaggaccaggacaggcaagggccaggtgattgatgccaacatggtggagggcacagcctacctgagcagcttcctgtggaagacccagaagctgagcctgtgggaggccccccggggccagaacatgctggatggaggagcccccttctacaccacctacagaacagcagatggagagttcatggctgtgggcgccatcgagccccagttctatgagctgctgatcaagggcctgggcctgaagagtgatgagctgcccaaccagatgtccatggatgactggccagagatgaagaagaagtttgctgatgtgtttgctgagaagaccaaggccgagtggtgccagatctttgatggaacagatgcctgtgtgacccctgtgctgacctttgaggaggtggtgcaccacgaccacaacaaggagcggggcagcttcatcaccagcgaggagcaggatgtgagccccaggcctgcccccctgctgctgaacaccccagccatccccagcttcaagagggaccccttcatcggggagcacacagaggagatcctggaggagtttggcttcagccgggaggagatctaccagctgaacagcgacaagatcatcgagagcaacaaggtgaaggccagcctgtag

SEQ ID NO: 179247 - DNA, 4153 bp, Artificial Sequence
  derived and/or modified sequence
ggcgccggggattgggagggcttcttgcaggctgctgggctggggctaagggctgctcagtttccttcagcggggcactgggaagcgccatggcactgcagggcatctcggtcgtggagctgtccggcctggccccgggcccgttctgtgctatggtcctggctgacttcggggcgcgtgtggtacgcgtggaccggcccggctcccgctacgacgtgagccgcttgggccggggcaagcgctcgctagtgctggacctgaagcagccgcggggagccgccgtgctgcggcgtctgtgcaagcggtcggatgtgctgctggagcccttccgccgcggtgtcatggagaaactccagctgggcccagagattctgcagcgggaaaatccaaggcttatttatgccaggctgagtggatttggccagtcaggaagcttctgccggttagctggccacgatatcaactatttggctttgtcaggtgttctctcaaaaattggcagaagtggtgagaatccgtatgccccgctgaatctcctggctgactttgctggtggtggccttatgtgtgcactgggcattataatggctctttttgaccgcacacgcactggcaagggtcaggtcattgatgcaaatatggtggaaggaacagcatatttaagttcttttctgtggaaaactcagaaattgagtctgtgggaagcacctcgaggacagaacatgttggatggtggagcacctttctatacgacttacaggacagcagatggggaattcatggctgttggagcaatagaaccccagttctacgagctgctgatcaaaggacttggactaaagtctgatgaacttcccaatcagatgagcatggatgattggccagaaatgaagaagaagtttgcagatgtatttgcagagaagacgaaggcagagtggtgtcaaatctttgacggcacagatgcctgtgtgactccggttctgacttttgaggaggttgttcatcatgatcacaacaaggaacggggctcgtttatcaccagtgaggagcaggacgtgagcccccgccctgcacctctgctgttaaacaccccagccatcccttctttcaaaagggatcctttcataggagaacacactgaggagatacttgaagaatttggattcagccgcgaagagatttatcagcttaactcagataaaatcattgaaagtaataaggtaaaagctagtctctaacttccaggcccacggctcaagtgaatttgaatactgcatttacagtgtagagtaacacataacattgtatgcatggaaacatggaggaacagtattacagtgtcctaccactctaatcaagaaaagaattacagactctgattctacagtgatgattgaattctaaaaatggttatcattagggcttttgatttataaaactttgggtacttatactaaattatggtagttattctgccttccagtttgcttgatatatttgttgatattaagattcttgacttatattttgaatgggttctagtgaaaaaggaatgatatattcttgaagacatcgatatacatttatttacactcttgattctacaatgtagaaaatgaggaaatgccacaaattgtatggtgataaaagtcacgtgaaacagagtgattggttgcatccaggccttttgtcttggtgttcatgatctccctctaagcacattccaaactttagcaacagttatcacactttgtaatttgcaaagaaaagtttcacctgtattgaatcagaatgccttcaactgaaaaaaacatatccaaaataatgaggaaatgtgttggctcactacgtagagtccagagggacagtcagttttagggttgcctgtatccagtaactcggggcctgtttccccgtgggtctctgggctgtcagctttcctttctccatgtgtttgatttctcctcaggctggtagcaagttctggatcttatacccaacacacagcaacatccagaaataaagatctcaggaccccccagcaagtcgttttgtgtctccttggactgagttaagttacaagcctttcttatacctgtctttgacaaagaagacgggattgtctttacataaaaccagcctgctcctggagcttccctggactcaacttcctaaaggcatgtgaggaaggggtagattccacaatctaatccgggtgccatcagagtagagggagtagagaatggatgttgggtaggccatcaataaggtccattctgcgcagtatctcaactgccgttcaacaatcgcaagaggaaggtggagcaggtttcttcatcttacagttgagaaaacagagactcagaagggcttcttagttcatgtttcccttagcgcctcagtgattttttcatggtggcttaggccaaaagaaatatctaaccattcaatttataaataattaggtccccaacgaattaaatattatgtcctaccaacttattagctgcttgaaaaatataatacacataaataaaaaaatatatttttcatttctatttcattgttaatcacaactacttactaaggagatgtatgcacctattggacactgtgcaacttctcacctggaatgagattggacactgctgccctcattttctgctccatgttggtgtccatatagtacttgattttttatcagatggcctggaaaacccagtctcacaaaaatatgaaattatcagaaggattatagtgcaatcttatgttgaaagaatgaactacctcactagtagttcacgtgatgtctgacagatgttgagtttcattgtgtttgtgtgttcaaatttttaaatattctgagatactcttgtgaggtcactctaatgccctgggtgccttggcacagttttagaaataccagttgaaaatatttgctcaggaatatgcaactaggaaggggcagaatcagaatttaagctttcatattctagccttcagtcttgttcttcaaccatttttaggaactttcccataaggttatgttttccagcccaggcatggaggatcacttgaggccaagagttcgagaccagcctggggaacttggctggacctccgtttctacgaaataaaaataaaaaaattatccaggtatggtggtgtgtgcctgtagtcctatctactcaagggtggggcaggaggatcacttgagcccaggaatttgaggccacagtgaattaggattgcaccactgcactctagcccaggcaacagaacaagaacctgtctctaaataaataaataaaaataataataataaaaaagatgttttccctacaactcagacttttcatttgaactcggtccagcaaggaaaatataacccactcgaagtctttaaaacagaggaaatttaatataaagaattccactggtgacgaaagagcagagaagcccagaagatagtgaggcaaccctgataggaacataactaggaagccaagaccactcctatggttgcaggggtgatgggaaagctggtgtacttggacccagaagccaaagttgctgcacccaccttggagacatagacactggcagtaatacctcagggagaagaaagaaatctagggaaatatcctggcttctttccttctctctctcccctagtcttcctaccagtgtctcccattagccaaatctacctagaagccagaaaacaagggaaccctggaaatgtagccccataagataaagagcaccaaaggaaatagatctgagcagacaggcagcacaaaatgcagtgtgtatggtttattcactcagtaattcctttagcaaatgtttattgaggatctactaggtgccaggtatcatgatacttgctggggataccataatgaacaaaacagacctgttctccgctcttgaggaaatcaaagacaaacacaggatatggaataaacccagaattatctcattgtaaaatgtgttaagtaccacgaggagaaatatcagggcgatctgacacagctaatgatttgaagaagggtgtgacctgccaccattttaaatctagttatttcactcctgagctgtgtgtgtggaaaacttgtagtaaaaaatagaatgtctatatttataaaaa

SEQ ID NO: 179248 - DNA, 1149 bp, Artificial Sequence
  derived and/or modified sequence
atggccctgcagggcatcagcgtggtggagctgagcggcctggcccccggtcctttctgtgcaatggttctggcagactttggggctagagtcgtgagagtggaccgtcctgggagccggtacgacgtttcccggctgggccgcggcaagaggagcctcgtactagatctgaaacagcccagaggcgcagctgtgctccggaggctgtgtaagagatctgatgtgctcctagaacccttccggagaggggtgatggaaaagcttcagctggggccggagatactgcagagagaaaacccccggctgatctatgccagattgtccggttttggacagagcggatccttttgtcgtctagcgggccacgatattaattatctggcactctccggtgtactaagcaaaatcgggcggagcggcgagaatccatatgcccctctgaatctgctggctgacttcgcagggggcggtctgatgtgcgccttgggcattataatggctctctttgatagaactagaactggtaaggggcaggttatcgatgcaaacatggtggaagggacagcctacctgagcagcttcctgtggaaaacccagaaactgtctctatgggaggcacccagaggacagaatatgctggatggaggggctcctttttacactacctaccgcacagcagacggcgaattcatggcggtcggcgcaatcgaaccccagttttacgaactgctgatcaaaggactggggttaaagagcgacgagcttccaaaccagatgtcgatggacgactggccagaaatgaaaaagaaatttgccgatgtttttgccgaaaagactaaggccgaatggtgtcagatttttgacggcaccgacgcatgcgtgaccccagtcctcacattcgaagaggtggtccaccacgaccacaataaagagaggggctcttttatcacatcagaggagcaggacgtcagtccacgtccagcccccctgctgctgaacaccccagctattccttccttcaagagggacccctttataggagagcatacagaagaaatcctcgaagagtttggcttcagtagggaggaaatctatcagcttaactccgataaaattattgaaagcaataaagtgaaagcgtctctttag

SEQ ID NO: 179249 - DNA, 1149 bp, Artificial Sequence
  derived and/or modified sequence
atggctttgcagggtatatccgttgttgagctatcaggtctggcccctggccctttctgcgcaatggtgctggccgactttggcgctagggtagtgagagtggatcggcctggctcccgatacgatgtgagccggttgggcagaggaaaacggtcattggtcctcgacttgaagcagcctagaggtgcagccgttcttcgaagactgtgcaagcgcagcgatgtgctgctggagccgttccgacggggagtaatggagaaattgcaactcggtccagaaatcctgcagagagaaaacccgagactgatctacgcacggcttagcgggttcggacagtccggaagcttctgcagacttgccggacacgacatcaactatctggccctctcaggtgtattgtccaaaattggaaggtcaggggagaacccttatgcacccttgaacttgctagccgattttgccggaggcggattaatgtgtgcgctggggattatcatggctctgttcgaccgcacacgtacaggcaagggacaagtgatcgacgctaacatggtggagggtactgcttatttatctagcttcctctggaagactcagaaactgtctctgtgggaggccccaagaggacaaaatatgctggacggtggcgctccattttacaccacatatagaacagctgacggtgagttcatggctgtgggggctattgagcctcaattctacgagttactcataaagggcctcggcctgaaatctgacgagttgccaaatcaaatgagtatggacgactggccagaaatgaagaaaaaatttgctgatgtgttcgcagagaagaccaaggccgagtggtgtcagatctttgacgggactgacgcttgcgtcacgccagtcctgacgtttgaagaagtggttcatcacgaccataataaggagcgcggatcgttcataaccagcgaagaacaagacgtgagccccagaccggcacctttactactgaacacccccgcaattccctcctttaagcgggacccattcattggcgagcacacagaagaaatccttgaggagtttggattcagccgcgaggaaatttaccaattgaattcagacaaaatcatcgagtcaaataaggtcaaagcttccttgtag

SEQ ID NO: 179250 - DNA, 1146 bp, Artificial Sequence
  derived and/or modified sequence
atggcactgcagggtatctctgttgtcgaactctccggactggctccaggacccttttgtgccatggttcttgccgacttcggggccagagtggtacgggtggatagacccggaagccgatacgatgtaagtcgcttaggtcggggaaagcggtcactcgtgctagatctgaaacagcctcgcggagctgcagtgctgaggaggctgtgtaagcgcagcgacgttctgttggaacccttccgcagaggagtaatggaaaagcttcagctgggacccgaaatattacagagggagaaccctcgcctcatttatgcgcgactgtcagggtttggtcaatctggttcgttctgtagattggccggtcacgacataaattacctagcactgtcaggcgtcctttcaaaaatcgggagaagtggtgagaacccatacgctcccctcaacctccttgccgatttcgccggaggtggtttgatgtgcgctttgggcatcatcatggctttatttgatcggacccgtacagggaagggacaggtcattgatgccaatatggtggaaggcaccgcttatctttcatcattcctatggaagacccagaagctaagcttatgggaggcgcctaggggacagaacatgttagatgggggtgcccctttctacacaacttatcggacagcagatggggaattcatggctgttggggccattgaacctcagttctacgaactgctgataaaaggcctaggcttgaagtccgatgaacttcctaaccagatgagcatggatgactggcctgagatgaagaaaaaattcgcagatgtttttgccgagaagaccaaggctgaatggtgtcagatttttgatggaactgacgcctgtgtaacacccgtactcacgttcgaggaggttgtgcaccacgaccataataaggagagaggcagcttcataacttctgaagaacaggacgtgtctccacgcccagccccactgctgctgaacactcccgcaatacctagttttaaacgcgatccctttattggagagcatactgaggagattttagaagagttcgggttcagtcgcgaagaaatctatcagctcaactcggacaaaatcatcgagtcaaacaaagttaaggcatcactc

SEQ ID NO: 179251 - DNA, 1146 bp, Artificial Sequence
  derived and/or modified sequence
atggctttacaggggatctcagtggtggagctctcaggtctcgcccctggtcctttctgtgctatggtattggccgacttcggggcccgggtcgtgcgcgttgatcgccccgggtccagatatgatgtctctcggttgggacggggaaagcggtcactggtgctggatctgaagcaaccacgcggggctgctgtgttgcgacggctgtgtaagagaagtgatgttctcctggagccctttcgtcgcggagtgatggaaaagctacagctcggccccgagatcctccagcgcgaaaacccgcggttgatctacgctaggttgtccggttttggccaatctggatctttttgcagactcgctgggcacgacatcaactacctcgccctcagtggagtgctgagcaagatcgggaggagtggagaaaatccttacgcccccctgaatctcctcgcagacttcgccggtggcggtcttatgtgtgcattgggcatcattatggccctgtttgataggacaaggacaggcaaaggtcaggttatagacgccaacatggtggagggcaccgcctatctgagttcttttctctggaagacccagaaactgtctctgtgggaggcgccccgaggccagaacatgctggatggaggtgcccccttttatactacatacagaactgcggacggggaattcatggccgtgggcgccatcgagccccagttctatgagctgctgatcaagggtctgggattgaaatctgatgaactgccaaatcagatgagtatggacgattggcctgagatgaaaaagaagttcgccgacgtgttcgcagagaaaaccaaggctgaatggtgccagattttcgatggaacagacgcctgcgtcacaccagttctgacgttcgaagaagtggtacaccatgaccacaacaaggagcgtggttcctttatcacttcagaggagcaggacgtgtcaccccgccctgccccccttctgctgaatacacccgcaatcccatccttcaaaagggatccttttattggcgagcatactgaagagattctggaggagtttggcttcagtagggaagaaatctatcagctgaattctgacaagatcattgagtctaataaggtgaaagcttctctg

SEQ ID NO: 179252 - DNA, 1146 bp, Artificial Sequence
  derived and/or modified sequence
atggccctgcaaggaattagcgtggtggaactcagcgggctggctcctggaccattttgtgccatggtgttggcagattttggtgcaagagtggtccgcgtggaccggcctggatcccgctacgatgtttcacggctgggcagaggaaagagatccctcgtgcttgacttgaagcaaccacgcggtgcggcagtgcttagacggctctgcaaacggtcagacgtcctgctggaaccctttcgcagaggtgtgatggaaaaacttcaactgggacctgaaatcctgcagcgcgagaacccacgactgatctacgcccggctttccggctttggccaatcggggtccttttgtcgtctcgcgggccatgacatcaattatctcgctctttcaggcgtgcttagcaaaattggcagaagcggagagaacccttacgcgcctcttaatctgcttgcggattttgccggaggggggcttatgtgtgcattgggaatcattatggcactgtttgatcgcaccaggactggaaaggggcaggtcattgacgcaaacatggtggagggtaccgcatacctttcgtcatttctctggaaaacgcaaaaactctcactgtgggaggcacctaggggacagaatatgcttgatggtggcgcccctttttacactacgtacagaactgccgacggagaattcatggccgtgggtgcaatcgagcctcaattctacgagcttctgatcaagggactgggtctgaaatccgatgaactgccaaatcagatgtcgatggatgattggcctgagatgaaaaagaagtttgcagatgtctttgccgaaaagactaaggctgaatggtgccagatcttcgatggtactgatgcatgcgtcacccccgtcctcactttcgaagaagtcgtgcatcatgaccacaataaagagcgcggttcgttcattacttcggaggaacaggatgtctcgcctcgacctgcacctcttcttctcaatacccccgcgattccttccttcaaacgcgatccctttattggggagcacactgaagaaattcttgaggaatttggattctcgcgtgaggagatttatcagctgaactccgataagattattgagagcaacaaggtgaaagcgagcctc

SEQ ID NO: 179253 - DNA, 1146 bp, Artificial Sequence
  derived and/or modified sequence
atggccctccagggcataagtgtggtcgagttgtccggcctcgcaccaggccccttttgcgcaatggtgctggctgacttcggggcaagagtggtgcgggtagacaggccaggctcccggtatgatgtgtctagactaggcagagggaaacgcagcctcgtgctggatctcaagcagccccgcggagcagcggttttgagaaggctctgtaagagaagcgacgttctactcgagccttttcggcgcggggtgatggaaaaactacaattggggcccgagatcctgcaacgcgagaaccccagactgatctatgcccgcctgtcgggattcgggcagagcgggtccttctgccgtctggccggccatgacattaactacctcgctctgtccggcgtcctgagtaaaatcgggcgatccggggagaacccatacgcccccctgaacctgctagcagatttcgcaggtggcgggttaatgtgcgctctcggaattattatggccctattcgacaggacacgtacaggcaaaggccaggtgattgacgccaacatggtggaaggtaccgcctatctaagcagctttctttggaagacgcagaagctgtccttgtgggaggctccgaggggacagaatatgctggacggcggagcaccattctacacgacctatagaactgctgatggagagttcatggccgtcggagccatagagccccagttttacgaacttctgataaaaggcttaggactcaagagtgacgaactgccgaaccaaatgtccatggacgactggcctgagatgaaaaaaaagtttgcggatgtgtttgctgagaaaaccaaggctgagtggtgccaaatttttgatggcaccgatgcctgtgttaccccggttctaactttcgaagaggttgtgcatcacgaccacaataaggaaagaggttctttcattacgagtgaggaacaggatgtttctcctagaccggcccctttgctcctcaacacccctgccattccgtcatttaaacgggacccttttatcggtgaacacaccgaggaaatcttagaggagttcggtttttctcgagaggagatctaccagctgaattcagacaaaataattgagagtaataaggtcaaggcttcactg

SEQ ID NO: 179254 - DNA, 1146 bp, Artificial Sequence
  derived and/or modified sequence
atggcccttcaggggatctccgttgtcgagctgtccggacttgctcccgggccattctgcgccatggtcctcgccgattttggagctcgggttgtcagagtggatcgacccggaagtagatacgacgtctcccggttagggaggggcaaacgttccttggtgctggatttaaagcagccgcgcggcgcggccgtactgcggcgcctctgcaaaaggagtgatgtgttactggagccctttagaaggggagtgatggagaaattgcagctgggacctgagatcctccagagggagaaccccagacttatttatgcaagactgagcgggttcggccagtcaggcagcttttgcagattggccggccacgacattaactatttggccctaagcggagtgctctcgaaaatcgggcgctccggcgagaatccatacgctcctcttaatttgctcgcagacttcgcaggaggcggtcttatgtgcgccttaggaattatcatggccctgtttgacaggacacgcactggcaaaggccaggttatcgacgcgaacatggtggaaggcacggcttacttgtcctccttcctgtggaagactcagaagctctctctatgggaagctcctcgcggtcagaacatgctggacggaggcgcccccttttacaccacgtatcggaccgccgacggagagttcatggcagtcggcgcgattgaaccacaattctatgagcttcttattaagggactgggcctgaaatccgatgagctgcctaatcaaatgagcatggacgattggccagaaatgaagaagaaatttgctgatgttttcgcagagaaaaccaaggccgaatggtgccagatcttcgacggcacagacgcctgcgtaacaccagtgttaactttcgaagaagtggtgcatcacgatcataacaaggaacggggctcgttcatcaccagtgaggaacaagatgtgtcaccccgacccgcccccctcttactcaataccccggccattcccagcttcaagcgtgatcccttcattggagagcacaccgaggaaattttggaagagttcggcttttcacgagaggagatctaccaattaaattctgacaaaatcattgagtccaataaagtaaaggctagcctc

SEQ ID NO: 179255 - DNA, 1146 bp, Artificial Sequence
  derived and/or modified sequence
atggcccttcagggaatttcagttgtggagctcagcggcctcgcccctgggccgttctgcgctatggtcttggctgacttcggagctagggttgttcgcgtcgacagaccaggatccagatacgatgtgagcaggcttgggcggggtaaaaggagcctagttcttgacctgaagcagcctagaggcgcagccgttctgagacgcctttgcaaaagaagtgacgtcttgttggagcctttccgacgcggggtgatggagaaactgcagctcggccccgaaatcttgcaaagagagaaccctcgcctgatctatgcgaggctcagcggctttgggcaatccggttctttctgtcggctggcaggccatgatatcaactacctggcactctcaggggtgcttagcaaaatcggacggagcggagagaacccttatgctccattgaacctgttggcagacttcgctggggggggcttgatgtgcgccctgggaatcatcatggcactgttcgatcgcacaagaactggcaaaggccaggtcatagacgcaaacatggtggagggaacagcttacttgtctagcttcctgtggaagacccagaagctgtccttgtgggaggctccacggggccaaaacatgctggacggcggcgctcctttctacactacctaccgcactgcagacggggaattcatggctgtgggagcaattgagcctcaattctacgagttgttgatcaaaggtctcggcttgaagagtgatgagctgccaaaccaaatgagtatggacgattggcccgaaatgaagaagaagttcgcggatgtcttcgctgagaaaaccaaggccgaatggtgccaaattttcgacggcactgacgcttgtgtgacacccgtcctgactttcgaagaggtggtgcaccacgatcataacaaggaacgcggaagcttcattacttcagaggaacaagacgtctcccctcgccctgcacctctcctgctgaacactcctgcgataccttccttcaagcgcgaccctttcataggagaacacactgaggagattctggaggagttcggattttctagggaagaaatttatcaattgaacagtgacaagatcattgagtcaaacaaagtcaaagccagcctt

SEQ ID NO: 179256 - DNA, 1146 bp, Artificial Sequence
  derived and/or modified sequence
atggctctgcaaggcatttccgtggtggaattgtcggggctcgcgcctggaccgttttgtgcgatggttctggctgatttcggtgcccgagtggttagagtcgataggcctggatcgcgctacgatgtgtcaaggcttggtcgtggcaagcggtcgctggtgctggatttgaagcaacctcgcggcgcagccgtgctcaggcgcctctgtaagagaagcgatgtcctgctcgaaccctttagacgtggggtgatggaaaagttgcagcttggcccggaaatcctgcaacgtgagaaccccaggctgatttacgcccgactcagcggttttggtcagtcggggagcttttgtcgcctggccggacacgacataaactacctcgcactttccggcgtcctgtccaaaatcggacggagcggggaaaacccatatgcacctcttaacttgctggcagactttgctggcggaggactgatgtgcgcattggggatcattatggcactctttgataggactcggacgggtaagggacaggtgattgatgcgaacatggtggaaggaaccgcatatcttagctcctttctgtggaaaacccaaaaactttctctttgggaggcgccaagaggacagaacatgctggatggtggtgcaccattctatacgacttatcgtaccgcggatggagaattcatggcagtcggggctattgagccacaattctacgaacttcttatcaaaggtcttggtctgaagtcggacgaactgcccaatcagatgtcgatggatgactggccagagatgaagaagaaatttgcggatgtctttgcagaaaaaactaaggcggaatggtgccaaatctttgacggaactgacgcttgcgtgaccccagtccttacttttgaggaggtggtccaccatgatcataacaaagagagaggttcgttcataacgtccgaagaacaagacgtgtcccccagacctgcccctctcctcctgaataccccggccatcccctcatttaagagagatccgttcataggcgagcataccgaggagattctcgaagaatttggtttttcaagagaagagatctaccagcttaattctgacaagattattgaatcaaataaggtgaaggcatccctc

SEQ ID NO: 179257 - DNA, 1146 bp, Artificial Sequence
  derived and/or modified sequence
atggcactccaaggaatttcagtcgttgaattaagtggattagcaccaggacctttttgtgctatggtgttagctgattttggagctagagtagtaagagtcgatagaccaggttcacgatatgatgttagtagacttggtagaggtaaaagaagtttggttttagatttaaaacaacctagaggagctgcagttttaagaagattatgtaaaagatcagatgttttgttagaaccatttagaagaggagttatggaaaagttacaattaggtcctgaaatattacaaagagaaaatccaaggctcatttatgcacgattatctggatttggacaaagtgggtcattttgtagattagccggtcatgacattaattatttagctttatctggagttcttagtaaaattggtagatcaggtgaaaatccatatgcaccattaaatcttcttgcagattttgcaggaggaggattaatgtgcgcacttggaattattatggctctttttgatagaactagaactggtaaaggacaagtaatagatgcaaatatggttgaaggaacagcatatctttcatcttttctttggaagacccaaaaactttcgctttgggaagctcctagaggacaaaatatgcttgatggaggtgcacctttttatactacctatagaacagcagacggagaattcatggccgttggagctatagaaccacaattctatgaattattgatcaaaggattaggtttaaaatcagatgaattgcctaatcaaatgtcaatggacgactggccagaaatgaaaaaaaaatttgctgatgtatttgctgaaaagactaaggctgaatggtgtcaaatttttgatggtactgatgcatgtgtaactccagttttaacttttgaagaagttgttcatcatgaccataataaagaaagaggatcatttattacaagtgaagaacaagatgtatcacctaggcctgctcctttacttcttaataccccagctattccatcatttaaaagagatccatttattggagaacataccgaggaaattcttgaagaatttggattctctagagaagaaatatatcaattaaattctgacaaaattatcgaatcaaataaagtaaaagctagttta

SEQ ID NO: 179258 - DNA, 1146 bp, Artificial Sequence
  derived and/or modified sequence
atggctttacaaggcatcagcgttgtcgagctgtctgggctggctcctggtcccttctgcgccatggtcctagctgactttggggcaagagttgtacgggtcgaccgcccagggagtcggtacgacgtgtcccgtctcggcagaggtaagaggtccctcgtgctggacctgaagcaaccccgaggcgcagcggtgctccggcggctgtgtaaaagatctgatgtacttctagagccattccgtcggggagtcatggagaaactgcaactcggccccgagatcctgcagcgcgagaaccctcggttgatttacgcacgcctgtccggattcggacagagcggctctttttgtaggctggcaggtcacgacataaactacttggctttgtcgggcgtgctgtcaaaaatcggccggtccggggagaatccctatgctccactgaatctgctggcagactttgccggtggaggcctcatgtgcgccctgggcattattatggcactgtttgacagaacccgcactgggaaaggacaggtgatcgatgccaacatggtcgaaggaaccgcctatctatcgtctttcctgtggaagactcagaagttaagcctgtgggaagctcctcgcggtcagaacatgttggatgggggcgctccgttctacactacttaccggaccgctgacggcgagtttatggcagtgggtgcaatcgaacctcagttttacgaacttttaatcaagggcctaggcttgaaaagcgacgagctccccaatcagatgtcaatggacgattggcccgagatgaagaaaaaattcgctgacgtgttcgccgagaagaccaaagccgagtggtgtcagattttcgacgggacagacgcttgtgtcactcccgtgctcaccttcgaggaggtggtccaccatgatcacaataaggagagaggctcgtttattactagcgaggagcaggacgtttctcccagaccagcgcccctacttctaaataccccggccatacctagctttaagcgtgacccatttattggcgagcacaccgaggagatcctggaggagttcggcttcagccgtgaggagatctatcagttgaatagcgataagattattgaaagtaataaggtcaaggccagcctg

SEQ ID NO: 179259 - DNA, 1146 bp, Artificial Sequence
  derived and/or modified sequence
atggctctgcaaggcatctctgtcgtcgaactttctggactggctcccggacctttctgcgccatggtgcttgcagacttcggtgcccgcgtggtaagggtggataggccaggtagccgttacgacgtgagcagattgggtcgcggcaaaaggagccttgtgcttgatttgaagcagcctcgcggtgccgccgtactgaggcgtctttgcaagagaagtgacgtcctgcttgaacccttccgtcgcggagtcatggaaaaactgcagctgggtccagaaatccttcagcgtgaaaatccacgtctgatatacgccagactctccggattcggtcagtctggatcattctgccgtctggccggtcacgatatcaactatctggctctcagcggtgtgctctccaaaatcggcaggtccggagagaatccctacgcccctctcaacctgttggccgacttcgctggtggaggtcttatgtgtgccttgggtataattatggccctgttcgatcgcactaggaccggcaagggccaggtgattgatgccaacatggtcgagggtacagcataccttagctcattcctgtggaagacacaaaagctcagcctttgggaggctccacgtggccagaacatgcttgacggcggtgctcctttctacacaacttacaggaccgctgatggagagtttatggccgtgggtgccatcgaaccacagttctacgagctgctcatcaagggtttgggccttaagagcgacgaattgccaaaccagatgtccatggatgactggcctgaaatgaagaaaaaatttgctgatgtcttcgctgagaagacaaaagcagagtggtgtcaaatcttcgacggtacagacgcctgtgttaccccagtcctgacatttgaggaggtcgtacaccacgaccataacaaggagcgcggtagctttatcacctccgaggaacaagatgtcagccctagacctgccccactcctgttgaatactcccgctatcccatcttttaagagggatccattcattggcgagcacacagaagagatactggaagaatttggattctcacgcgaggagatatatcagcttaactccgacaaaattatcgagagcaacaaggttaaggcttccttg

SEQ ID NO: 179260 - DNA, 1146 bp, Artificial Sequence
  derived and/or modified sequence
atggccctccagggaatctctgtggtcgagctttccggactagctcctggcccattctgcgcaatggtcctagccgactttggcgctagagtggtgagagtcgatcggcctggatcccggtatgacgtgagccggctaggcagaggaaagaggtccctcgtgctggatctgaagcagcctagaggagctgcggtgctgcgtcgactttgtaagcgcagtgacgtgctgctggagcctttcaggcggggcgtaatggaaaaactacaactcggacccgagatcttacaaagagaaaatcctagactcatctatgctagactctcaggctttggacagtcaggaagtttttgtcggctggccggccacgacatcaactatttggcgcttagcggagtgctctccaaaatcgggcggagtggtgaaaacccctacgccccattgaacctgctcgccgactttgcagggggcgggctgatgtgtgccctgggtatcattatggctctcttcgacagaaccagaactggtaagggacaggttattgacgctaatatggtggagggaacagcctatctgagttcatttctttggaagactcaaaaacttagcttgtgggaggccccacgaggccaaaatatgctggatgggggcgcgcccttttatacaacgtataggactgcagatggagagttcatggcggtgggggctatcgagccacagttttacgagctgttaataaaaggcttaggcctaaaatccgatgagctcccaaaccagatgagtatggatgattggccagaaatgaagaagaaatttgcagatgtcttcgccgagaaaacgaaggcagagtggtgtcagatctttgacggcacagatgcgtgtgtgacccccgtgcttactttcgaggaggtggtgcatcatgaccacaacaaagagcgcgggagctttatcacttccgaagagcaggacgtttccccccggcccgcacccctgcttttaaacactcccgctataccctcttttaagagagacccgttcattggagagcacaccgaagagattctggaggaattcggattcagccgagaggagatctaccagctcaacagcgacaagataatcgagagtaataaggtgaaggcctcacta

SEQ ID NO: 179261 - DNA, 1146 bp, Artificial Sequence
  derived and/or modified sequence
atggcgcttcaaggaatctcggtcgtggagctcagcggactcgctccaggccctttctgcgcaatggttttggccgactttggagcccgcgtagtacgtgtcgaccgaccaggctcgagatacgatgtctcccgtcttggtagagggaagcgatcgctggtactggacctaaagcagccccggggagccgccgtgctgaggcgattgtgtaaacgaagtgacgtccttctggaacccttcaggcgaggagtgatggaaaaactacaattgggaccagaaattctccagagagagaatccaagactgatctatgccagactatctgggttcgggcagtccgggagcttttgcagactggcgggacatgatatcaactatctcgccctgtctggggtgctctctaaaatcggcaggagtggggaaaatccctatgctcccctgaacctattagctgacttcgctggcggtgggttaatgtgtgccttggggattatcatggccctgtttgacagaacgagaactgggaagggacaggtgatagatgcaaacatggtggaggggaccgcctacttatcctccttcctttggaaaacccaaaaactgtctctgtgggaagccccacggggccagaacatgctggatggcggtgccccattttatacaacgtatcgaaccgccgatggggagtttatggccgttggagctatcgaaccacagttctacgaactactgatcaaaggactggggctgaaaagcgacgagctcccgaaccagatgagtatggatgactggcccgagatgaagaaaaaattcgctgacgtatttgccgagaagacaaaggcggagtggtgtcagatcttcgatggcaccgacgcttgtgtgacaccagtcctgacttttgaagaggttgtgcaccacgaccacaacaaagagcgtggcagctttatcacatcagaagagcaagatgtaagccccagacctgctcctctgctgctgaacactccggcaattcctagtttcaaaagagatcccttcattggggaacatacagaagaaattctcgaagaatttggattcagtcgagaggagatttaccaattgaattcagacaagataatcgaatcaaataaagtgaaggcttcatta

SEQ ID NO: 179262 - DNA, 1146 bp, Artificial Sequence
  derived and/or modified sequence
atggcccttcagggaatcagtgtggtggagctgtccgggctggcgccgggccccttttgtgctatggtcctggcagacttcggggctcgagtcgtgcgcgtcgaccggcccgggagtagatacgatgttagccgcctcggccgcggtaagcgcagtttggtcctggacttgaagcagcctcgcggcgcggccgtcctgaggcgcctttgtaaaaggtccgatgtactcctggagcctttccggaggggtgtgatggaaaagctgcagctcggacccgagatcctccaacgggagaatccgcggctcatttacgcacgactgagtggattcggacagtcagggtctttctgcaggctggctggacacgacatcaactacctggccctgagcggagtcttgagcaaaatcggcagatcaggcgagaacccctatgcaccccttaatctcttggccgacttcgctggcggaggcttgatgtgtgctttggggattatcatggccttgttcgaccgcacccgcacagggaaagggcaagttatagacgcaaacatggtcgaagggacagcatatctgtccagtttcctgtggaagacacaaaagcttagtctttgggaagcaccccgcggtcaaaatatgttggacgggggtgcgcctttttacaccacatatcggacagccgacggagaattcatggccgtgggcgcaatcgagccacaattctacgaattgcttattaaggggctggggctgaagtcagatgagctgcctaatcagatgagcatggacgactggccggaaatgaaaaagaaatttgcggatgttttcgccgagaagacaaaggctgagtggtgtcagattttcgacggcaccgatgcctgcgttactcctgtcttgacttttgaagaagtggtgcaccacgaccacaacaaggaaagaggctcctttatcacgtccgaggagcaggatgtaagtccaaggcccgcacctctcctcttgaatacaccagccatacctagtttcaagcgcgatcctttcattggcgagcacaccgaagaaatactcgaagaattcggctttagtcgagaggagatctaccagctcaactccgataaaatcattgaaagtaataaggtcaaggcgtctttg

SEQ ID NO: 179263 - DNA, 1146 bp, Artificial Sequence
  derived and/or modified sequence
atggcattgcaggggatttctgtggtggagctttccggcctggccccagggccattctgtgctatggtccttgccgacttcggagcccgagtggtccgggtcgacaggccaggatcccggtatgatgtgagcaggcttggcagaggtaaaagaagcctggtcttggatctgaaacaaccaaggggggctgcagtacttaggagactgtgtaagagatctgacgtgcttctagagccgttcagaagaggcgtcatggagaagctccagttgggaccggagatactacaaagggagaacccccgactgatttatgccagactttctggcttcgggcagtcgggttccttttgccgtctggcgggccacgatattaattacctggccctctccggtgtattgtcaaagattggaaggagcggcgaaaacccttatgctccactaaacctcttagctgatttcgccggaggcggtttgatgtgtgctctgggaatcatcatggccctgttcgataggacccgcactggaaaaggccaggtgattgatgccaacatggtagagggtaccgcgtatctgtcaagtttcttatggaaaacccagaaactaagtctgtgggaagccccacgcggccagaatatgctggatggcggggctccattttatactacatataggacggctgatggggagtttatggctgttggagccattgagcctcagttttatgagttgctgattaagggactcggtctcaaaagcgacgagctacctaatcagatgagcatggacgactggcccgagatgaagaaaaagttcgcagacgtttttgctgagaagactaaagctgagtggtgtcagatctttgacggcaccgatgcttgcgtgacacctgtgctcacttttgaggaggtggtccaccacgatcacaacaaagagcgaggctcattcattacctccgaagaacaggacgtgtccccaagacctgcacccctgctgctgaacacgccggctataccatcatttaaacgagatccattcattggagaacacaccgaggaaattttggaggagtttggctttagccgagaggagatttaccaactgaattcggacaagattatagagagcaacaaggtgaaggcatccttg

SEQ ID NO: 179264 - DNA, 1146 bp, Artificial Sequence
  derived and/or modified sequence
atggcattgcaggggatcagcgtagttgagctctctgggctcgcgccggggccattctgcgcaatggtcttggctgacttcggagcccgagtcgtgagggtggacaggcctgggtcccgctatgatgtcagccggctgggcaggggcaaacgatccttggtcttggaccttaaacagcccaggggagccgctgtattgcgcagattatgcaaacgtagtgacgtgcttctggagccttttcgccgtggcgtgatggagaaactgcagctgggaccagagatacttcagagagaaaatcctcggcttatatacgctagattgagcggattcggtcagtccgggagcttctgccgactcgctggacacgatatcaattacttggctctttctggagttctcagtaagatcggccgttccggcgaaaatccctacgcccccctgaatctgctggcagattttgctgggggcggcctgatgtgtgcattgggaattatcatggcgctctttgaccgcactagaaccggaaagggccaagtcattgacgctaatatggtcgaaggaacagcatatctcagttccttcttgtggaagactcagaaactgtccttgtgggaagcaccccggggccagaacatgctggacgggggcgctccattctacaccacttatcggaccgccgacggtgagttcatggctgtcggggccattgagccccagttttatgagctcctgatcaaaggtctggggctgaaaagtgatgagctgcctaatcagatgtccatggacgactggcctgaaatgaagaaaaaattcgcagacgtcttcgcagaaaagacgaaagcagagtggtgccagatcttcgacggtaccgatgcctgtgtcaccccagtgctcactttcgaggaagtagtccatcacgatcataataaggaaagaggctccttcattacctcagaagaacaggatgtgtcaccccgacccgctcctctcttactgaacacaccggctattccctctttcaagagagacccattcatcggtgagcatactgaggagattctggaggaatttgggttcagtcgggaggagatctatcaacttaacagcgataagatcatagaaagcaataaggttaaagcctctctg

SEQ ID NO: 179265 - DNA, 1146 bp, Artificial Sequence
  derived and/or modified sequence
atggcccttcagggcatcagtgtggtggagctctcgggactggcccccgggcccttttgtgccatggttttagctgacttcggagcccgggtagtgagagtggatcgtcctgggtctcgctatgacgtcagcaggctgggacgaggcaagcgcagtctggtgctggacctgaagcagccccggggggccgccgtcctgcgtcgactttgtaaaagatccgacgtgctgctcgaaccattccgaagaggtgtgatggaaaaactgcaactaggcccagaaattctgcaaagggaaaatcccaggctcatttacgctcgcctgtcaggctttggacaaagcggcagtttttgtcgcctcgcaggacacgatatcaactacctggcgctgtctggcgttctttccaaaatcggccgtagtggcgagaacccatatgcacccctcaatctgttggccgactttgcgggaggaggcctcatgtgcgcgctgggaatcatcatggctctgtttgacagaaccagaacgggcaaaggccaagttattgacgccaatatggtggaaggaaccgcctacctgagcagcttcctgtggaaaacccagaaactgagtttgtgggaagcaccaaggggccagaacatgctggacggaggtgcacctttttataccacctacagaacggccgacggagaatttatggccgtcggcgccattgagccccagttttatgagcttctcataaaaggcctggggcttaaatccgatgaactacccaatcagatgagcatggacgactggcctgagatgaagaagaagttcgcagatgtttttgccgaaaagaccaaagccgaatggtgtcaaatcttcgacggaacggacgcatgcgtgactcccgtgctgacctttgaagaggtcgttcatcacgaccacaacaaggagcgagggagctttatcactagtgaggaacaggatgtctcgccgcgccccgctcccctccttcttaacacacctgcaatcccatccttcaagagagatcccttcataggagagcacactgaagagattctggaggagtttggtttctcgagagaggagatctaccagcttaactctgataaaattatcgagtccaataaggttaaggcctcactc

SEQ ID NO: 179266 - DNA, 1146 bp, Artificial Sequence
  derived and/or modified sequence
atggctctacagggaatttccgtcgtggagctttcagggctcgcccccggaccattttgcgctatggttctcgcagattttggagctagagtggtgcgcgttgatagaccagggtcaagatacgatgttagtcggttaggacgggggaaacgttcactggttctagatctgaaacagccccgaggagcagccgttctgagacggttatgtaaaagaagtgatgtgttacttgaaccttttcggcggggggtgatggaaaaattgcagcttgggcctgaaatactacagcgcgaaaatcctcgcctgatttacgctcggttgtcagggttcggacagagtggatccttctgcaggttagccgggcatgatataaactaccttgcgctctcaggggtgctcagtaaaataggacggtcaggggagaatccttatgctcctctcaatctactggctgattttgccgggggggggctcatgtgcgccctagggataatcatggccctcttcgaccggacacggacaggaaaaggacaggtgattgatgctaacatggttgaaggaactgcatatttatcttcatttctctggaaaactcagaaacttagtttatgggaagccccaagaggacagaacatgctcgacggaggggcacccttttacactacttatagaacagcagatggagagttcatggccgtgggagccatagaacctcaattttatgaactacttataaaagggctgggactaaaatccgatgagctgccaaatcagatgagtatggacgattggcctgaaatgaaaaagaaattcgccgatgtattcgccgaaaaaactaaagccgagtggtgccagatctttgacggaacagatgcttgtgtgacaccagttctcacattcgaagaagtggtgcaccatgatcacaataaagaaagggggtcattcattacatccgaggagcaggatgtgtcaccccggcctgctcccctactgttaaatacacctgccatcccctctttcaaaagggaccctttcatcggagaacacactgaagaaatccttgaagaatttgggttcagtcgtgaagaaatctatcagctcaactcggataagatcattgaatctaacaaagtgaaggcctctctc

SEQ ID NO: 179267 - DNA, 1146 bp, Artificial Sequence
  derived and/or modified sequence
atggcccttcaaggaattagcgtggtcgagctctcgggtctggccccaggacctttctgtgccatggtgctggctgattttggggcgcgcgtcgtgcgtgtggatcgtcccggctcgagatacgatgtgagccgcctcggcagagggaagcgttccctcgtgctggacctcaagcaaccccgcggagcggcggttcttaggcgcttgtgtaagcgctccgatgtgctgctcgagccattccgccgcggcgtgatggagaagctgcaactgggtccggagatactgcagcgggagaacccccggctgatttacgcaagactctccggctttggacagtcaggatcgttctgccgcctggcgggtcatgacatcaactacctggcattgtcaggagtcctgagcaaaattggtcgatcgggagaaaatccatacgcgccccttaaccttcttgcggattttgcaggcggtggtttgatgtgcgcccttggcattatcatggctctgtttgatcgcacccggactggtaagggccaggtgattgatgcaaatatggtggaaggaactgcatacctgtcctcatttctttggaaaactcaaaaactttcgctgtgggaggccccgagaggacaaaacatgctggacggcggcgcaccattctacacgacctacaggaccgcagacggagaattcatggccgtgggagcgatcgagccgcagttctacgaactgcttatcaaagggctgggactgaagtcggatgaacttcctaatcaaatgtctatggatgactggcctgaaatgaagaagaagttcgcagacgtgtttgcagaaaaaacgaaggcagaatggtgccagatttttgatggaactgacgcatgcgtaactcctgttcttacttttgaagaggtggtccaccatgatcataacaaagaacgtggatcctttatcacctcggaagaacaggatgtgtcacctcggcctgcgcctctgctgcttaacactcctgcaatcccatctttcaaacgtgatccgtttattggagaacacaccgaggaaatccttgaggaatttggttttagccgggaggagatctaccagctgaacagcgacaagatcatcgaatcaaacaaagtgaaggctagcctc

SEQ ID NO: 179268 - DNA, 1146 bp, Artificial Sequence
  derived and/or modified sequence
atggctctacagggtatctctgttgtcgagctttcaggcctcgccccaggaccgttttgcgctatggtgctggccgatttcggcgctagagtggttagagtggaccggcctggatcacgttacgatgtttcccggttaggtcgagggaaacggagtcttgttttggatttgaaacagccacggggggctgccgtgttacgacggctttgcaaacgcagcgatgtgttgttagagcccttcagaagaggggtgatggagaaactgcagctgggccctgagatactgcaacgcgagaatcctagactgatttacgctaggctctcagggtttggtcagtctgggagtttctgccgcctggccggtcacgatatcaactatctagccctcagcggggtgctgagcaagatcgggcgctctggagaaaacccatacgcacccctgaacctactcgcagattttgccggaggaggtttaatgtgcgctctgggcatcataatggctctatttgacaggacccggacggggaaaggacaagtcattgacgcaaatatggtcgaaggtactgcatatctcagctccttcctgtggaagacccagaagttatctctctgggaggcgcccaggggacagaatatgctggatggcggagcacccttttacacaacataccgcactgctgacggtgaattcatggctgtgggggcaattgaaccccagttctacgaactgctaataaagggactgggcctcaagtcagacgagctgcccaatcagatgtcaatggatgactggccggaaatgaagaagaagtttgctgacgtattcgccgagaaaaccaaagccgaatggtgtcagatattcgacggaacagatgcctgtgtgacaccagtcctcacgtttgaggaggttgttcatcacgatcacaataaggagaggggttcctttataacatccgaggaacaggatgtcagtccgcgccctgcccctctgctgctgaacacgcccgctatcccttcttttaagcgagacccgtttattggcgaacacacggaggagatcctggaggaattcgggttttcgcgggaagaaatctaccagctcaactcagacaaaatcatcgaatctaataaggtcaaggcttccctc

SEQ ID NO: 179269 - DNA, 1146 bp, Artificial Sequence
  derived and/or modified sequence
atggctcttcagggcatttctgtcgtcgagctgtccggcctggcgcctggccccttttgcgctatggttctggcagatttcggcgctcgggtcgtccgcgtcgatagacctgggtctcgatacgatgtcagccgcctgggacgcggtaaacggtctttagtactggatctgaagcagcctcgaggtgccgcggtgcttaggcggctttgcaagagaagtgacgtccttctggaaccttttaggagaggtgtgatggaaaaacttcagcttgggccagaaattctccaacgtgagaacccacgccttatctatgcacgactgtctggcttcggacaatctggttccttttgtcgattagcaggacatgatattaactacctggccttatcaggcgttctgtctaagatcggtaggtcgggtgaaaatccgtacgccccgctgaacctcttggccgatttcgctggtggcggactgatgtgcgccctgggaatcatcatggcgctattcgaccgcaccaggacaggcaaaggccaggtgattgatgccaatatggttgaagggacggcctatctatcctcctttctctggaagacgcagaaactgtccttgtgggaggcccctcggggccagaacatgctcgatgggggtgcacctttttacacgacctacagaactgccgacggggagttcatggctgtgggcgccatagagccgcaattttacgagctcctcatcaaaggactgggactcaagagtgatgaactacctaatcagatgtctatggatgattggcctgagatgaaaaaaaagttcgctgacgtcttcgccgaaaaaactaaagccgagtggtgtcagattttcgacgggactgatgcttgtgtaacccctgttctgaccttcgaagaggtggtccaccacgatcataataaggagcggggcagtttcattacttctgaggagcaggacgtgagccctcggccggcccctctgctgctgaatacccccgccatccccagcttcaagcgggatccatttattggcgaacacaccgaagagattctagaggagttcggcttctcacgggaagaaatctatcagcttaacagcgataagatcattgagagtaacaaagtgaaagcgtctctc

SEQ ID NO: 179270 - DNA, 1146 bp, Artificial Sequence
  derived and/or modified sequence
atggcacttcaagggatctctgttgtggaattgtccggactagctccaggaccgttttgtgccatggttcttgctgattttggagcacgcgtcgttcgagtcgataggccaggatcacggtatgatgtatcgagattaggtcgcggaaaacgatctctggtgttggatctaaagcagcctcggggggcagctgttctgcggcgtctttgcaagaggagtgatgttcttcttgagccattccgtagaggagtgatggaaaaattacaattaggaccggaaatcttgcaacgagaaaatccacgccttatctatgcaaggttgtcgggattcggacaaagcggcagcttttgccggttggcaggacacgatatcaattacctggctctatcaggagtactttccaaaatcggaagaagtggcgagaatccatacgcgccattgaatcttcttgcggattttgctggaggtggactgatgtgtgcgttgggaattatcatggcactcttcgaccgtacccgtactggaaaagggcaagttatcgatgctaacatggtggagggaactgcctatttatcttcgtttttgtggaagacgcaaaaactgtctctctgggaggctcctaggggacaaaacatgttagatggaggggcgcccttctacaccacgtatcgtacagcagacggagaatttatggctgttggtgccattgagcctcagttttacgagttgcttattaagggacttggactaaagtcagatgaactgcctaaccaaatgtcgatggatgattggccagagatgaaaaaaaaattcgcagatgttttcgctgaaaagactaaagcagaatggtgtcaaattttcgatgggacggacgcttgcgtaacaccagtcctaacattcgaggaagttgtgcaccacgatcacaacaaggaaaggggatcattcatcacatcagaagaacaagacgtttcgcctcgccccgctccattgctacttaacacacccgcaattccatcatttaaacgagatcctttcattggtgagcatacagaagagatacttgaagaattcggattttcccgtgaggaaatctaccagcttaatagcgataagattatcgaatcaaataaggtgaaagcttcactt

SEQ ID NO: 179271 - DNA, 1146 bp, Artificial Sequence
  derived and/or modified sequence
atggctctccagggaatatccgtcgtggagctgtcagggctggctcctggacctttctgtgcaatggtcctggccgactttggagctcgggtggtacgagtcgataggccgggttctaggtatgatgtgagtagattgggccgcgggaagcggtccctggtgctggacctcaaacaacctcgaggcgcagcagtgcttcggcggctgtgcaaacgttcagacgtgctattagagccctttcgacgcggagtgatggagaaacttcagctcggccccgagattctgcaacgggagaatccacggctgatctatgcccgattatcgggattcggccagtcgggtagcttttgccgactcgccggacacgatattaactatctggcactgtcgggagtgttgagtaagatagggagatctggggagaatccctacgcacccctgaatttgctcgccgattttgcaggcggtggacttatgtgtgctctgggaatcatcatggctctgtttgaccgaactcgaaccggcaagggacaggtgattgatgccaacatggtcgaagggaccgcgtacttgtcatcctttctttggaaaacacagaagctgagtctgtgggaggcaccccgcggacagaatatgttagacggaggggcaccgttttacacaacgtaccgcacggccgacggtgagttcatggcagttggagccattgagccacagttctacgaactgctgataaaggggctcggattgaagagtgatgagcttccaaatcagatgtccatggacgattggcccgagatgaaaaagaaattcgccgatgtctttgcagagaaaactaaagctgaatggtgccagatcttcgacggcacggacgcatgtgttacacccgtacttactttcgaggaagtggtgcaccacgaccacaataaggaacgcgggtcgtttatcacctccgaagagcaggatgtgagtccgcgaccggcaccacttttgctgaacacgcccgccattcccagcttcaagagagatccattcatcggcgaacacacagaagagatcctcgaagagttcggattctcaagagaggagatatatcagctcaatagcgacaaaatcatcgagtctaataaggtaaaggcctctttg

SEQ ID NO: 179272 - DNA, 1146 bp, Artificial Sequence
  derived and/or modified sequence
atggcactccagggcatcagcgtggtcgaattgtccggtctggccccagggccgttctgcgccatggtgctggccgactttggtgcccgcgtggtgcgggtcgataggccaggatcgcgatacgatgtgagccgtcttggaagaggaaagcgatccctcgtgctggatctgaagcagccaagaggtgctgctgtgctccggcggctgtgcaagcgctcggacgtcttgctggaacctttcaggaggggtgtgatggaaaagctgcaactgggaccagagatcctccagcgggagaacccgcggctgatctacgctcggctgtccggtttcggacagtcgggatccttttgcagattggctggacacgacatcaattacctcgccctgtcgggcgtgttgagcaagatcggccgctcaggcgaaaacccttatgctccccttaatcttttggcggattttgcgggtggtggactgatgtgcgccttgggcatcattatggcgctgttcgacagaaccaggaccggaaagggacaggtgatcgacgccaatatggtggaaggaaccgcttacctgtcgagcttcctgtggaaaactcaaaaactctctttgtgggaggctccgcgagggcagaacatgctggacggcggagcaccgttttacactacgtaccggactgcggacggggagtttatggccgtgggagccatcgagccgcagttctacgaacttttgattaagggactcggattgaagagtgacgaactcccaaaccagatgagcatggatgactggccagaaatgaagaagaaattcgcagacgtttttgccgagaaaaccaaggctgagtggtgtcagatctttgatggaactgacgcgtgcgtcacgccagttctgacttttgaagaagtggtccaccatgaccacaacaaagaacgggggtccttcatcacttccgaggagcaagatgtgagcccacgcccggctcccctcttgcttaacactcccgccatcccgtcgttcaagcgggacccctttattggggagcacactgaggaaattctggaggagttcggcttctccagagaagaaatctatcaactcaactcagacaaaatcatcgagtccaataaggtgaaagcctcgctg

SEQ ID NO: 179273 - DNA, 1146 bp, Artificial Sequence
  derived and/or modified sequence
atggccttgcagggaatctccgtggtcgaactgtccggcttggcgccagggccgttctgtgctatggtcctcgctgacttcggcgcgcgagtggtgcgcgtggatagaccgggaagccgctacgacgtctcaagactcggtagaggaaaacgatctctcgtgctggaccttaagcagcctcggggagcggcggtgctgagaaggctgtgcaagcggtccgacgtgctcctcgaaccgttccgcagaggtgtcatggaaaagttgcagctgggtccagaaatcttgcaacgtgagaacccgcggctgatttacgccaggctttcggggttcggccaatccggctcgttctgcaggcttgcaggacacgatatcaattacctcgcactgtcaggcgtgctttcgaagatcggccggtcaggagagaacccttacgctccactcaacttgctcgcagactttgccggaggcggactgatgtgtgccctgggaatcatcatggccctgtttgatcggacccgcactggtaaaggacaagtgatcgatgcgaatatggtcgaaggcaccgcttacctgtcctcgtttctgtggaaaacgcagaagctcagcctttgggaagccccccggggacagaacatgctggacggaggagcgccgttttacacgacctaccgcactgcagacggggaatttatggccgtgggagccatcgagccgcaattctatgaactgctgattaaaggactcggcctgaagagcgacgaactgcccaatcaaatgtcgatggacgattggcctgaaatgaagaagaagttcgcggatgtctttgcagaaaaaactaaggccgaatggtgccagatcttcgatgggactgatgcctgcgtgactccggtgctgaccttcgaggaggtggtccatcacgaccacaacaaggagcgggggtcattcatcaccagcgaggagcaggacgtgtcgccccgcccagctccactcctgctgaataccccggccatcccttcgttcaagcgcgacccgttcatcggagagcataccgaagagattctggaagagttcggattctcacgcgaggaaatctaccagctgaacagcgacaaaattatcgagtccaacaaggttaaggcatccctc

SEQ ID NO: 179274 - DNA, 1146 bp, Artificial Sequence
  derived and/or modified sequence
atggccttgcagggtatctcagttgtcgagctcagcggcctggcccccggcccgttttgcgccatggtgctggctgacttcggcgcccgggtggtgcgagtggacaggccggggtcgagatacgacgtgtcgcggttgggaagggggaaacgatcgcttgtgttggacctgaagcagccacggggtgcagccgtgctgcgccggctgtgcaagcgatccgacgtgctgctcgagccgttcaggcgcggagttatggaaaagctccagttgggcccagaaatactccaaagagagaatcctcgcctcatctacgccagactttccggatttgggcaaagcgggagcttctgcagattggcaggacacgacatcaattacttggcgctcagtggagtgctgagcaagattggaagatccggggaaaacccgtacgcccctcttaacctgctggccgatttcgccgggggcggtctgatgtgcgccctggggatcatcatggccctgttcgatcggactcgcaccggcaagggacaagtgatcgacgcaaacatggtggagggtaccgcgtacctgtcatcgttcctttggaaaactcaaaagctgtcactgtgggaggcgcctcgaggccagaacatgcttgacggaggcgccccgttctataccacctaccggactgctgacggggagtttatggcggtgggagccattgaaccacagttttacgagcttttgatcaaaggattggggctgaaatccgacgaactgccaaatcaaatgtccatggacgattggcccgagatgaagaaaaagttcgctgatgtgttcgcggaaaaaaccaaggccgaatggtgtcagattttcgatggaactgacgcttgcgtcactccggttctgacttttgaagaggtcgtccaccacgatcataacaaggaacggggttcattcatcacctccgaggaacaggatgtgtctccaaggccggccccgctgctgctgaacacgccagcgatcccgtccttcaagagagatccttttatcggtgaacatacggaggaaatcttggaggagttcggattctcgagggaagagatctaccaacttaatagcgacaagatcatcgaaagcaacaaggtcaaggcctcactg

SEQ ID NO: 179275 - DNA, 1146 bp, Artificial Sequence
  derived and/or modified sequence
atggcactacaagggatatcggttgtggagctctccggtcttgctccaggacctttttgtgcaatggtcttagctgattttggcgccagggtcgtgcgtgtggaccggcctggatccaggtacgacgtgtcgcgtctcggtaggggtaaacgctcgttagtgctcgatctaaaacagccgagaggggccgctgtgctacgtcgtctgtgcaaacggtctgatgtgctactggaaccctttagaaggggtgtcatggagaagttgcaactcggccctgaaatcctgcagcgcgagaatcctaggttgatctatgctaggttgtccgggttcggacagtcaggaagtttctgtcgtctggctgggcatgatatcaactaccttgccctcagcggtgtgttatccaaaattggccgctctggggaaaacccctatgcaccattgaacctgctggcagacttcgcgggcggaggcctcatgtgtgccttaggcattataatggccttgttcgacaggacccggacaggaaagggtcaggtcatcgatgccaacatggttgagggaactgcgtacctgagctctttcctctggaagacgcagaaactcagcttgtgggaggcaccaagggggcaaaacatgctcgacggaggggcaccattttacacaacataccgtactgccgatggcgagtttatggccgtgggcgccatcgagcctcagttctacgaactgcttattaaaggtctcggccttaagtctgacgagttgcctaaccagatgagcatggacgattggcccgagatgaagaagaagtttgcagatgtgttcgcggagaagacgaaggccgaatggtgccagattttcgacggcactgacgcatgcgtgacccctgttttgacattcgaagaggtggtccaccacgatcacaacaaggaaagaggcagctttatcacctccgaggaacaggatgtgtcccctcggccggctcctttgcttttaaatacacctgcaataccctcgttcaaacgggatccttttataggcgaacacacagaggagatcctggaggagttcggcttcagtcgggaggagatttaccagcttaattcagacaagattattgaaagcaataaagtgaaggccagtctt

SEQ ID NO: 179276 - DNA, 1146 bp, Artificial Sequence
  derived and/or modified sequence
atggcccttcaaggaatcagcgttgtggaacttagcggacttgcaccgggtccattttgcgcaatggtgctggctgattttggggcaagagtggttagagtcgaccggcccggttctaggtacgacgtctcacggcttggtagaggtaagcgatccctggtgcttgatcttaagcagcctcgtggggcagctgtgcttaggagactttgcaaacgcagcgacgtgctgctcgaaccattccgccgcggcgtcatggaaaaactgcaacttggcccagaaatacttcagcgcgagaatccgcggctgatttacgcccgcttgagcggtttcggccaatccggaagtttttgtaggctggcaggtcatgacatcaattatctggccctgtcgggggtgctttcaaagattggaagatcgggggagaacccatacgcgccccttaaccttctcgccgacttcgcgggaggcggactcatgtgtgcccttggaatcattatggcgctgtttgatagaactcggactggaaagggtcaagtcattgatgccaacatggtggagggcactgcctacctttcgtccttcctgtggaaaacccagaagctgtccctttgggaggccccacggggacagaatatgctggatggtggtgccccgttttacactacgtacagaactgcggatggcgagtttatggcagtgggagcaattgaaccacagttttacgaactcctgatcaaaggacttggtctgaagtcagatgaattgccaaaccagatgtctatggacgattggcctgaaatgaaaaagaaattcgcggatgtgttcgctgaaaagaccaaggcagaatggtgtcagatttttgacggtactgatgcgtgcgtcactcctgtcctgaccttcgaggaagtggtccatcacgatcacaacaaggaaagaggatcgttcataactagtgaagaacaggatgtgtccccccgaccagcaccactgcttttgaatacccccgcgattccttcttttaagcgagatccgtttattggagagcatacggaggagattctcgaagaatttggctttagcagagaagagatttaccaacttaactccgacaaaatcatcgagtctaacaaggtgaaggcctccctc

SEQ ID NO: 179277 - DNA, 1146 bp, Artificial Sequence
  derived and/or modified sequence
atggcccttcaaggtatttcagttgtagagctttcaggactagcaccagggcctttctgtgccatggtgctcgccgactttggtgctcgcgtcgtccgcgtcgacaggcccggcagcagatatgatgtgtcgcggctgggccgcggcaagcggagcctggtgctagatctaaaacaaccaaggggggccgcagtcctccggaggctttgcaagcgttcagatgtgctgttagaaccgttcagacggggtgtcatggagaaactgcaactcggccctgagatcctgcagcgggagaatcccagactaatttacgcacggctgagtggctttgggcagtccggatcattttgcagactggctggacatgacatcaactatcttgccctttcaggcgtgcttagcaagatcggccgatccggcgaaaatccgtacgccccactgaatctgttggctgactttgctggtggcggattgatgtgcgctctagggatcattatggcattatttgaccgcacacgtacagggaaggggcaagtcattgatgccaacatggttgaaggcaccgcttacttgagttcttttctgtggaaaacccagaaactctcattgtgggaagctcccagaggccagaacatgttggatgggggggcgccgttttacactacctatcggactgcggacggggagttcatggcagtgggcgccatagaaccgcaattctatgagttacttatcaaagggctaggcctgaagtcagacgagttgcccaaccagatgagcatggatgactggccggaaatgaagaagaaattcgctgacgtgttcgctgaaaagacgaaagccgagtggtgtcagatatttgacggcaccgatgcctgcgtgacaccagttctcacgttcgaggaggtggtccaccacgaccataataaggagaggggctcgttcattacctccgaggaacaggatgtctctcctcggcctgcccccctcttacttaatacccctgccattccttcctttaaaagagatccatttatcggtgagcacactgaggagattctcgaggagttcggcttcagtcgagaggagatttatcagttgaacagcgataaaatcatcgaatccaataaggtaaaggcttcgctg

SEQ ID NO: 179278 - DNA, 1146 bp, Artificial Sequence
  derived and/or modified sequence
atggccctccaaggaataagtgtagtcgagctctccggattagcacctggacctttttgcgccatggtgctagctgattttggagcaagggtggtgcgggtggatagaccagggagtaggtatgatgtgtctcggctcgggagggggaaaaggagtcttgttctggatctcaaacaacccagaggagctgccgtgctacgccgtctttgtaaaaggtcagatgtgctccttgaaccctttcggagaggagtaatggaaaaactgcagctcgggcccgagatcctgcagcgagaaaaccctaggcttatttatgctagactcagtgggtttgggcagtccgggagtttctgcaggctggccggacatgatataaattacctcgctctcagtggagtattgtctaaaataggaagatcaggagaaaacccatatgccccacttaaccttctcgctgacttcgccggaggagggcttatgtgcgctctaggaataatcatggctctttttgataggacaagaactggaaaggggcaggtcattgatgccaacatggtggaagggactgcctacctaagttccttcctgtggaaaacacagaaactatctctttgggaggctccacgcgggcagaatatgctggatgggggggccccattttatacaacatacaggacagcagatggggaatttatggccgtcggggctatcgaacctcagttctacgaactgctcataaaagggctaggactaaaatccgatgaacttcctaaccaaatgtctatggatgactggccagaaatgaaaaaaaaatttgctgatgtgttcgccgaaaaaacaaaggccgaatggtgccagattttcgatggaacagatgcttgcgtgacgcctgtgctgacttttgaagaagtggtccatcacgatcacaacaaagagagggggtcctttatcacaagtgaagaacaggatgtgtcgccaagaccagcccctttactccttaacacacccgctatccctagttttaaaagagatcccttcatcggggagcacacagaagaaatccttgaagaatttggattttctcgcgaggaaatataccagcttaattccgataaaattatcgaatcaaataaagtcaaagcctcttta

SEQ ID NO: 179279 - DNA, 1146 bp, Artificial Sequence
  derived and/or modified sequence
atggcgctccagggaatctcagtggtcgaactttctggcctggctccagggcctttctgtgccatggtactggcagatttcggggcgcgagttgtgcgcgtggacaggccaggcagtcgctatgacgtctctcgtttgggacgagggaaacgttcgctagtgctagacctcaagcagcccaggggcgctgccgtgctcaggaggttgtgcaaaaggtccgacgtcctgctggaaccctttcgacgcggcgtaatggagaaactgcagcttggacctgagatcctccaacgcgagaatcctcgcttgatttatgccaggttgtccggctttggacagtccggatccttctgtcggctcgcaggtcacgacattaattatctggccttgagcggagtgctctcaaaaatcggtaggagcggcgagaatccctatgccccacttaatctcctcgcagattttgctggcgggggattgatgtgcgcattgggaataattatggccctgttcgaccgaaccaggacaggcaaaggacaggtgatagacgcgaatatggtggaggggacggcttacttatcctccttcctgtggaaaacgcagaagctgtcactgtgggaggcgccaagaggacagaacatgcttgatggtggcgctccattttataccacctaccgcacagcagatggcgagtttatggctgtgggagctattgagccccagttctacgaactgctcattaagggcctcggtttaaagtccgacgagctgccaaatcagatgtcgatggacgactggccagaaatgaagaaaaagtttgccgatgttttcgccgagaaaaccaaggctgagtggtgtcagatcttcgatggcactgatgcctgcgtgacccctgtgctgaccttcgaggaagtagtgcatcatgatcataataaagagagggggtcatttataacgtctgaggagcaagacgtgtcacctcggccagctcccctgctgttgaacacgcctgccatcccgtcattcaaacgcgatcccttcatcggtgagcacaccgaagaaatactcgaggagtttggattttcccgagaagaaatatatcagcttaactcggataaaatcatcgaaagcaacaaggtaaaagcctcactg

SEQ ID NO: 179280 - DNA, 1146 bp, Artificial Sequence
  derived and/or modified sequence
atggcactccagggcattagcgttgtggaactcagcgggctggcaccgggacctttctgcgcaatggtgcttgcggattttggcgcgcgcgtggtacgagtggatcgccccgggagtcggtatgatgtcagcagactcgggcggggaaaacggtccctcgtcctggacttgaagcagccgaggggtgctgctgtcctcagacgactttgcaaacgcagcgacgttctcttggaaccgttcaggaggggggtcatggagaaattgcagctcggccctgagatcctccagagagaaaaccccaggctgatatatgcacggctttctggtttcggccagagcggttccttttgccggttggccgggcacgacattaactacctggcgctgagcggcgtcctgagcaaaataggccgcagtggtgaaaatccttatgcccctctgaacctcctggctgattttgctggaggaggtctgatgtgcgcccttgggattatcatggccctgttcgatcggacgagaaccggtaagggtcaggtgatcgatgcgaacatggtggaaggcaccgcctatctgtcatccttcctgtggaagacccaaaaactgtctctgtgggaggccccgcgggggcaaaacatgcttgacggcggagcccctttctacaccacctatcgcacagccgatggggaatttatggccgtgggagctatagagccccaattctatgaactgctgatcaaaggcctcgggcttaagagcgacgaactgccaaaccagatgtcaatggatgactggccagaaatgaagaaaaaatttgccgacgtcttcgccgaaaagacaaaggcagaatggtgtcagatttttgatggaactgatgcttgcgttacacccgtgctcacgttcgaagaagtcgtgcatcacgatcacaacaaagagcggggtagctttattaccagcgaggagcaggacgtgtccccgcgaccagcaccgctgcttctcaatacccccgccatcccctctttcaaacgagatcccttcatcggcgaacataccgaggagatacttgaagagttcgggttcagtagagaggaaatttatcaactgaatagtgacaagatcatcgaaagcaataaagttaaagcctccctc

SEQ ID NO: 179281 - DNA, 1146 bp, Artificial Sequence
  derived and/or modified sequence
atggctcttcagggaatttcagtggtcgagctgagcggtctggcaccaggccccttttgcgcgatggtgctcgccgattttggtgccagggtggtcagggttgaccgcccaggatcaagatacgacgtgagtaggcttggaagaggtaagagatctcttgttctggacctgaagcaacctcgcggtgcggccgtgctgcgcagactttgtaagagatctgatgtgctgttggagccattcaggaggggagttatggagaaacttcagctgggtccagaaatcttgcagagagaaaacccaaggttgatctacgctcgcctgagtggctttggccaaagcggttcattctgcagactggccggtcacgacattaactacctggccttgagcggcgtcctttcaaagatcggcaggtccggcgaaaacccttacgctccactgaatctcctggccgacttcgcgggaggcggactcatgtgtgccttgggcattattatggcgcttttcgataggaccagaaccggtaagggtcaagtgattgacgccaatatggttgagggaaccgcgtacctgagttctttcctgtggaagactcagaagctctctttgtgggaggctcccagaggacagaatatgctggatggcggcgcacctttctacaccacgtacagaacagccgacggcgaatttatggcagtcggcgccattgagccgcagttctatgagctgcttatcaagggcctgggactgaaatccgacgaactcccaaaccaaatgtccatggatgattggccagagatgaagaagaagttcgccgacgtatttgcggagaagaccaaggcagagtggtgccaaatcttcgatggaactgatgcctgcgtaactcctgtcttgacattcgaggaggtggtgcaccacgatcacaacaaggagcgcggctcatttatcacctctgaagaacaagacgtgagccctaggccagcgccccttctccttaatacccctgccattccgtcttttaagagggaccctttcatcggtgagcataccgaagagatactggaggaattcggcttctctagggaagaaatttatcagctcaactctgataagataattgagtccaataaagtgaaggcatctctc

SEQ ID NO: 179282 - DNA, 1146 bp, Artificial Sequence
  derived and/or modified sequence
atggccctgcagggaatctctgtagtggaactttcagggcttgcacctggaccgttctgcgcaatggttttggccgactttggtgccagagtagtcagggtggatagacctggttcacggtacgacgtatctcgtctgggccgcgggaaacgctccttggttctggaccttaaacagccacggggtgcagccgtcttgagaagactatgtaagcgtagtgatgtcctcctggagccatttcgaagaggagttatggagaagcttcaactcggcccagagatactgcagagagagaacccccgcctgatttacgcccgtctgtcaggcttcggtcagagcggatctttttgcaggctcgcaggacatgacatcaattacttggcactcagtggcgtcctatcaaagataggacgaagcggagagaacccctacgccccgcttaacctgctggcagattttgcggggggggggctgatgtgtgcattgggcattatcatggcactctttgacagaactcgcaccggaaagggtcaggtgatcgatgctaatatggtggagggaacggcttatttgagttccttcctttggaaaacccagaagctctcactttgggaggccccccgcgggcaaaatatgctggacgggggggccccattttacaccacatatcgcacagctgatggcgagttcatggccgtcggggccattgagcctcaattctacgaactcctcatcaagggactgggactgaagtcagacgagctccccaatcagatgtctatggacgattggcctgagatgaagaagaagtttgccgacgtgtttgcagaaaaaactaaggctgagtggtgtcagatcttcgacggcactgatgcatgcgtgactcccgtactgaccttcgaggaggttgttcaccacgatcataataaagagcggggcagtttcataacgtctgaagaacaggatgtgagccctaggcccgctcccctcctgctgaacacaccagccatcccgagtttcaagcgagaccccttcatcggcgagcacacagaggagatcctagaggagttcggattttctcgagaggaaatttaccagttgaactccgacaagatcatcgagtctaataaggttaaagctagctta

SEQ ID NO: 179283 - DNA, 1146 bp, Artificial Sequence
  derived and/or modified sequence
atggcactccagggcatctctgttgtggaactgtctggactggcccccggccccttctgtgctatggtacttgcggatttcggggcccgcgttgtacgggtggaccgaccagggagccgctacgatgtgtccaggctaggccggggtaaaaggtcgctggtgctcgacctgaagcagccgcgtggggcagccgttctcaggcgcctgtgtaaacgatccgacgtgcttctagagcccttcagacgaggcgtgatggagaagctgcagttgggccctgaaatcttgcagagagaaaatccgcgcctgatatacgccagactgtctggcttcggtcagagcgggagcttctgtaggctggccggacatgatatcaattatctggcgctctcaggtgtacttagtaagataggaagatcaggagagaatccttacgcaccacttaatctcctagcagatttcgctggagggggtctaatgtgcgcgcttggcatcattatggctctattcgaccgaactcggaccggcaaagggcaggtgatcgatgctaatatggtggaaggaaccgcgtacctctcctcgtttctctggaagacacagaagctgtctctgtgggaggcgcctcgcggccaaaacatgcttgacggcggcgccccattctatacaacgtatcggacagccgatggcgagttcatggctgtgggggccattgagcctcaattctatgagctcctgattaaaggactgggtctgaagagcgatgaattacccaatcagatgagcatggacgattggcctgaaatgaaaaagaagtttgccgacgtctttgccgagaagaccaaggcagaatggtgtcagatttttgatgggaccgacgcctgtgttacacccgtgctgacttttgaagaggttgtacaccacgaccacaacaaagaacggggcagttttatcacctctgaagagcaggatgtatcccctcggcccgccccattgctgttgaatacccctgcaatcccaagcttcaagcgcgatcctttcatcggggaacataccgaggagatccttgaagagttcgggttctcccgagaggaaatctatcagctcaacagcgataagatcattgaaagcaacaaagtcaaagccagtctg

SEQ ID NO: 179284 - DNA, 1146 bp, Artificial Sequence
  derived and/or modified sequence
atggccctccagggcattagcgtcgtggagctgagtgggctggcccccggacccttttgcgccatggtgttggcagattttggcgcccgagttgtacgagtggataggcctggttctagatacgacgttagccgtctgggcagggggaaacgtagccttgtcttagatttgaagcagccccgtggggccgctgttctccgaaggttgtgtaagcgctcagacgtattgttggagcccttcaggaggggggtcatggagaaactgcaactgggtccagagatcctgcaacgcgagaaccccagattaatctacgcccgcctctccgggtttggacagtctggtagtttctgtcggctggcagggcacgacatcaactacctggcgctatctggcgtgctctcaaaaataggccgctctggcgagaacccatatgctccactgaacttactggctgactttgcaggaggcgggctgatgtgcgccctgggaattattatggcactgttcgatagaactagaactgggaaagggcaggtgattgatgccaatatggtggaaggaaccgcctacctgagctccttcttatggaaaactcagaaactgtctttgtgggaggcacctcggggtcagaacatgctggacggtggggctcccttctacaccacctatagaactgctgacggagaattcatggcagtcggagctattgagccccaattctacgagctgttaatcaaggggctcgggctcaaatcagatgaactcccaaaccagatgagtatggatgactggcccgagatgaagaaaaaatttgcagatgtgttcgccgagaaaactaaagctgaatggtgccagatcttcgacggaacagatgcctgcgtgacgcctgtactgactttcgaagaagttgtgcaccacgaccacaacaaagagagggggagtttcattacctccgaggaacaggatgtgagcccgaggccagccccccttttgctaaatactccggccatcccctccttcaagcgcgacccttttatcggagagcacactgaggagattctcgaggagttcgggtttagtagggaagagatctaccagctgaacagcgacaaaataattgaaagtaataaggtcaaggcgagtctt

SEQ ID NO: 179285 - DNA, 1146 bp, Artificial Sequence
  derived and/or modified sequence
atggccctacagggaatatccgtggtagagctgtccggactcgcaccgggcccattctgcgcgatggtgcttgcagacttcggggctagagtcgtgagggtcgaccgacctggttcgcgatacgacgtgtcgcgactgggtagaggaaaacggtccctcgtattggatctgaaacaaccaagaggggccgcagttctccgaaggctctgtaagcgatcggacgtgcttttggagcccttcaggagaggcgtaatggagaaactgcaactaggaccagagatcttacaaagggagaatcctaggctcatctacgcccgcctgtcgggtttcggtcaaagcggatccttttgccgactcgcgggccatgacattaactatctggctctgtccggcgtgctttcaaagattggccggtcaggagaaaacccctacgctcctctgaatctgctggccgacttcgcaggaggcgggttgatgtgtgctcttgggattattatggcgctctttgatcgcacccgtactggcaaaggccaggtgatcgatgccaatatggttgaaggcactgcctatctgtcaagcttcctgtggaaaactcagaagctatcactgtgggaagctccaaggggccagaacatgctagacgggggagccccgttctatacaacctacagaacagccgatggcgagtttatggccgtcggcgcaattgaaccccaattttacgaactgttgatcaagggcctcgggctgaaaagcgatgagcttcccaatcaaatgtccatggatgactggcccgaaatgaaaaaaaagtttgctgatgtgtttgcggaaaaaacgaaagcggaatggtgtcagatcttcgacggaaccgacgcctgcgtgacacccgtacttacattcgaggaagttgtgcatcacgaccataataaagaaagaggctcttttataacttctgaggagcaggatgtcagccctaggcccgccccattgctgctaaacacgccagctattcccagctttaagagggacccctttatcggagaacatacagaggaaatcctcgaggaatttgggttttcccgagaggaaatttaccagctgaacagcgacaagatcatcgaaagcaacaaagtgaaagcttcactg

SEQ ID NO: 179286 - DNA, 1146 bp, Artificial Sequence
  derived and/or modified sequence
atggctcttcaggggatcagcgtggttgagctgtccgggctagcgccggggccgttctgtgcaatggtgttagcggattttggggccagggtggttagggtagaccgccctggaagcaggtacgacgtgtctcgactgggtcgcggcaagcgatcactggtgctggatctgaaacagcctcgcggggctgctgtgctccgtcgactttgcaaaaggtctgacgtactcctcgaaccattccggagaggcgtgatggaaaagctccaattgggccccgagattctgcagagggagaatcccaggcttatctatgcacgcctatctggcttcggccagtctggctcattctgcagactggcgggacatgacattaactatctcgcactgtctggggtactgagcaaaataggccgatctggcgagaacccgtacgcacctctgaatttgctcgctgacttcgcaggaggggggctgatgtgcgccctggggataataatggcactgtttgaccggacaagaacaggcaaaggccaagtgatcgacgccaatatggtggagggaacagcctatctatcaagcttcctttggaagacccagaagctgagtctctgggaagcgccgagaggccaaaacatgttggatggcggcgcccccttctatacgacatataggacagccgacggtgagttcatggcggtcggcgcaatcgagccccagttctatgagctgttgattaaaggtctgggcctgaagtcagatgaactccccaaccagatgagcatggacgattggcctgaaatgaagaagaaatttgcagatgtgtttgctgaaaaaaccaaagccgagtggtgccaaatcttcgatggcacagacgcatgcgtaacaccggtgcttactttcgaggaagtggtacaccatgaccacaacaaggagaggggcagttttatcactagcgaagagcaggacgtctcaccgcggccggcccctcttcttcttaatacccccgcaataccgagcttcaagagggacccctttatcggcgagcacaccgaggagattctggaagagtttggcttctcccgtgaagagatttaccagctcaattcagataaaatcattgagtccaataaggttaaggcttcactg

SEQ ID NO: 179287 - DNA, 1146 bp, Artificial Sequence
  derived and/or modified sequence
atggcgttgcaagggatttccgtcgtggaactcagcgggctggcgccggggccgttctgtgcgatggtgctcgcggactttggagcccgcgtggtgagagtggacagacctggatcgaggtacgatgtgtcccggctcggacgtgggaaaaggtcactggtgctcgatctgaagcaaccacgcggcgctgcggtgctgcgaaggctgtgcaaacggagcgacgtcctgcttgaacctttcagaaggggtgtgatggagaagttgcagctgggaccagagatcttgcagcgggagaacccacggctcatctatgcgaggctctcgggcttcgggcagtcaggatcgttctgccgattggcaggacatgacatcaactacctggctctctcgggagtgttgtccaaaattgggcgctccggggaaaacccgtacgccccactcaatctccttgctgatttcgcgggtggaggactgatgtgtgccctggggattatcatggcactgtttgatagaactcgcaccggaaaggggcaggtgatcgatgccaacatggtggaaggcaccgcgtacctgtcatcattcctctggaaaactcagaagctctcgctctgggaagcccctcgcggacaaaacatgcttgacgggggcgccccgttctacactacttacagaaccgccgacggcgaattcatggctgttggggccatcgaaccccaattctacgagctgctcatcaagggtcttggcctcaagagcgacgaactcccaaaccagatgagcatggacgactggccagagatgaagaagaagttcgccgatgtgttcgctgaaaagaccaaagccgagtggtgtcagatttttgacggcaccgacgcgtgcgtcaccccggtgctgacgttcgaagaagtggtccaccatgaccataacaaggaaagagggagcttcatcacctccgaagagcaggatgtcagcccaaggccggcccctctgctgctcaacactccggccatcccgtccttcaagcgggaccccttcatcggagagcatactgaagaaatcctcgaggaattcggattctctcgggaggaaatctaccagctgaactcggataagatcatcgaatcaaataaggttaaagcatcgctt

SEQ ID NO: 179288 - DNA, 1146 bp, Artificial Sequence
  derived and/or modified sequence
atggccctgcaagggatcagcgtcgtcgagctctcgggtcttgcgcctggcccattctgtgccatggtgctggcagattttggagcacgtgtggtgcgtgtggatcgccctggcagcaggtacgatgtcagccggcttggccgcgggaagcggagccttgtcctggatctcaagcagccacgcggtgctgcagtgctgcgccgactgtgtaagcgctcggatgtgttgctggagccatttaggcggggcgtgatggaaaagttgcagcttggtcctgagattctgcaacgagagaatcctcgcttgatttacgcaagacttagcggatttggacaaagcggatccttttgccggctggcaggtcatgacattaactatctcgcgctgtcgggagttctttcgaagattggacggtccggggaaaatccatacgcgcctcttaaccttctggccgattttgccgggggtggtcttatgtgtgcattgggaatcataatggctctgttcgatcggacccggactggaaaaggacaggtcatcgatgctaacatggtggaaggtactgcgtacttgtcgtcatttctctggaaaacccaaaagttgtcgctgtgggaagcaccacggggacagaacatgctggatggtggtgcgccattctacaccacctaccgaacggcagatggcgagttcatggcagtgggcgccattgagcctcagttttatgaactgctgattaaggggttgggtctgaaatccgacgaactgcctaaccaaatgtccatggatgattggcctgaaatgaagaagaagttcgcagatgtttttgccgaaaagaccaaggcagagtggtgtcaaatctttgatggcacggatgcctgcgtgacccctgtccttacgttcgaagaagtggtccatcatgaccacaataaggaaagaggctcattcataacttcggaagaacaggacgtcagccctagacctgcaccactgcttcttaataccccagctataccgtcgttcaagagagatccgtttatcggtgagcacactgaagaaattctggaagaatttggtttttcacgcgaagagatttaccaacttaattcagataagatcattgagagcaacaaggtgaaggcatcgctt

SEQ ID NO: 179289 - DNA, 1146 bp, Artificial Sequence
  derived and/or modified sequence
atggccttgcagggaatctccgttgtggaactgtcagggcttgcacccgggcctttttgcgctatggttctggccgacttcggcgcacgcgtggttcgggtcgaccgacccggaagccgctacgacgtgagccgactggggagagggaagcgcagcttagtgctggatctgaagcagccgcgaggtgctgccgttttgaggagactgtgcaagcgaagtgacgtcctactcgaacctttcaggcgaggtgtcatggagaaactgcagttgggcccagaaatcctgcagagagaaaaccctcgacttatctacgcaaggctaagcgggttcggccagagtggatcattctgcaggttggccgggcacgatattaactaccttgccctctctggcgtactgagtaaaattgggagatcaggagagaacccatatgctcctttgaacctcctggctgatttcgccgggggagggctcatgtgcgccctcgggattatcatggctctgtttgatcgaacccgtaccggaaaggggcaagtcatcgacgcaaacatggttgagggaacagcctacctctcttctttcttgtggaaaacccagaaactgtccctgtgggaagcaccacgagggcagaacatgctcgacggcggggcgcccttctataccacctacaggactgctgatggggagtttatggccgtgggagccatcgaacctcaattttatgaactgctaatcaaggggttggggctgaaatcagacgaactgcctaaccagatgtctatggacgactggcctgaaatgaagaagaagtttgctgacgtttttgccgagaaaactaaggccgagtggtgccagatttttgacggtacagatgcctgcgtaacgcccgtgctgacattcgaggaagtggtgcaccacgatcacaacaaagaacgaggttcttttataacatccgaagaacaagacgtgtcaccaaggccggcccccctccttttgaacactcctgccataccaagttttaagagagacccattcataggggaacatactgaagaaattttggaggagtttggattttcacgagaggagatatatcagctgaattcagataaaatcattgaaagcaataaggtaaaggcctccctg

SEQ ID NO: 179290 - DNA, 1146 bp, Artificial Sequence
  derived and/or modified sequence
atggccctgcagggaatctcggtggtcgaactctccggccttgccccaggaccgttttgcgcgatggtgctggcggattttggggccagagtcgtgcgggtagaccggcccggctccagatacgacgtgagccggctgggccgcggaaagcgatcattggtgctggaccttaaacaacctcggggcgcagcagtgctccgtaggctgtgcaaaaggtcggacgtgttgctcgagccgttccgcaggggagtgatggaaaagttgcagttggggccggaaatcctgcagagggagaatccccgccttatctacgcaagactctcaggatttgggcagtcaggatccttttgtaggctggctgggcatgacatcaactacctggctctgtcgggagtcctttccaagatcggacggtcgggcgaaaacccatacgcaccactgaacctccttgcggacttcgcaggcggtggactcatgtgcgcacttggcataatcatggccctctttgacagaacccgcaccgggaaaggacaggtcatagacgctaacatggtggaaggaaccgcttacctctccagcttcctgtggaaaacccagaaactgagcctgtgggaggctccgcgggggcagaacatgctcgatggcggagcaccgttctataccacctaccgcactgccgatggagagttcatggcggtgggagccatcgagcctcaattctatgagctgctgatcaagggccttgggctcaagtctgacgagctgccgaaccaaatgtcaatggacgattggcccgaaatgaagaagaagttcgccgatgtgtttgcagaaaagactaaggcggaatggtgccaaatcttcgacgggaccgatgcatgcgtcaccccggtgctgactttcgaagaagttgtgcatcacgatcataacaaagagagagggagcttcatcacttccgaagaacaggatgtgagcccgcggccggcaccccttctgctgaacacgccggccattccatcgttcaagcgggacccgttcatcggagagcacaccgaggagatcctggaagagttcggattctcccgcgaagaaatctaccagctgaatagcgacaagattatcgaatcgaataaagtgaaggcatcgttg

SEQ ID NO: 179291 - DNA, 1146 bp, Artificial Sequence
  derived and/or modified sequence
atggccttgcagggcatcagcgttgtggagctgtccgggctcgccccagggccgttctgtgccatggtcctagcggattttggtgcccgggtagtgcgcgtcgataggcccggtagcagatacgacgtgtctcggctcgggcgaggtaaaaggtctctggtccttgacctcaaacaaccacgcggcgcagctgtgctgcgcagactctgcaagaggtctgatgtgttgcttgagccttttcgcaggggcgtcatggaaaagctgcagctggggccggaaattctgcagcgggagaatccccggttgatctatgcgaggctgtctgggttcgggcaatccggtagcttctgtagactggcagggcatgacattaattatctggccttaagcggcgtgctgtccaaaattggccgttcgggcgagaatccttacgctcccctaaacctcctcgccgatttcgcgggggggggcctgatgtgcgctttagggatcatcatggccctctttgaccgcactaggaccggtaagggccaggtgattgacgccaacatggtcgaaggtacagcctatctgagttcgttcttatggaaaacgcagaaactgagtttgtgggaggcgccgcgggggcagaatatgctggacgggggggcccctttctacaccacatacaggacggcggatggggagttcatggccgtgggtgcgatagagccacaattctacgagctgctgattaagggcctcggcctgaaaagcgatgagctacctaatcagatgtcgatggacgattggcccgaaatgaaaaaaaaatttgctgatgtttttgcagagaaaaccaaggccgaatggtgccaaattttcgacggtacggatgcttgcgtaacaccagtgcttacttttgaggaggtggtgcaccacgaccacaataaggagcgcggcagtttcatcacttcagaggagcaggatgtctcaccaagacctgcacctctgttgcttaacactcccgccatcccctcttttaagcgcgaccctttcattggagagcacactgaagagattttagaggagttcggtttctctagggaagaaatctatcagttaaactccgataaaatcatagagtccaataaagtgaaggcatcactc

SEQ ID NO: 179292 - DNA, 1146 bp, Artificial Sequence
  derived and/or modified sequence
atggcgttgcagggaatatccgttgtcgaactgagtggcttagcccctggacctttttgcgccatggtgctggccgacttcggcgctagagtggtgcgggtggatagacctggatcccgatacgacgtttcgcgcctggggcgcggaaagagatctctagtgctggatctgaaacagcctcgaggcgcagctgttctgagaaggctgtgtaagaggagcgatgtgctgctcgaacctttccggcggggcgtaatggagaaactccagctgggccctgaaatcctgcaacgggaaaacccacgtctgatttatgctagactctcagggttcggccagtctggcagcttttgcagattagctgggcacgatatcaattaccttgcgttgtccggcgtgttgtctaagataggaaggtcaggggaaaatccctacgcccccttgaatttgctagccgacttcgcagggggcggtcttatgtgcgccctggggattattatggccctgttcgaccgaacacggaccgggaaagggcaggtgatagatgctaacatggttgagggcacagcctacctgagttcttttctgtggaaaacacagaaattgtctctctgggaagccccgagagggcagaacatgctggatggcggtgcccctttctatacaacgtacaggactgctgacggcgagttcatggcggtcggcgccatagagccccagttctatgaactcctgatcaaggggctgggcctaaagagtgatgagttaccgaatcaaatgtctatggacgactggcctgagatgaagaaaaaattcgctgacgtgttcgctgaaaagactaaggccgagtggtgccagattttcgatggcacggacgcctgcgtcacgccagtgctgactttcgaggaagtcgtgcaccatgaccataacaaggagcgcggttcattcatcacttccgaagaacaggatgtttccccaaggccggccccgcttctgcttaacactccagccattccctcatttaagcgggaccccttcatcggcgaacacactgaggagatcttagaagagttcggattcagtcgggaagagatctatcagctcaattcggacaagattatcgaatcaaacaaggtgaaagccagcctc

SEQ ID NO: 179293 - DNA, 1146 bp, Artificial Sequence
  derived and/or modified sequence
atggcattgcagggaatctcggtcgtcgaactcagcggactcgcccctggacccttctgtgctatggtgctggcagactttggtgcccgcgtggtgagagtcgacaggcctgggtcgcggtacgatgtgtcacgactgggccggggaaagaggtccctggtgctggatctcaagcagcctcgcggtgcagccgtcctgcgcagactttgtaagcgctcggatgtccttctggaaccctttagaaggggggtgatggagaagctccagcttggaccggaaattctgcagcgagaaaaccctcggctcatttacgctaggctttcggggtttggacagtctgggagcttttgtcgtcttgcaggccatgacattaactacctggcacttagcggagtgctctcaaagatcggaagatccggagaaaatccatacgcaccactcaatctcctggccgattttgccggcggtggacttatgtgtgcactggggatcattatggcactttttgacagaacgcggaccggaaagggacaggtgatcgatgcaaacatggtcgaaggtactgcctacctttcctcgtttttgtggaaaactcagaaactctccctgtgggaggcacctcggggtcaaaacatgcttgacggcggcgcccctttctacaccacctaccggaccgctgatggtgaattcatggcagtgggagccattgaaccccaattctacgaattgctgattaagggacttggactgaaatcggatgagctgcctaaccaaatgtcgatggatgattggccagagatgaagaaaaagtttgcagatgtgtttgcagagaaaactaaggctgaatggtgtcaaatcttcgacggtaccgacgcttgcgtgactcccgtgctcacttttgaagaggtggtccatcatgatcacaataaggaacgcggatcgttcattacgtcggaagaacaagatgtgtcacccagaccagcaccgctgcttctcaatacccctgcaatcccttccttcaagagagatccgtttattggcgagcacactgaagagatccttgaagaatttggcttttcccgcgaagagatttatcaacttaactccgataagattattgaatccaacaaagtgaaggcaagcctt

SEQ ID NO: 179294 - DNA, 1146 bp, Artificial Sequence
  derived and/or modified sequence
atggcgttgcaaggaatctccgtcgtggagctctccggactcgcacctggaccattctgcgctatggtcctggcggattttggcgcacgggtcgtcagggtggacaggcccggctccagatacgacgtgagcaggctgggacgtggtaagagatcacttgtgttggacctgaagcagcctcggggagccgcagtgttgcgtcgcctctgcaaaagatcagatgttttgctcgagcctttccggaggggcgttatggaaaagctgcagctgggtccagaaattcttcaacgggaaaatccacgtcttatctacgcgcggttgagcgggtttggacagtcgggttccttttgtcgactcgctggtcacgatatcaattaccttgcactttcgggagtgctttccaaaattggtaggtccggtgaaaacccctatgcaccgctgaacctcttggcagattttgccgggggaggactcatgtgcgcactgggaatcattatggcactgtttgaccggacccgaaccggcaaagggcaagtcattgatgccaacatggtcgagggaactgcatacctgtcatcgtttctgtggaaaacccagaaactttcactttgggaagcaccaagaggtcaaaacatgctggacggaggcgcgcctttttacactacctaccgtacggccgacggggagttcatggcggtgggagcaattgagccgcaattctatgaactgcttatcaagggattgggactcaagtccgacgagcttccaaaccaaatgtctatggatgactggccagagatgaagaaaaagttcgccgatgtgttcgctgaaaagaccaaggccgaatggtgccagatttttgatgggacggacgcatgtgtgactccagtgttgacgtttgaagaagtggtccatcatgatcataacaaggaacggggttcgtttatcacttccgaagaacaagatgtgtctccccgacccgcacctctccttctgaatacccctgcaatcccgagcttcaagcgcgatccattcatcggtgagcacaccgaggaaattctggaagaatttgggtttagcagagaggagatttaccagctcaatagcgataagataattgaaagcaacaaagtgaaagctagcctt

SEQ ID NO: 179295 - DNA, 1146 bp, Artificial Sequence
  derived and/or modified sequence
atggccctacaggggatttcagttgtcgagctgtctggcctcgcacctggtcctttttgtgccatggtgctggctgacttcggggcccgcgtggtcagagtggaccgtcctggctctcggtatgatgtgagcaggttgggtcgaggaaaacggagtttagtgctagatctgaaacaaccccggggcgcagctgtactacgcagactatgcaagcggtctgacgtcctgctcgagccttttcggcgcggagtgatggagaagctgcaactgggccctgaaatcctacagagggagaatccacggctcatttatgcaagactgtccgggttcggccaaagtggctcattttgccggctagcagggcatgatattaactacctggccttgtctggtgtcctgtctaagatcgggcggagtggcgagaacccttacgcccctctaaatctactggcagatttcgctgggggtgggctgatgtgcgctctgggcattattatggcactgttcgacagaacacgaacagggaagggtcaggtcatagacgctaatatggttgaagggaccgcctacctctcaagcttcctgtggaagacacagaaactgtccctgtgggaggcacccaggggccagaatatgttagatggcggagccccattttatacaacatatcggacagctgacggggagttcatggccgtgggcgccattgagccccagttctatgagctgctgatcaaaggactcggacttaagtccgatgaactgccaaatcagatgagcatggacgactggcctgagatgaagaagaagtttgctgatgttttcgccgaaaagacaaaggccgagtggtgtcagatctttgacgggactgatgcttgtgtgacccccgtgctgactttcgaggaggtcgtgcaccacgatcacaacaaggagcggggttcctttatcacctcagaggagcaggacgtgagccccaggccagctcccctgctgctgaacactcctgccatccctagtttcaagagagatcccttcataggtgaacacactgaggagatacttgaggagttcggcttctctagggaggagatatatcagctgaactctgacaaaattattgagagtaataaagtgaaagcaagtcta

SEQ ID NO: 179296 - DNA, 1146 bp, Artificial Sequence
  derived and/or modified sequence
atggcattgcagggcatatccgtggtggaattgtctggcctggcaccaggaccattttgcgcaatggtgcttgctgattttggagcccgggtggtgcgagtggatcgccccggatctagatacgacgttagcaggctgggcagaggaaaacgctctctggtgctcgatttgaaacaaccccgcggagcagcagtgctgcgccgactgtgcaagagatccgatgtcctcctcgagccctttcgcaggggcgttatggagaaactgcagctggggcccgagatcctgcagagagagaatccccgccttatatatgctcgtctgtccgggttcggccagagcggctccttctgcagactggctggccatgatatcaactaccttgctctctctggcgtgctgagcaaaattggaaggagtggagagaacccatatgcccccctgaacctgctggcagactttgccggaggggggttgatgtgtgctctcggaatcattatggctctttttgaccggactcgtactggaaaaggacaggttatcgacgctaatatggtcgaagggactgcatacctgtcatccttcctgtggaaaacacagaaactttcgctatgggaggcgccccgaggccagaatatgctggacgggggggccccgttttacactacataccgcacagcagacggagaatttatggccgtgggcgccatcgagcctcagttctatgagctgctcatcaagggcctggggttaaagtctgacgagctgccaaaccagatgtccatggacgattggccagagatgaagaagaagttcgctgacgtgtttgcagaaaaaacaaaggccgagtggtgccagatattcgatgggactgatgcctgtgtaacgccggtgctaaccttcgaggaagtggtgcatcatgaccataataaagagcgcgggtcttttattacaagcgaagagcaagacgtctctccaaggcccgcccccctcctgctgaatacaccagcaataccctcatttaaacgcgatcccttcatcggcgagcatacggaggagatcctcgaggagtttggatttagccgagaggagatctatcaactgaactctgataagatcatcgagtcaaataaagtgaaggcctcacta

SEQ ID NO: 179297 - DNA, 1146 bp, Artificial Sequence
  derived and/or modified sequence
atggcgctgcaaggtataagcgtggtggagctctcgggactggcgccgggacccttttgcgcgatggtgctggcggacttcggcgcccgggtggttcgcgttgatcgtccaggaagcagatacgacgtgtcacgcctcgggcgcggtaagcgctcgctggtgctggatctgaaacaaccgcggggagccgcggtcctcaggagattgtgtaagcgctcagacgtgcttctggaaccgttccgcagaggcgtcatggaaaaactgcaactgggcccggaaatcctgcagcgcgagaaccctagactgatctacgcccggctttccggattcggacaatcgggatccttctgcagactcgcaggtcacgacatcaactacctggcgctttccggagtgctctccaagatcggccggtccggggagaacccttacgcgcccctcaacctcctggctgacttcgcaggaggagggctgatgtgcgcgctcggaataatcatggcgctctttgatcggacccgaactggaaagggccaagtcatcgatgctaacatggtggaaggcactgcttacttgagttcattcctgtggaaaacccagaagctgagcctgtgggaagctccacgcggacagaacatgctggatggcggggcgccgttctacaccacctacagaaccgccgacggagagttcatggctgtgggcgccatcgagcctcagttttacgaattgctcatcaagggattgggactgaagtcggacgagctgcccaaccagatgtcaatggatgattggcctgagatgaaaaagaagttcgccgatgtgttcgctgaaaagactaaggccgaatggtgtcagatttttgatggaactgatgcatgcgttaccccggtgctcactttcgaagaggtcgtccaccatgaccacaacaaagagcggggatcgttcatcacctcggaagagcaggacgtctccccaaggcccgcaccgttgctcctgaatactccagcgatcccttcgttcaaaagagatccgtttatcggagaacatacggaggaaatcctcgaggagttcgggtttagcagagaggagatctaccagcttaactcagacaagattattgagtcaaataaggtgaaggcaagcctg

SEQ ID NO: 179298 - DNA, 1146 bp, Artificial Sequence
  derived and/or modified sequence
atggcacttcagggaatctcggtggtggagttgtccggcttggcgccgggacctttttgtgcaatggtgctggccgacttcggagctcgggtggtccgggtggacaggcccggatcccggtacgacgtgtcccggctggggcgcggcaaacgatcactggttttggaccttaagcagccgcggggggcagccgtgctccgccggctctgcaagcgctccgacgtgttgctggagccgtttaggagaggggtcatggagaagttgcagctgggaccggagatcttgcaaagagaaaatccgagattgatttatgcccgcctgagcggattcggccagagcgggtcgttctgcagacttgctggccacgatatcaactacctcgccctgtctggagtgctgagcaagatcggccgctcgggagagaatccttacgccccactcaatttgttggctgatttcgctggaggtggtctgatgtgcgccctcggcatcatcatggccctgtttgatcggactagaaccggtaaaggccaagtgatcgacgctaacatggtggaaggaaccgcatacctcagctcgttcctctggaaaacccaaaagttgtccctgtgggaggctccgagaggacagaacatgctggacggaggagccccgttctacaccacttaccggaccgcggacggcgaattcatggccgtcggggctatcgagccgcaattctacgaactgcttatcaaggggctgggactcaagtcagacgaactcccaaatcaaatgtcaatggacgattggccagaaatgaaaaagaagtttgcggacgtgttcgccgagaaaacgaaggctgaatggtgccagatctttgacggcaccgacgcatgcgtgaccccggtgctgacctttgaggaggtcgtccatcatgaccataacaaggaacgggggtcatttatcacttccgaggaacaggatgtgtcaccaagacccgcgccgcttctgctgaatactccggcgattccgagctttaagcgcgacccgttcatcggcgagcataccgaagaaattctggaggaattcggattctcgagggaggagatctatcaactgaattcagataagatcattgagagcaataaagtcaaggcgtctctg

SEQ ID NO: 179299 - DNA, 1146 bp, Artificial Sequence
  derived and/or modified sequence
atggccctccagggtatctctgtggtggagctatcagggttggcccctggccccttctgcgcaatggtcctggcggattttggggctagggtggtaagagtggaccgtcccggttctcggtacgatgtgtctagattgggtaggggaaaacgcagtctggtgttggatttgaagcagccacggggggccgctgtgttgcggcggctgtgtaagcggtccgacgttctgctggagccttttcgcagaggggttatggagaaactacagttaggtcctgagatcctacagcgggagaacccacgcctgatctacgccaggctgtccgggtttggtcagtccgggagcttttgtcggctggctgggcatgacataaattacctagcgctctctggcgttctatcaaagataggccgatctggggagaacccatatgctcctctgaatttgctggcagattttgccgggggaggattgatgtgcgcactcggtattataatggctttattcgaccgcacaaggactggcaaggggcaggttatcgatgccaatatggttgagggcacggcctatctatctagttttttatggaaaactcagaagctgtctctgtgggaggctccacgtggacagaacatgctggacgggggggcacctttctacactacctaccgaaccgccgatggtgaatttatggccgttggcgcaattgagccgcaattctacgagctgcttataaaagggctgggactgaaatcagacgaactccccaaccagatgtcaatggacgactggcctgaaatgaagaaaaagtttgctgacgtgttcgcagaaaaaaccaaggcggaatggtgtcagattttcgacggtacagacgcgtgtgtcacgcctgttttgacattcgaagaagtcgtgcaccatgaccataacaaagaacgcgggtctttcattacgagtgaggaacaggacgtttcaccccggcctgccccgttgctccttaacactccggcaataccctctttcaagcgggatccgttcattggagagcatactgaggagatcttggaagagttcggatttagtcgggaagaaatataccaacttaattctgataaaatcattgagtcaaacaaggtgaaggcatctctg

SEQ ID NO: 179300 - DNA, 1146 bp, Artificial Sequence
  derived and/or modified sequence
atggccctgcaggggatctcagtggtcgagctctccggtctggcccctggccctttttgcgcaatggtgctggctgattttggcgcaagagtcgtcagagtggaccggcccggctcacgctacgacgttagcaggctggggcggggaaaaagaagtttggtgctagacttaaaacagcctcggggagcggcagtgttgagacgcctgtgcaagcggagcgacgtcctcctcgagccgttcaggcggggcgtcatggaaaaactgcagcttggaccagaaatactccagcgtgaaaacccacgactcatctacgcgaggctcagcggatttgggcagtcggggagcttttgtaggttggccggtcacgatattaactatctggcactgtccggagtccttagtaagatcgggcggagtggggaaaacccctatgcccctctgaatctgttggccgatttcgccgggggtggcttaatgtgcgccctggggattatcatggccttgttcgaccggacccgcacgggtaaaggtcaagtgattgatgccaatatggtggagggcaccgcgtatctctcctcatttttgtggaaaacacagaagctgagtctctgggaggcaccgcgggggcaaaatatgctggatggaggagctccgttctacacgacctatcgcactgccgatggggagtttatggcggtgggcgctatcgagccccagttttatgagctgttgattaaggggctagggcttaagtctgatgaactgccgaatcaaatgtcaatggacgactggccagagatgaagaagaaatttgcagatgtgttcgcagaaaaaactaaggccgaatggtgccagatattcgatggaaccgatgcctgtgtcaccccagttctgactttcgaggaggtagtccatcacgaccacaataaggaacgtggatcttttatcacaagcgaggagcaagatgtgtcccctcggcccgccccattattgctgaacacgccagctatacctagttttaagagagacccctttatcggcgagcatacagaggagatcttggaggagtttggtttttcccgggaggagatttaccagctcaacagcgataagatcatcgaatcaaataaagtgaaggcctccctg

SEQ ID NO: 179301 - DNA, 1146 bp, Artificial Sequence
  derived and/or modified sequence
atggcactccaggggatttccgtcgtggaactttccgggttggcccccgggcccttttgtgccatggtgctcgcagacttcggggctagagtggttcgggtagataggcccggatctcggtacgatgtgagtaggctcggaagagggaaaaggagtctggtgctagatctgaaacagccccgaggagcagctgtcctacgccggctgtgtaaaagatcagatgtacttctagaacccttcagaaggggggtgatggaaaaattacagttaggacccgagatcttgcagagggaaaatccaagactgatctatgcgcgactatctggattcgggcagtccgggtctttctgtaggttagcaggacatgatatcaattatctcgctctgtctggagtcctgtccaagatcggacggtcaggagaaaatccttatgcccccttaaatcttctagcggactttgcaggaggagggctcatgtgtgcccttggaatcatcatggctctctttgacaggacaaggactggaaaggggcaggtcatcgatgccaatatggtcgaaggaactgcttacctctcttcatttctttggaagacacagaagctatccctctgggaggcaccccgcgggcagaatatgcttgatggaggggcgccattctatacaacatatagaacagccgatggagaatttatggcagtcggagccatagagccccagttttacgagctcctaataaaagggctcgggctaaagtcagatgaacttcccaatcagatgtctatggatgactggccagaaatgaaaaagaaatttgccgatgtttttgctgaaaaaacgaaagctgagtggtgccagatctttgatgggactgacgcttgtgtgactcccgttcttacattcgaggaggttgtgcatcacgatcataataaagaacgcgggtcttttatcacgtctgaggagcaagatgtgtccccccggcccgcccccctccttcttaatactccagctataccctccttcaaacgcgatcctttcataggggaacacacagaagagatactcgaagaatttggattctccagggaagagatctaccagctgaactctgataaaattatcgaatctaataaagtgaaagcatcgctg

SEQ ID NO: 179302 - DNA, 1146 bp, Artificial Sequence
  derived and/or modified sequence
atggccctgcaaggaatctcggtggtggagctctcgggactcgcaccgggaccgttctgcgcaatggtccttgctgattttggagcacgggtcgtgagagtggatcgacctggaagcaggtacgatgtgtcgagattgggacggggaaagcggtcactggtgctcgacctgaagcagccgcgcggcgctgctgtgctgcggagactgtgcaagagatccgacgtgcttcttgagccatttagacgtggggtgatggaaaaactgcagctgggtccagagatcttgcagagagagaacccacgcctgatctacgcgagactttccggctttggacagagcgggagcttctgtaggctggctggccacgatatcaactaccttgcgttgtcaggcgtcctgtcgaaaattggccggagcggagaaaacccttatgccccgctgaatttgctcgcagacttcgctggagggggcctgatgtgcgccctcggaatcattatggccctcttcgaccgcactcggaccggaaaggggcaggtcattgatgcgaacatggtggaaggcaccgcatacctctcttcgttcctctggaaaactcaaaagctctcgctctgggaagccccacgcgggcaaaacatgctggacggaggagccccattctacaccacctaccgaacggcggacggagagtttatggccgtgggagccatcgagccgcaattctacgagttgctgatcaaaggactcggtctgaagagcgacgaactgcctaaccagatgagcatggatgactggcctgaaatgaagaagaagttcgccgacgtgtttgctgagaaaaccaaggcggagtggtgtcagattttcgacggcaccgatgcgtgcgtgacccctgtcctgacgtttgaggaggtcgtgcaccatgatcacaataaggagcgcggctcatttatcacctcggaagagcaggatgtgtctccgcggccggcgcctctcctgctcaacacccctgcgatccctagcttcaagcgcgacccttttatcggggaacatactgaagagatcctggaagaatttgggttttcgcgggaagagatataccaactgaactcagacaaaatcatcgaaagcaacaaagtgaaggcgagcctg

SEQ ID NO: 179303 - DNA, 1146 bp, Artificial Sequence
  derived and/or modified sequence
atggccttgcaaggaatctcggtcgtggaactttcaggtttggcaccggggccattttgtgccatggtgctggctgattttggcgcacgcgtggtcagggttgaccggccaggatcgcggtacgatgtgtccaggcttggaaggggaaagaggtcccttgtgctcgatctgaaacagcctaggggcgcagcagtgctgcggaggctctgtaagcggagcgatgtgctgttggaaccattcagacggggcgtgatggaaaagttgcagttgggtccggagattttgcaacgagagaaccctagactcatctatgcgcggctgagcgggtttgggcagtcgggttccttttgccggctggccggtcacgacatcaattacctggcattgtcgggtgtgctgtcgaaaattggacgaagcggtgagaacccttacgcaccactgaatctgctggcagattttgcgggaggtggtttgatgtgcgctctgggtattatcatggcacttttcgaccggacgcgcaccggaaagggacaagtgatagacgcaaacatggtggaagggaccgcctacctctcgtcctttctctggaaaacccagaaactctccctgtgggaagcacctagaggtcaaaacatgcttgatggaggagcacccttctacactacttaccgtaccgccgacggagagtttatggcagtgggagcgatagaacctcaattctacgaactgctcatcaagggcctgggccttaagagcgatgaactgccgaaccagatgtcgatggacgattggcctgagatgaagaaaaagttcgcagatgttttcgcggagaaaaccaaggcagagtggtgtcaaatctttgatggtactgacgcgtgtgtcactccagtgcttacttttgaggaggtcgtccaccacgatcataacaaggagagaggcagcttcattacttccgaggagcaggacgtatcaccaagaccagcaccactgctgcttaatacccctgctattcccagctttaagagggaccctttcattggtgagcataccgaagaaatccttgaagagtttggtttttcgcgggaagagatttaccaacttaattcggataagattattgaatcgaataaagtgaaggcatccctc

SEQ ID NO: 179304 - DNA, 1146 bp, Artificial Sequence
  derived and/or modified sequence
atggccttgcaaggcatcagcgtggtggaactcagcgggctcgctcccggacccttctgcgcaatggtgctagcggattttggcgctcgtgtcgttcgggttgaccggccaggatcacggtacgacgtctctcggttgggccgggggaagagaagcctggtgctcgacctcaagcagcctaggggcgcagcagtgttgagacgcctgtgcaagaggtctgacgtgttactcgagccttttcggcggggggtgatggaaaagctgcagctcggaccggagatcctgcagcgcgaaaatccaaggctcatctacgctcgtctttcagggtttggccagtcaggctctttttgtcggctcgccggtcatgacatcaattatttagccctgtccggcgtactgtctaaaatcggccggtctggtgagaatccatatgcccccttaaaccttctggccgactttgcgggtggggggctcatgtgtgcactcggtatcattatggcgctgtttgataggacacggactgggaagggccaggttattgatgcaaacatggtggaaggcacagcctacttgtcttcttttttatggaaaacccaaaagctgtcactctgggaagccccaaggggacaaaacatgctcgatggcggagctcccttctataccacgtaccggactgccgatggagaatttatggctgtcggggccatcgaaccacagttctatgagttgctgatcaagggcctgggtctgaagtccgacgaactgcccaatcagatgtccatggacgactggccagaaatgaaaaagaagtttgctgatgtatttgccgagaagacgaaggctgagtggtgccaaatcttcgatgggactgatgcatgcgtgactccggttctgacattcgaagaagtcgttcaccacgatcacaacaaagaacggggttccttcatcacttctgaagaacaagatgttagcccacgcccagccccactcttattgaatacccctgctattccatcttttaagagagaccccttcatcggcgaacacaccgaggagatcctcgaagaattcgggttctctagagaggaaatctatcagctaaacagtgacaaaattatcgaaagcaataaggtaaaagccagtctg

SEQ ID NO: 179305 - DNA, 1146 bp, Artificial Sequence
  derived and/or modified sequence
atggccttgcaaggaatcagcgtcgtggaactgtccggactcgccccgggtccgttttgtgccatggtcctcgccgatttcggagctcgggtcgtgcgggtggacaggcccggctcacggtacgatgtgagcaggctcggacgaggcaagcggagcctcgtgctggacctcaaacagccacgcggagcggcagtgctcagaaggctgtgtaagcgctccgacgtgcttctggaaccgtttaggcgcggggtcatggagaagctgcaactcggacctgaaatcctgcagcgcgagaacccaagactgatctacgcgcgcctgtcgggattcggccagtcgggctcattctgccgactggcgggacatgacatcaactatctggccctgagcggtgtcttgtccaagatcggtcggtcaggcgaaaacccatacgccccacttaacctcctggcagacttcgccgggggaggactgatgtgcgctctggggatcatcatggcgcttttcgaccggaccaggacggggaagggacaggtcatcgatgcgaatatggtggaaggcactgcctacctgagctcattcctttggaaaactcaaaagttgtcactttgggaagcacctcgcggacaaaacatgctcgatggcggagccccgttctacactacctaccggactgccgatggagagttcatggcagtgggagccatcgaaccacaattctacgaattgctgatcaaggggctgggattgaagtccgacgaacttccaaaccaaatgtcgatggacgactggccggaaatgaagaaaaagtttgcagatgtgttcgccgaaaagactaaggcggaatggtgccagatatttgatggcacggatgcttgcgtgactccggtgttgacgttcgaggaggtagtccaccacgatcataacaaggaacggggatcattcatcacctcggaggaacaagacgtgtcacctcgtccggctcctctgctcctcaacaccccggccattccatcgtttaagcgcgacccctttatcggcgagcacaccgaggaaatcctcgaagagttcggattctcgagggaggagatctaccaactgaattccgacaagataatcgagagcaacaaggtcaaagcatccctt

SEQ ID NO: 179306 - DNA, 1146 bp, Artificial Sequence
  derived and/or modified sequence
atggcactccagggcatttctgttgtagaactctctggactcgcccctggacccttctgcgccatggttctagccgattttggcgctcgggtcgtgagggttgacaggccgggctctagatatgacgtgtccagacttggtcgtggtaagcgtagcttggttctcgacctgaaacagcctcgtggtgccgcagttctgcgccggctgtgtaagaggagcgatgtacttctcgaaccgtttcgccgaggtgtgatggaaaaactacagctcggcccggaaattctgcagagagagaatccacggttgatttacgcacgcctatcaggtttcggtcagagtgggtccttctgtaggcttgctggacacgacatcaattacctagcactttcgggggtgctgagcaagatcggaagatccggcgaaaacccatacgcccctctgaacctgcttgcagattttgcaggaggagggctgatgtgtgcactgggaatcattatggcactcttcgacagaaccagaaccgggaagggacaggtgattgacgctaatatggtcgaaggcaccgcatatctaagtagcttcttatggaagacacagaagctgtctctttgggaggccccacggggtcaaaacatgctcgacgggggagccccgttctacacgacttatcgaacggcagacggcgagttcatggccgtgggggctatagaaccccaattctacgagctattaatcaagggtttagggctgaaatctgacgaattgccgaaccagatgtcaatggacgattggcctgagatgaagaaaaagtttgctgacgtcttcgcggaaaagacgaaagctgagtggtgccagatcttcgacggaacggatgcatgtgtcaccccagtcctgacctttgaggaggtcgtgcaccatgatcataataaagagcgcggctcattcatcacctcagaggagcaagatgtgagcccccgcccagctcccctcttactgaataccccggcaattccatcctttaaacgggacccattcattggggagcatactgaggagatccttgaagagtttgggtttagcagggaggagatataccaactgaattctgacaaaatcatagagagcaataaagtaaaggcaagtctt

SEQ ID NO: 179307 - DNA, 1146 bp, Artificial Sequence
  derived and/or modified sequence
atggcccttcagggcatcagtgtggttgagctttctggactggctcccgggcctttctgtgctatggtgctagccgattttggggcacgggtggtgagggttgatcgtcctggcagcagatatgatgtgagcagactggggcggggcaagcggtcattggtcttggatctgaagcagccgaggggagcagccgtacttcgcagactctgtaaacgatccgacgtgttacttgagccatttcgcagaggtgtgatggagaagctccagctggggcccgaaattcttcagcgcgaaaacccgcggctgatctacgcaagactttcagggttcggacagtccggctcattttgtagactggctgggcacgatatcaattacttggctctgtcaggagtgctttccaaaataggccgcagtggcgagaatccctatgctcctctgaacctgctggccgactttgccggtggcgggctgatgtgcgccctcggaattatcatggccctctttgacaggacaaggaccgggaaaggccaggtgatcgatgcaaacatggtggaggggaccgcctacctgtcttcatttttatggaaaactcagaaactgtctctgtgggaagcaccccgtgggcaaaacatgctggatggtggggctcctttctacaccacctaccggacggcagatggcgaattcatggctgttggagctatcgagccacagttttatgagcttctaattaagggcctggggctgaagtctgatgaactgcctaatcagatgtctatggacgactggcccgagatgaagaaaaagttcgcggacgtctttgcagaaaaaaccaaagcagagtggtgtcagatttttgatggaactgacgcatgcgtgacacctgtgctgactttcgaagaggttgtgcaccacgatcacaataaggagaggggaagcttcatcacttccgaagagcaagatgtaagcccgcgtccagcgccgcttcttcttaacactcccgcaattccgtctttcaaaagggatcccttcatcggtgagcatacagaagaaattctggaggagtttggcttcagccgggaagaaatctaccagctcaattcagacaaaatcatcgagagtaacaaggtgaaagcttccctg

SEQ ID NO: 179308 - DNA, 1146 bp, Artificial Sequence
  derived and/or modified sequence
atggctctgcaaggtatctctgtggttgaactgagcggactcgcccccggccctttttgcgccatggtcctggccgattttggcgcccgagtggtgagggtggacaggccaggatcccgttatgacgtaagtaggctgggtagggggaaacgcagcctagtgcttgacttaaaacaaccccgtggcgccgccgtgctgcgaagactttgtaaacgctccgatgtgcttctcgaaccctttagaagaggtgtgatggagaagcttcagcttggccccgaaatcctgcagagggagaaccccagactcatctatgctaggctttctggcttcggccagagtggttccttctgtagattggccggacatgatatcaattacctcgctctgtctggagttttgagtaagattgggcgtagcggcgagaatccctacgctccactcaatctattggccgacttcgccgggggaggactgatgtgtgcgttgggcatcattatggcactcttcgacagaacacggaccggcaaaggacaggttattgatgcgaacatggtggaaggcacagcttatctgtctagtttcctctggaagacacagaagctgagcctgtgggaagcaccccggggccaaaatatgttagatggaggcgcccctttttacacgacttaccgaacggccgatggggaattcatggctgttggcgctattgagcctcagttttatgagctactgattaagggattgggacttaaatcggacgagctccccaatcagatgagcatggatgactggcctgaaatgaaaaagaaattcgcggatgtgtttgcagagaagacaaaggctgagtggtgtcaaatctttgacggcaccgatgcatgcgtgactccagtccttaccttcgaggaggttgttcaccacgatcacaacaaagagaggggttccttcatcacgtcggaggagcaagatgtgtccccaagaccagcgccgctgctgctcaatactcccgccataccgtcctttaagcgggatccctttataggggaacatacagaagaaatcctggaagagttcggcttctcaagggaggagatatatcagttgaacagcgacaagattatagagagcaacaaggttaaggctagcctg

SEQ ID NO: 179309 - DNA, 1146 bp, Artificial Sequence
  derived and/or modified sequence
atggcgcttcagggtatctccgtggttgaattgtctggcctggctcctggtcccttctgtgccatggttctcgcggactttggagcccgagtggtccgggtggatcgaccgggatctcgctatgacgtctcccgcttggggagggggaagaggtctctggtgctggacttaaaacagcccagaggagcggccgtgctgcgtaggctttgcaaacggagtgacgtcctgctggagcctttcaggagaggggtgatggaaaaactgcagctgggccccgaaattctccagcgcgaaaatccgcgcttgatctatgccaggctgtccggttttggccagtctggttctttctgcaggcttgctggtcacgatatcaactatctcgccttaagtggggtgctcagcaagatcggccggtccggcgagaatccctatgcacccttgaacctgctagcagatttcgctggagggggactcatgtgtgcgctgggcattattatggcactatttgatcgtacccgcactgggaaaggccaggtaattgacgccaatatggtagagggcacagcctatcttagcagctttctttggaagacacagaagctgtcactttgggaggccccccgagggcagaatatgctggacggaggggccccattctatacaacatacaggaccgccgatggagaatttatggctgtgggcgccatcgaaccacagttctacgagttgctgataaaggggcttggtctgaagtcggacgaattgccaaatcagatgtctatggacgactggccagagatgaagaaaaagttcgcagatgtatttgccgagaagaccaaagccgagtggtgccaaatctttgacggcactgacgcctgtgtcacccccgtgttgacctttgaagaggtggtgcatcatgaccacaacaaagagcggggctctttcattacttctgaagaacaagacgtgagtccaaggcccgccccactcttattgaatacccctgccattcccagctttaaacgggacccattcatcggcgaacacactgaagagatattggaagagtttgggttcagccgggaggaaatctatcaattgaactcagacaagattatcgagtcgaataaggtcaaggcctcgcta

SEQ ID NO: 179310 - DNA, 1146 bp, Artificial Sequence
  derived and/or modified sequence
atggctcttcaggggatatccgttgtcgagctgtctggccttgctccgggaccattttgtgctatggtgctggccgatttcggcgctagggtggtcagggtagaccggccaggttcccgctacgatgtcagtcgcctcgggcgaggcaaacggtctctcgtcctagacttgaagcaacctcgtggggcagcagtgcttagacgtttatgtaaacgtagcgatgtgttgctggagccattccgccggggtgttatggagaaactgcagctggggccggagatcctgcagcgagaaaatcccaggctaatctatgctcgccttagcggcttcggacagagcggatccttctgcagattagcgggtcatgacatcaactatctagctctgtcgggcgtcttatcaaagattggccgatcaggagagaatccatacgcacctcttaaccttctggccgacttcgccgggggcggcctcatgtgtgctctgggcatcattatggcattgttcgataggactcggacggggaagggccaagtcatcgacgcgaacatggtggaggggaccgcctatctgtcatcctttctgtggaaaacacaaaaattgtccctgtgggaggctccaaggggacagaacatgcttgatgggggggctcccttctacacaacttatcgtactgccgatggcgaatttatggcagtgggagccattgagccacaattctacgaactgctgataaagggcctcgggctgaagagcgatgagcttcccaatcaaatgtccatggacgactggccagagatgaagaagaagtttgccgatgtttttgccgagaagactaaggcagaatggtgccaaattttcgacggcaccgatgcgtgcgtcacccctgtactaacttttgaggaggtggttcatcatgatcataacaaggagcgagggtcctttatcacaagtgaggaacaagatgtcagcccccgcccagccccgcttctgctgaacacgcctgcaatccctagcttcaaacgggacccttttattggggagcataccgaggaaatacttgaggagttcggtttctctcgcgaggaaatctatcagctgaacagtgataagatcatcgaatccaacaaagtgaaggcatccctg

SEQ ID NO: 179311 - DNA, 1146 bp, Artificial Sequence
  derived and/or modified sequence
atggcactacaggggattagcgtggtcgaactttccgggctggcccctggccctttctgcgccatggtgttagctgatttcggtgctcgtgttgtccgggttgaccgaccaggatcacggtatgacgtctcaaggctagggcgcgggaaacggtctcttgtgctagacctgaaacagcctcggggagccgccgttctccggcgactctgtaaaaggtcagacgtgctgctggaaccatttcggaggggcgtcatggaaaaactgcaattgggccccgagatccttcagagggaaaaccccaggctgatctacgcgagactcagtggttttggccagagcggatctttttgtcgcctggctggccatgatattaactatttggctctgtccggcgtgctgtctaagattggacgttctggtgagaacccatatgcaccacttaatttgctggctgacttcgcgggtggaggacttatgtgcgctttgggcattattatggctctgtttgatcgaaccagaacaggaaagggccaagtaatcgacgctaatatggtcgaaggcaccgcctacctttcatcatttctgtggaaaactcagaagctcagcctttgggaagccccgcgcggccagaacatgcttgacggtggcgctcccttctataccacataccgcaccgccgacggtgaattcatggctgtgggcgccatcgaaccccaattttacgagctgcttatcaaaggactggggctaaaatctgacgagctgccgaatcagatgtcaatggatgattggcccgagatgaaaaagaaattcgcggatgtgttcgcagagaagacaaaggcggaatggtgtcagatcttcgatggaactgatgcatgtgtgaccccagttcttaccttcgaagaggtggtgcatcacgatcacaataaggagcgcggcagcttcattacctctgaagagcaggacgtaagcccgaggcctgcccctctgctgttaaataccccggcaattccgtcgtttaagagggatccatttattggcgagcacaccgaagagattctcgaggaatttggcttttcgagggaagagatttaccagttgaactctgataaaattatcgagagcaataaagttaaagcgtcactg

SEQ ID NO: 179312 - DNA, 1146 bp, Artificial Sequence
  derived and/or modified sequence
atggctctccagggcatctccgttgtggagcttagcggattggccccgggtccgttctgcgctatggtgctcgcagacttcggggctcgcgtggtgcgggtggacagaccgggaagcaggtacgacgtatctcggctggggcgcggcaaaagatcgctcgtgctcgaccttaagcagcccaggggagcggccgtccttagaaggctgtgtaagcggtcggatgtgcttctggagccgtttcggcgcggcgtgatggaaaagctgcaactgggcccggagattctgcagcgggaaaatccaagactgatttacgcccggttgtccgggttcggtcagtcgggatccttctgtaggttggctggccacgacatcaactacctggccctgtcgggagtgctctcaaagatcggaaggtcgggtgaaaacccgtacgccccgcttaacctgctggccgactttgcgggcgggggactgatgtgtgccctgggtattatcatggccctgttcgaccgcacccggactggaaagggacaggtgatcgacgcgaacatggtggaaggaactgcatacttgtcgagcttcctctggaaaacccagaaactgtccttgtgggaagccccacgcggccaaaacatgctggacggaggcgctccgttctacactacttacaggacggcagacggagaattcatggccgtcggcgcaatcgaaccgcagttctacgaactgctcatcaagggactcgggctgaagagcgatgaactgcccaatcaaatgagcatggacgactggcctgaaatgaaaaagaaattcgccgacgtgttcgcggaaaagaccaaggcggaatggtgccaaatctttgacggtaccgatgcctgcgtcactccggtgctgactttcgaagaagtggtccaccacgaccacaacaaggagcgcggctcctttatcacgtcggaggagcaagatgtctcgccacggcccgcgccattgctgctgaacaccccagcgatcccgtcctttaagcgcgacccgttcatcggcgaacacactgaggaaattctggaagagttcggattctcaagggaggagatttaccagcttaactcggataagatcatcgagtccaataaggtgaaggcctccctc

SEQ ID NO: 179313 - DNA, 1146 bp, Artificial Sequence
  derived and/or modified sequence
atggctctccaaggtattagcgttgtggagctgagcggcctggcccctgggcctttttgcgccatggttttggccgatttcggggcccgcgtggtacgagtggatagacctggctcaaggtatgacgtaagtagactcggacgaggcaagcggagcctggtgcttgacttgaaacaacctaggggagctgcagtgctccggagactgtgtaagagatccgatgtgctcctcgagcctttcagaagaggagtgatggagaaactccagctgggacccgaaatactgcagagagaaaacccgagactgatctacgccaggctgagcggattcgggcagagcggttctttctgtagacttgctgggcacgacataaattacctggcattgagtggtgtgctttctaagatcgggcggtctggagaaaacccatacgcccctctgaacctgctggccgatttcgctgggggcggtctcatgtgtgcccttgggattatcatggccctgttcgatcgcacaagaacaggtaaggggcaggtgatcgatgccaatatggtggagggaactgcataccttagtagtttcctctggaagacacagaaactgtctctctgggaggccccaaggggtcaaaacatgctcgatgggggtgcaccattttatacaacctaccggacggccgacggtgagttcatggcagtgggcgctattgagccccagttctacgagttgctgattaagggactcggtctgaaatctgacgaactgccgaatcagatgagtatggacgattggccagagatgaaaaagaagttcgcagacgtgttcgcagagaagaccaaggcggagtggtgccaaattttcgatggcactgatgcctgtgtgacacctgttctgacttttgaggaggtggtgcaccatgaccacaacaaggagagggggtcatttatcacatcagaagaacaggatgtgtcccctaggcccgccccactgcttttgaacacgcccgccatcccatcatttaagagggatccttttattggcgagcacactgaagaaattctcgaggagtttggcttctctcgcgaagagatatatcagctgaattcagataagatcattgaatctaacaaggtgaaagcttccctg

SEQ ID NO: 179314 - DNA, 1146 bp, Artificial Sequence
  derived and/or modified sequence
atggccctacagggtatctccgtggttgaattgtcggggttggctcccggcccgttctgcgctatggtgctggccgatttcggcgcccgggtggtaagagtggaccgccctggttctaggtatgacgtaagtagattgggacgaggcaagcgcagtctggtcctggatttgaaacagcccaggggtgccgcagtcctaaggcgattatgtaagcggagcgatgtactgctggagccctttcgacgaggagttatggagaagctgcagctcggtcctgagatcctgcagcgggaaaaccctaggttgatctatgcccgtttgtccggttttgggcagtccggctctttctgccgcctggccgggcacgacatcaactacctggccctgtctggggtgctgagtaagatcggccgttcgggtgaaaatccttacgcccccttaaacctgttggcagactttgccggcggcggactcatgtgcgcattaggaattataatggccctgttcgatcgcactcggacagggaagggacaggtgattgatgccaatatggtagagggcaccgcctacctgtcatcgttcctgtggaagactcagaagctgtccctatgggaggctcctcggggacagaacatgttagatggcggcgccccgttttacaccacctatagaaccgcagacggtgagtttatggcagttggggccatcgaaccacagttctatgagttgctcatcaaagggctcggattgaagtcagacgagttgccaaaccagatgagcatggatgattggccagaaatgaagaagaagtttgcagatgtattcgccgaaaagactaaagccgaatggtgccagatttttgatgggaccgatgcctgcgtaactcctgttctgaccttcgaagaagtcgtgcaccacgatcacaacaaagagcggggatcattcatcacatcggaagagcaggacgtgtcccccaggcctgcccccctgctcctgaatacaccagccattcctagttttaagagggatcccttcatcggcgagcacacagaagagattcttgaggagttcggcttctcacgagaagaaatataccagttaaactcggataagatcatcgaatctaacaaagtgaaagcgtcacta

SEQ ID NO: 179315 - DNA, 1146 bp, Artificial Sequence
  derived and/or modified sequence
atggcgctccagggcatctcagttgtggaactgtcaggactcgcaccaggaccattctgcgcaatggttcttgccgattttggggctagggtcgtccgggtggataggcctggatctcgatacgatgtttcacgtttgggacgaggcaaacgaagtttggttctagatctcaaacaaccacgaggagcagctgttcttaggcggctttgcaagcggtctgacgtacttttggagccgttcagacgtggagttatggagaaacttcaattgggcccagaaattctacaacgggaaaatcctagattaatctatgctcgactttccgggtttggacaatccggaagtttctgccgtttggcagggcatgatattaactacttagcattatccggagtgttgagtaaaattggtagatcaggagagaatccatatgctccgctcaaccttctcgcagattttgcaggaggtggactcatgtgcgctcttggaattataatggctttgttcgaccgtactagaacgggaaaaggtcaagttatcgacgcaaacatggtagaaggtactgcttacttgtcgtcgttcttgtggaagacacagaagttgagtctatgggaagcgccgagaggtcaaaatatgttggatggaggcgctccattttacaccacataccgcactgcagatggggaattcatggcagttggagccattgaaccacaattttatgaacttctgattaaaggacttggtctcaagtctgatgaattgccaaatcaaatgagtatggacgattggccggaaatgaaaaaaaagttcgctgatgtcttcgcggaaaaaacaaaggccgaatggtgccagatcttcgacggaactgatgcttgtgttacaccggtgcttacttttgaagaggttgttcatcatgatcataacaaggaacgtgggtcgtttattacctctgaagaacaagatgttagtccgcgacccgctcctctcctcctcaatactccagctatcccaagcttcaagagagatccgttcatcggagaacacacggaggaaatcctggaagagttcggcttcagccgggaagagatctaccagcttaattctgacaagattatcgaatcgaataaggtgaaagcatctcta

SEQ ID NO: 179316 - DNA, 1146 bp, Artificial Sequence
  derived and/or modified sequence
atggcgttgcagggaatctctgtagtggaactctctggcctggcacccggccccttctgtgctatggtgctggcagatttcggtgcaagggttgtacgggttgatagaccaggctcccgatacgacgtctcgcggttaggcaggggaaaacgctctctcgttctcgacctgaaacagccaaggggagcagctgtactgagacgcttgtgcaagcggtctgatgtgctcctggaacccttccgacggggggttatggagaaattacagctcggacctgagatcctgcaacgagagaatcctcgcctcatttacgcccgcctttccggattcggacagagtggctcattctgccgattggctggacacgacatcaactatcttgctctcagtggagtgctctccaagattgggcgcagcggcgagaacccttatgcccccctaaacctgctcgccgattttgctgggggggggctcatgtgcgctctcgggattatcatggcattgttcgacagaactaggacaggtaaggggcaggttattgatgcgaatatggttgagggaacggcctacctttcttccttcctctggaaaacacaaaaactgagcctctgggaggctcctcgcggccagaacatgctagatgggggggcaccgttctataccacatatcgcacggcggacggcgaattcatggccgtgggagccatcgagccccagttctacgagttattgatcaagggtttaggtctgaaatccgacgaactgcctaaccagatgagtatggatgattggcctgagatgaaaaaaaaatttgccgacgtctttgcggaaaaaacaaaagcagagtggtgtcaaatatttgatggcactgacgcttgtgtgacgccagtgctgacttttgaagaggtggtgcatcacgatcacaataaggagcgcggctctttcatcactagcgaagagcaggacgtgagtcccaggcccgccccattgctgctgaatactcccgccattccatcatttaaacgagaccctttcatcggagagcacacagaagagatcttggaagaattcggcttttctcgcgaagagatctaccagctgaattccgataaaattatagaaagcaacaaggtgaaggcctcactt

SEQ ID NO: 179317 - DNA, 1146 bp, Artificial Sequence
  derived and/or modified sequence
atggccctgcagggaatttcggtggtggaactgagcgggttagcgcctgggccattctgtgctatggtgctagctgacttcggcgcgagggtggtgcgcgtggacaggcccggatccaggtacgacgtttctcgcctgggacgggggaagcggagccttgtgcttgacctgaaacaaccccgcggagccgctgttctaaggaggctgtgtaagcgctcagacgtattactggagccgttcagacgcggcgtgatggaaaagcttcagcttggcccggaaatcctccagagggagaatcctcgcctgatttacgcacggctttcgggatttggccagtctggttccttctgccgcctcgccggacatgatattaactatctggctctttcgggagtcttgtctaagatcggtaggtcaggtgagaacccctacgcacctttaaacctgttggcggacttcgctggaggcggccttatgtgcgcgctgggtattataatggctctcttcgatcgcactagaacaggaaaaggacaggtcatcgatgccaacatggtggagggcaccgcctacttgtccagcttcctgtggaagacacagaagctcagcctttgggaagcccctcggggccagaacatgctcgatggcggtgcccccttctacacaacctaccggaccgctgacggtgagtttatggcggtgggtgctatcgagccccagttctatgagctgttgattaagggattaggactcaaatctgatgagctgcccaaccagatgtcaatggatgactggcctgaaatgaagaaaaagtttgcggatgtatttgcagaaaagacaaaggccgagtggtgtcaaatcttcgacgggaccgatgcatgtgtcacccccgttctgactttcgaggaggtggttcatcacgatcacaacaaagaaagagggtccttcatcaccagcgaggaacaggacgtctctccacgccctgcccccctgctgctgaatactccagcaatcccatctttcaagcgggatcccttcatcggggagcacacagaggagattctcgaagaattcggtttctcgcgcgaagaaatttaccagctcaactccgataaaatcatcgaatcaaacaaggttaaggcatcactg

SEQ ID NO: 179318 - DNA, 1146 bp, Artificial Sequence
  derived and/or modified sequence
atggcactgcagggaatttcggtggtggagctgagcggcctcgccccgggacctttctgtgccatggtgctggcggacttcggcgcccgcgtggtgcgggtcgacagaccgggatcgcgctacgacgtttctcggttgggaagaggaaaaagatcactggtccttgatctcaagcagccacggggtgccgcagtcctgagacgcctgtgtaaacgttctgatgtcctgctcgagccgttccggcgcggagtgatggaaaaactgcagctgggacccgaaatcctgcaacgcgaaaacccgcggctgatctacgctagactgtcgggcttcggccagtcggggtcgttctgcagactggcagggcacgatatcaattacctggccttgtctggcgtcctgtcaaagatcgggcggtcaggtgagaatccatacgcaccactcaacctgctcgccgacttcgctggtggggggcttatgtgcgcgctcggaattatcatggcactgtttgaccgcacgcgcactggtaaaggccaagttatcgatgcaaatatggtggagggaactgcctacctgtcgtccttcttgtggaaaacgcaaaagctctcgttgtgggaagctccaagaggccagaacatgctggacgggggcgctccgttctacacgacttaccgcaccgccgacggagaattcatggcagtgggggcgatcgagccacagttttatgaactcctgatcaagggactgggactgaagtccgatgagttgccgaatcaaatgtcgatggatgactggccagaaatgaagaagaagttcgccgacgtgttcgcggaaaagaccaaagcggagtggtgccagatcttcgatgggactgatgcctgtgtgacccctgtgctgactttcgaagaggttgtgcatcatgatcacaataaggaacgcgggagcttcatcaccagcgaagaacaggatgtctccccaaggccagcgccgctgctgttgaacactcccgcgatcccatccttcaagcgcgacccatttatcggagaacacactgaagagatcctcgaagagttcggatttagccgggaggagatctaccagttgaactcagacaagatcatcgaatcaaacaaagtgaaggcatcactg

SEQ ID NO: 179319 - DNA, 1146 bp, Artificial Sequence
  derived and/or modified sequence
atggcgttacaaggtatatcggtagttgaactatcgggtttagcgccgggtccgttttgtgcgatggttctagcggattttggtgcgcgtgtagtacgtgtagatcgaccgggttcgcgatatgatgtttcgcgattaggtcgtggtaaacgttcgctagttctagatctaaaacaaccgcgtggtgcggcggttttacgacgactatgtaaacgttcggatgttctattagaaccgtttcgtcgtggtgttatggaaaaactacaattaggtccggaaatattacaacgtgaaaatccgcgtctaatatatgcgcgtctatcgggttttggtcaatcgggttcgttttgtcgactagcgggtcatgatataaattatttagcgttatcgggtgttttatcgaaaataggtcgatcgggtgaaaatccgtatgcgccgttaaatctattagcggattttgcgggtggtggtctaatgtgtgcgttaggtataataatggcgttatttgatcgaacgcgtacgggtaaaggtcaagtaatagatgcgaatatggttgaaggtacggcgtatctatcgtcgtttctatggaaaacgcaaaaactatcgctatgggaagcgccgcgtggtcaaaatatgctagatggtggtgcgccgttttatacgacgtatcgtacggcggatggtgaatttatggcggttggtgcgatagaaccgcaattttatgaactactaataaaaggtttaggtttaaaatcggatgaattaccgaatcaaatgtcgatggatgattggccggaaatgaaaaaaaaatttgcggatgtatttgcggaaaaaacgaaagcggaatggtgtcaaatatttgatggtacggatgcgtgtgtaacgccggttctaacgtttgaagaagttgtacatcatgatcataataaagaacgtggttcgtttataacgtcggaagaacaagatgtttcgccgcgtccggcgccgttattactaaatacgccggcgataccgtcgtttaaacgtgatccgtttataggtgaacatacggaagaaatattagaagaatttggtttttcgcgagaagaaatatatcaactaaattcggataaaataatagaatcgaataaagttaaagcgtcgtta

SEQ ID NO: 179320 - DNA, 1146 bp, Artificial Sequence
  derived and/or modified sequence
atggcccttcagggtattagtgtggtcgaattgagtggcctcgcccctggccctttttgtgctatggtcctcgcagatttcggggcccgggtcgtgagagtggaccgccccggtagccggtatgacgtttcccggctcggcagagggaaacgaagtctcgtgctcgatctcaaacagccacgtggtgctgccgtgcttcgcagactttgcaagaggagcgatgtcctcctggagcccttccggcgcggcgtcatggaaaagctccagctgggtcctgagatactgcagcgcgagaatccgaggctgatctacgccagactgtccggatttgggcagagcggaagtttttgtcgactggccgggcacgatatcaattatctagccttaagcggggtcctgtctaagatagggcgctccggggagaacccatacgccccgttaaatctcctcgcggacttcgccggcggcggcctgatgtgcgcccttggtataattatggcccttttcgaccgaacaagaactggaaagggccaggttattgatgccaacatggtcgagggcaccgcatacctctctagctttctgtggaaaactcaaaaactctccctctgggaggcgccccgagggcagaacatgctcgacggaggcgccccattttacaccacatatcggacagccgacggggagttcatggcagtcggcgcaatcgaacctcaattctacgaattactaatcaagggcctcggcttgaaatccgacgaactgccaaaccaaatgagtatggacgattggccagaaatgaagaaaaagttcgccgacgtgttcgctgagaaaaccaaagccgaatggtgtcagattttcgatggcaccgatgcatgtgtgacccccgttttgacgtttgaagaggttgtccaccacgatcacaacaaggaacggggctcttttataacttccgaggagcaagatgtctccccacggcctgcgccattgctgctgaacaccccggcaatccctagcttcaagagggatccgttcattggcgaacacactgaagagattctggaggagtttggtttttctcgagaggagatataccagctcaactctgacaaaattatagaatcaaataaggtgaaggccagcctt

SEQ ID NO: 179321 - DNA, 1146 bp, Artificial Sequence
  derived and/or modified sequence
atggcgttgcagggaatttcagtggttgaactgtccggactggcacctggcccgttttgtgctatggtgctcgccgactttggggcccgcgtggtgcgggtggatcgccctggatcgcggtacgacgtgtcgaggctgggccggggcaaaagatccctcgttctcgatctcaagcagccccgcggagccgcagtgctccggcggctctgcaagcggtcagatgtcctgttggaaccgttccggaggggtgtgatggagaaactgcaactgggtcctgagattctccagcgcgaaaatccgcggctcatctacgcgcggctctccggattcggacagagcggatccttctgccggctggcgggacacgatatcaactacctggcactctcgggggtgctgagcaagatcggtcggtcgggagaaaacccctacgccccccttaatctgctggctgatttcgcaggaggaggactgatgtgcgcgctgggaatcatcatggcgctcttcgatcggactagaactggaaagggccaggtcatcgatgccaatatggtggagggcaccgcctacctgtcatcgttcctgtggaaaactcagaagttgtccctgtgggaagcacctcggggacagaacatgttggatggtggagcgccgttctacactacgtaccgaacggccgatggcgaattcatggcggtgggcgcaatcgagccccaattctacgaattgctgatcaaggggctgggtttgaagtcggacgagctgcccaatcaaatgtccatggatgactggcctgaaatgaagaaaaagtttgctgacgtgttcgctgaaaaaactaaagccgagtggtgccagatcttcgatggtactgacgcttgcgtcaccccggtgctgaccttcgaggaggtcgtccaccacgaccacaacaaggaaagaggctcttttatcacctccgaagagcaagatgtgtcccctagaccagcccctttgcttctgaacaccccggcaatcccgtcctttaaacgcgacccgttcatcggggagcatactgaagaaatcctggaggagtttgggttctcacgggaagagatttatcaactgaattcagacaagattatcgaatcgaataaggttaaggcgtccctg

SEQ ID NO: 179322 - DNA, 1146 bp, Artificial Sequence
  derived and/or modified sequence
atggcactgcagggtatcagtgtcgttgagctctccggtctcgcgcccgggccattttgcgcgatggttctggccgacttcggcgcaagagtcgtacgtgtagaccgtcccgggtctagatacgacgtctcgcgcctaggacgtggcaagagaagtctggtcctggatcttaaacagccaagaggagcggccgtcttgaggagattgtgtaagcgttctgatgtcctgctcgaaccatttaggcgaggagttatggaaaagctccagctaggtcctgaaattttgcaaagagaaaatcctcgcctcatttatgcgcgcctgtctggctttggtcaatcaggcagtttttgtcgactagcaggacatgatattaattatctggcactgtccggcgttctgtctaagatcggccgctcgggtgaaaatccttacgcgccattgaatctactggcggacttcgctggaggcgggcttatgtgcgcattgggcataatcatggccctattcgaccggacccgcactggtaagggccaggtgatcgacgccaacatggtggaaggcacagcttatctctcttctttcctttggaagacgcaaaaattgagtctctgggaggccccccgcggccaaaacatgctggatggaggggcgccgttttataccacgtatcgcacggcagacggtgagttcatggcggtaggtgctatcgaacctcagttttatgaattgctaatcaaaggcctgggcctgaagtcggatgagttgccaaatcagatgtcgatggacgactggcctgagatgaaaaagaagtttgcggacgtgtttgccgagaaaacgaaagctgagtggtgtcagatcttcgatggtactgacgcttgtgtcacccctgtgttgactttcgaggaagtggtgcaccacgatcacaacaaggagagggggtcgtttattacctctgaggaacaggatgtctcccctagacctgctcctctacttcttaacacccctgccataccttcttttaagagagaccctttcatcggtgagcacactgaggaaattctcgaggagtttgggttttcccgtgaggagatatatcaactgaatagcgacaagataatcgaaagcaataaagtcaaggctagcctg

SEQ ID NO: 179323 - DNA, 1146 bp, Artificial Sequence
  derived and/or modified sequence
atggccctacagggcatttctgtggtcgagctttctggtctggccccgggccctttctgtgccatggtccttgctgacttcggcgcgcgggtcgtacgggttgacaggccaggctcgcgatacgatgtgtcccgactcggccggggtaagcggagtctggtactagatctcaagcaaccccgtggggcggctgtgctgaggaggctgtgtaagcgctctgacgtcctcttggagccattcagacgtggcgttatggaaaagctgcagctgggaccggagatcctgcagcgcgaaaatccgcgattgatctacgcgcgattgtcgggttttggtcaaagtggatccttctgtcgtcttgctggccacgatattaactatctagctctcagtggtgtgttgtcaaaaatcggacgaagtggtgaaaacccttacgcgccgctcaacttactcgcagatttcgcaggtgggggtctaatgtgtgccctcggcataatcatggccctctttgatcgaacccgcacagggaagggccaagtaatcgacgccaacatggtcgagggcaccgcctacctatcatcattcttgtggaagacccaaaagctgtcgctttgggaggcaccgcgcggtcagaatatgctcgacggtggcgcccccttttacactacatacagaacagccgacggtgaattcatggcggtcggcgcgatcgagccgcagttctacgaactcctgattaaaggcctcggtttaaagtctgatgaactgcccaatcaaatgtctatggacgattggcccgaaatgaagaaaaaattcgcggatgtttttgcagagaaaacgaaagccgaatggtgtcagatctttgacggcacggatgcctgcgttactccggtgctgacttttgaagaggttgttcaccacgatcataataaggaaagagggagctttatcacgagtgaggagcaggacgtaagcccgcgaccggccccgctcttactaaatactcccgctattccatcgttcaagagggaccccttcataggcgaacatactgaggagatcttggaggagttcgggttctccagagaagagatctaccagcttaattccgataaaattattgagtccaataaggtaaaggcatcgctc

SEQ ID NO: 179324 - DNA, 1146 bp, Artificial Sequence
  derived and/or modified sequence
atggctctccagggcatctccgtggtcgagctgtccggcctggcccctggaccattttgcgccatggtccttgcagacttcggggcacgagtggttcgagtggaccgacctggcagtaggtacgatgtgagccgactcggaagaggtaagcgatcactggttcttgacctgaaacagccaagaggagccgcagtgctgcgcagactgtgtaaaagatctgatgtgttgcttgagccatttaggagaggggtgatggagaagttgcagcttgggccagagatattgcagagagaaaatccgaggctgatctacgctagactatcagggttcggacagtccggctccttctgtcgcttggccggacacgacatcaattaccttgctctgagcggagtcttgtcaaagatcggccgtagtggcgagaatccttacgcaccattaaacttgttagccgatttcgctggaggcggactgatgtgcgccctcggtattattatggcgttgttcgatagaacacgcaccggaaagggacaggtgattgatgctaatatggtggagggcacagcatacctgtcttctttcctttggaagactcagaaattgagtctatgggaggcgccccgcgggcagaacatgctggatggaggtgcgccattttacactacctacagaaccgccgacggggagtttatggccgtaggggccattgagccccagttctacgagttactcatcaaaggattgggtcttaagagtgacgagctgcccaatcagatgtccatggacgactggcctgaaatgaagaaaaaattcgctgatgtgttcgccgaaaaaactaaggctgaatggtgtcaaattttcgacggtaccgatgcttgcgtaaccccagttctcacctttgaagaggtggtgcatcatgaccacaacaaggagcgaggcagctttatcacgtctgaggagcaggatgtgagcccgaggcccgcgcctctgctgctcaatacacccgctataccaagctttaaacgagatccattcatcggggaacacaccgaagaaatcctggaagagttcggattttcccgcgaggagatctaccagctgaatagtgacaagattatcgagagcaataaggtgaaggcgagcttg

SEQ ID NO: 179325 - DNA, 1146 bp, Artificial Sequence
  derived and/or modified sequence
atggccttacaagggatctccgtggtggaactttccggattagcgccaggaccgttttgtgcaatggtgctggctgactttggggctagggttgtgagagttgaccggcccggatctcggtacgacgtctcccgcctaggccgcggcaagcggtcacttgtcctggatctcaagcagcctcgaggcgcagctgtgttacgtcggctttgtaagcggtccgatgtgcttttggaaccattccgccggggcgttatggaaaagctgcagctggggcctgagatactgcagcgagagaacccccgtcttatatatgctagattaagcggattcgggcagtccggatccttttgccgccttgccggacacgacattaactacctggccctgtccggcgttctctccaaaatcgggcgttctggagagaacccctacgctccactgaacctgctcgctgattttgccggcggggggcttatgtgcgcactagggattatcatggctttatttgatcggacgcgcactggaaagggccaggtcatcgacgccaatatggtggagggtaccgcttacctgagctctttcctgtggaagacacagaagctatccctctgggaggctccaagaggacagaatatgctcgatggaggagctcctttctacaccacgtaccggacagccgatggcgaatttatggccgtgggggctatcgagccccaattttacgaattactgatcaagggtctggggcttaagtcagacgaacttcctaatcagatgagtatggatgactggcccgaaatgaagaagaaatttgcagatgtctttgctgaaaagacaaaggccgaatggtgtcagatattcgacggtacagacgcctgcgtcacacccgtgctgacttttgaggaggtggtccaccatgatcacaacaaagaacggggctcatttattacttccgaagaacaggacgtgtccccacgccctgctccgttgttgctgaatacccccgccattcccagtttcaagagagacccattcatcggggagcatacggaagagatcttagaagaattcggcttcagcagagaagagatctaccagctgaattcagacaagatcatcgagagtaacaaggttaaagcaagcctg

SEQ ID NO: 179326 - DNA, 1146 bp, Artificial Sequence
  derived and/or modified sequence
atggcgttgcaaggaatctcagttgtggaattatctggtctcgccccaggtcctttctgcgcgatggtgttggcagacttcggagcccgagttgtcagggtcgaccgacccggaagtcgatacgatgtgtctcgattagggagaggaaaacggagtctggtcctggacttaaagcaaccccgaggggcagctgtgttgagaagactttgtaagcgctcagacgtcttgctggagccatttagaaggggagtgatggagaaactgcaactggggcccgagatactgcagcgcgagaatcctcggttgatctatgccaggttgtctggattcgggcagtccggatcattttgtcgtctcgcaggccatgatatcaattatctcgccctctccggggtcctgtccaagatcggccggtccggagagaacccctatgcaccattgaatctgctcgctgattttgctgggggcgggcttatgtgtgcactcggcataatcatggctctgttcgacagaacacgaacagggaaggggcaggtcatcgacgccaatatggtagaggggacggcctacctgagttccttcctgtggaaaacacagaaacttagtctgtgggaagccccgcgcggccagaacatgcttgatggtggcgcacccttctatactacttatagaacagctgatggagagttcatggcagtgggagctattgaaccccagttttacgagcttctaattaaaggtctcggacttaagagcgacgagctccctaaccaaatgagtatggatgactggccagaaatgaagaagaagttcgccgacgtgtttgcagaaaaaacgaaagccgaatggtgccagatcttcgatgggaccgacgcatgcgtaactccggtcctcactttcgaggaagtggtccatcacgatcacaataaggaacgaggctccttcataacttctgaagagcaagatgtgagtccacggcctgccccgttgttactgaacacgccagctatcccaagttttaaacgggatccctttatcggcgagcacacagaagaaattttggaagagttcggcttctcaagggaggagatttatcaactgaacagcgacaaaatcatagagtccaacaaggtgaaggcaagtctg

SEQ ID NO: 179327 - DNA, 1146 bp, Artificial Sequence
  derived and/or modified sequence
atggcactccagggtatttcagttgtagagcttagtggactggcccctggacccttttgcgcgatggtattggccgacttcggagcaagagtcgtgagagtggacagaccagggagcagatatgacgtctccaggcttggtaggggaaagaggagcctagtcctggacctcaaacagccccggggcgccgcggtgctgcgtaggctttgtaagaggtccgacgtgttgctcgagccatttagaagaggtgtaatggagaaactgcagttgggacccgagattctgcagcgtgaaaatccacggctgatttacgccagactcagcggattcggacaaagcggttccttttgccgtttggctggtcatgacattaactacctggcactgagcggagtgttgagcaaaattggccggtccggcgaaaatccgtacgctccattgaacctgctcgcggatttcgccgggggcgggttaatgtgcgctctgggcatcatcatggctctgtttgatagaaccaggaccggaaagggtcaggtgatagatgcaaacatggtggaaggaaccgcgtacctgtcttccttcctgtggaaaacccagaagctgagtctttgggaggcaccccgcgggcagaacatgttggatggcggcgctccattctacactacctacagaaccgctgatggagagtttatggcagtgggcgcaattgagccacaattctatgagcttctgatcaaaggactgggcctgaagagcgatgagttgcccaatcagatgagcatggatgactggccagagatgaaaaaaaagttcgcagatgttttcgccgaaaagacaaaagcggagtggtgccaaattttcgatggcaccgacgcgtgtgtcacccctgtgctgacgtttgaagaagtcgtgcaccacgaccacaataaagagaggggcagctttatcacatcagaggagcaggacgtatcccctcgccctgctccgcttcttttgaacacccctgctattccttcctttaaaagggatccatttattggcgagcatactgaagaaatcttggaggagttcggtttctctcgcgaagagatctatcagctaaacagcgataaaattatcgagagcaacaaagtcaaggccagcctg

SEQ ID NO: 179328 - DNA, 1146 bp, Artificial Sequence
  derived and/or modified sequence
atggccctccagggtataagcgtggttgagcttagtggtttggcaccaggtccattctgtgccatggtgctcgcagatttcggtgctagagttgtgcgcgtagaccgcccaggatctagatacgacgtttctcgtttgggcaggggtaagagaagcctggtgttggacctgaagcagccccgtggagccgccgttcttcgcagactgtgtaaaagatccgacgtcctgctggagccctttcgccgcggagtcatggagaaactccagttgggtcccgaaatcctgcaaagagagaacccccgcctgatttatgcaagattgtctggtttcggccagagtggttctttctgccgcttggcaggtcacgacataaactacttggctttgtcaggcgtccttagtaagatcggccgctccggcgaaaatccttatgctcctttgaatctgctggctgacttcgcaggcggaggattgatgtgcgcactgggtatcatcatggccctctttgaccgcacacgcaccggcaaaggccaggtaattgatgccaatatggtcgaaggcaccgcttacctgtcatcttttctctggaagacccagaagctctctctctgggaagcaccaaggggccagaacatgcttgatggcggtgcacccttttatacaacctatcgtacagccgatggtgaattcatggccgtcggtgctatcgagcctcagttttacgaactccttataaagggtcttggactgaagagtgatgagctgcccaaccagatgtctatggacgactggcctgagatgaaaaagaagttcgccgacgtctttgctgagaagaccaaagctgaatggtgccagattttcgatggtaccgacgcatgcgttacccccgtacttacctttgaagaagtggttcaccacgatcacaacaaggaacgcggcagtttcatcacatctgaggagcaggacgtgtctccccgccccgcaccactgctgctcaatacacctgccattccatcattcaagagggatccctttataggtgagcacactgaggagatacttgaagagtttggcttcagtagggaggaaatctatcagctgaactcagataagatcattgagagtaataaggtaaaagcatctctg

SEQ ID NO: 179329 - DNA, 1146 bp, Artificial Sequence
  derived and/or modified sequence
atggcactacagggcatttccgtagtcgagctttctggcttagcgcctgggcccttttgcgctatggtgctggcagactttggagcaagagtggtacgcgtggacagaccaggtagcagatacgatgtgagtaggctaggacgtggaaagagatccctagtgctggatttgaaacagccaagaggggcagctgtgctccggcggttatgtaagagaagcgacgtgcttcttgaaccctttcgcagaggtgtcatggagaagttgcagctgggaccagaaattcttcagcgggagaacccaaggttgatttacgccaggttaagcgggttcggccaatcaggaagtttttgcagattggctgggcatgacattaattacctggctctgtctggagtgctctcaaaaatcggccggtcaggagaaaacccttatgcacccctcaacctgttagctgatttcgccggcggcggactgatgtgcgccttgggcatcatcatggcattgtttgataggactagaaccggaaaagggcaggtgatcgatgcgaatatggtcgagggaacagcatatctcagctcttttctgtggaaaacacaaaaattatcgctgtgggaggccccaaggggacagaatatgcttgacggaggagcacctttctatacgacctacaggactgcagatggcgaattcatggctgtgggtgcaatcgaaccccagttctacgaactgctgattaaggggctgggactgaaaagcgacgagctccctaatcagatgtcaatggatgactggccagagatgaagaagaaattcgctgatgtcttcgccgagaagactaaagccgaatggtgccagatcttcgatggcactgatgcttgcgtcacaccggtcctcaccttcgaagaggtcgtccaccacgatcataataaggaaagagggtccttcatcacttcagaagaacaagacgtgtccccaagaccagctcctctgctgctgaacactcccgctatcccttcctttaaacgggacccatttataggggagcacactgaggaaatcctagaagaattcggattctcaagagaggagatctaccaattgaactcagacaaaatcattgaaagcaataaagtaaaggcaagcttg

SEQ ID NO: 179330 - DNA, 1146 bp, Artificial Sequence
  derived and/or modified sequence
atggcacttcaaggtatttccgtcgtggagctgagtggacttgcaccggggcctttttgtgcgatggtcctggcggactttggagctcgcgtggtgcgggtggatcggcctggatcaagatacgacgtctcgagactcggaagaggaaagcgaagcctcgtgttggatctcaagcagccaagaggcgcagcagtgctcaggaggttgtgtaagaggtctgatgtcctccttgagccattccgtagaggagtcatggaaaagttgcaactggggcctgagattctgcaaagagagaatcctaggcttatctatgcccggctgtccggtttcggacagtcaggtagcttctgccgacttgcaggacacgacattaactacctcgctctttcaggagtactttcgaaaatcggacgaagtggagagaacccttacgcgcctcttaacctgcttgcggacttcgcaggtggcggcctcatgtgcgcccttggtatcatcatggccctgtttgaccggaccagaactggtaagggacaagtcatcgatgcaaacatggtggaggggactgcatacctgtcctcatttctgtggaaaactcagaaactgtcgttgtgggaggcgccacgcgggcagaatatgctggatggtggtgcacccttctacacgacttaccgcactgcagatggggaattcatggctgtgggagcaatagaacctcagttttacgaactcctcattaaaggccttggtctgaagtcggacgaactcccaaaccaaatgagcatggatgattggccggaaatgaagaaaaagttcgcagatgtctttgccgaaaagaccaaggccgagtggtgtcagatctttgacggtaccgatgcctgtgtgactccggttctgacttttgaagaggtcgtgcatcatgatcataacaaagaacgtggtagcttcattacctccgaagagcaagacgtgtctccccgtccagcaccactcctccttaatacccccgccataccttcgtttaagcgtgatcctttcataggtgaacacactgaagaaatactcgaggagtttggtttttcacgcgaagaaatctaccaacttaacagcgacaagattatcgaatcaaataaggtgaaggcatcgctt

SEQ ID NO: 179331 - DNA, 1146 bp, Artificial Sequence
  derived and/or modified sequence
atggcgctgcagggtatatcagtggtggaactaagcggtttggcaccaggtccgttttgcgctatggtcctggctgactttggtgctcgggtggtgcgcgtggacaggccgggaagccgttacgacgttagccgcctaggccgcggaaagcgttccctggttctggacctgaagcagccacgaggtgccgcggttcttcgccgcctgtgcaaacgcagtgatgttttgctggagcctttccgccgtggcgttatggaaaagctgcaacttgggccggagatattacagagagagaatcctcgcctgatctatgcccggttatcgggttttggccaatctggctcattctgcagactcgccggccatgatatcaactatctggcgctctccggggtgttaagcaagattggtaggagcggcgaaaacccatatgccccgctgaatctgcttgcggatttcgcaggcggtggcctgatgtgcgctctggggattattatggccctgtttgatcgaacccgcacgggaaagggccaggttattgacgctaacatggtggaaggtaccgcatatctgagctctttcctgtggaagacacaaaaactgtccctttgggaagcacctcggggccagaacatgctcgatggaggtgcgccgttttacactacctataggacggcggacggtgaattcatggcggttggcgcgattgaacctcagttctatgaactgctcattaaagggctgggcctaaaaagcgacgagctgccgaaccagatgagcatggatgactggccggagatgaaaaagaaattcgccgatgtgtttgcggaaaagaccaaggcggagtggtgccagatcttcgacggtaccgacgcctgcgtgacaccggtgctcacctttgaggaagtcgtccatcacgatcacaacaaggagaggggatcgtttattacatctgaagaacaggatgtctccccgcgtccagcacccctcctgctgaacactccagcgattccttcttttaaaagggacccttttattggcgagcacactgaagaaattctggaagagtttgggtttagccgggaggagatctaccaactgaatagcgataagatcattgaatcaaacaaagtgaaagcaagcctg

SEQ ID NO: 179332 - DNA, 1146 bp, Artificial Sequence
  derived and/or modified sequence
atggcgctgcagggtatttcagtggtcgagctttccggcctcgcacctggaccattctgtgccatggtgctggcagactttggtgcgcgggtcgtcagggtggatcgcccgggatcgcgctacgatgtatcgaggctggggaggggaaagcgtagcctggtgctggatctgaagcaacctaggggcgcagccgtgctgcgcagactctgcaagcgatcggatgtcctccttgaacctttcagaaggggcgtgatggaaaaactgcagttgggaccagagattctgcaacgggaaaacccgcgtttgatttacgcaagactttctggattcggtcagtcgggctcgttttgtcgtctcgccggtcacgacattaactacctggcgctttcgggagtgctttcgaagataggtagatcgggggagaatccctatgcgccccttaacctgctggcggattttgccggaggcggacttatgtgcgccctgggcatcattatggcactctttgaccgtactaggaccggcaagggtcaagtgatagatgcgaatatggtggaaggtaccgcatacctttcatcgttcctttggaaaactcagaagttgtcactgtgggaggcgccacgcggtcagaatatgcttgatggaggggcacccttttacaccacttacagaaccgcagacggtgaattcatggcagtcggtgccatagaaccgcaattctacgagcttcttatcaaaggactgggactcaagtcggatgaacttcctaatcaaatgagcatggatgattggccagaaatgaagaagaagttcgccgatgtgtttgcggaaaagactaaagccgaatggtgccagattttcgacggtaccgacgcctgtgttactccagtgctgacctttgaagaagtggtgcatcatgatcataacaaggaacgcggatctttcattacttccgaggagcaggatgtcagcccccggccggcacctctccttctgaacaccccggctatcccatcctttaagcgtgacccatttatcggtgaacacaccgaggagattctggaggaattcgggttttcacgagaggagatataccagctgaacagcgataagattattgaaagcaacaaagtgaaagcatccctg

SEQ ID NO: 179333 - DNA, 1146 bp, Artificial Sequence
  derived and/or modified sequence
atggctctccaggggatctcagtcgtcgaattgtccggtcttgcaccaggccctttttgtgcaatggtgcttgcagattttggtgcaagagtcgtgagagtggatagaccaggatcgagatacgatgtgtcgaggcttggaagaggcaaacgttcccttgtgctggatctgaagcagcccagaggtgcggcagtgctgcgcagactctgcaagcgcagcgacgtgcttttggaaccatttcgccgcggcgtcatggaaaagctgcagctcggcccagagattctccaacgggagaaccccagactgatctacgcaaggctttccgggtttggacaaagtgggagcttttgccggctggccggccatgacattaactacctggcacttagcggagtcctgagcaagattgggagatcaggcgaaaacccgtacgcaccactgaacctccttgcggattttgccgggggagggctcatgtgtgcactcggaattatcatggcactgttcgacagaacccgcactggtaagggtcaagtcatcgatgcaaacatggtggagggaaccgcctacctctcctcattcctttggaaaacccagaagctgagcctttgggaagcaccgagaggccagaatatgcttgatggcggagcacctttctacactacctaccggactgcagacggtgagtttatggcagtcggagcaatagaacctcagttttatgaactcctcattaagggcttgggacttaaatcggatgaactgcctaaccaaatgtcaatggatgactggccggaaatgaagaagaagtttgccgacgtgttcgcggagaaaactaaagcagagtggtgtcagatttttgatgggacggatgcatgtgttacccctgtgcttacgtttgaggaggtcgtgcatcacgatcataacaaagaaagaggatcgtttatcacctccgaagaacaagatgtctcgcctaggccagcacctctgctgcttaatactccggcaataccatccttcaagcgtgaccctttcatcggagaacataccgaagaaattctggaagaattcggcttctcacgggaggagatataccaactcaactcggataagataatcgaaagtaataaggtgaaggcaagcctt

SEQ ID NO: 179334 - DNA, 1146 bp, Artificial Sequence
  derived and/or modified sequence
atggcactccagggaatcagcgttgttgagctgtcgggactagcccccggacctttctgcgctatggttctggctgattttggagctcgggtggtgagggtggatagacccgggtccaggtatgacgtgtcccggttggggcgcggcaagcgcagcttggtactcgatcttaaacagccacgaggagcagctgtccttcggaggctgtgtaagcgaagtgacgtgttgctggagccgtttagaaggggtgtcatggaaaaattgcagttgggaccagagatattgcagcgagaaaatccaaggctaatctacgcacgcctgagcggctttggtcagtctggttccttctgtcgcctcgccggccatgatattaattatctggcactatccggcgtgctttccaaaattggacgttctggtgagaatccctacgcgccactcaatttgctagccgactttgcaggggggggcctaatgtgcgcccttggcatcataatggccctatttgatcgtaccaggacaggtaagggccaggtcatcgacgccaacatggttgaaggaactgcctacctctcttccttcctatggaaaactcaaaagctgagtctctgggaggcaccacgcggccagaacatgcttgacggaggcgcccctttctatacaacctacagaaccgctgatggggaatttatggccgtgggggcgatcgagccccaattttacgagctcttaataaaggggttaggccttaagtccgatgaactgccaaaccagatgtctatggatgattggcccgagatgaaaaagaaattcgcagatgtctttgctgagaagacaaaggcagagtggtgccagatttttgatgggacggacgcctgtgtcacccctgttctcacctttgaagaggtggttcaccacgatcacaacaaggaaaggggttctttcatcacgagcgaagagcaggatgtgtcacccagacccgctccactcctgctgaatactcctgctatccccagcttcaaaagggacccattcattggggagcatacggaggagattcttgaagagtttggattctcccgggaggagatttaccaattgaatagcgataagatcatagagtctaacaaggtgaaagcatctctc

SEQ ID NO: 179335 - DNA, 1146 bp, Artificial Sequence
  derived and/or modified sequence
atggccctacagggcataagcgttgtggaactcagcggcttggctcccgggccattttgtgccatggtgttggcggattttggcgctcgagtggtgagggtggacaggcctggttctcggtatgatgtctcccgcctgggccgcgggaagaggagccttgttctggacctgaagcagccaaggggcgctgccgtattgagacggctgtgcaagcgcagtgatgttctgctggagccctttcgaagaggggtcatggagaaactacagctgggccccgagattttgcagagggagaacccccgcctcatctacgctcgactgtctggattcggccagagcgggtccttttgtaggctggctggccatgacataaattatctcgcacttagcggagttcttagtaagatcggcaggtctggcgagaatccatatgcccccctgaatctcctggctgattttgccggcggaggcctgatgtgcgcactgggaatcatcatggccctatttgacaggacaaggaccgggaaggggcaggtgatcgatgctaatatggttgagggaactgcctatctgagctctttcctctggaagacccagaaactgtccctttgggaagctccacgagggcagaacatgcttgatggcggcgcacccttttataccacttatcgtaccgctgacggcgagtttatggcagttggcgctatcgagccccagttctatgagctattgatcaagggattgggactcaaaagcgatgaactccctaaccagatgagcatggatgattggccagagatgaagaaaaagttcgcagatgtctttgccgagaagacaaaggcagagtggtgccagattttcgacggaaccgatgcttgtgtaactcccgtgctgacattcgaggaggtcgtccaccatgatcataataaagaacggggttctttcattacttcagaggagcaggatgtaagccctcggccggctcctctgttactgaatactcccgcaattccatctttcaagcgtgacccgtttattggcgaacacaccgaagaaatcctggaggaatttggtttcagccgggaggagatatatcagctgaactctgacaaaattattgagtcaaataaggtgaaagcaagcctc

SEQ ID NO: 179336 - DNA, 1146 bp, Artificial Sequence
  derived and/or modified sequence
atggcgttgcaaggcatttcagtggtagaactgagtggtctggcaccagggccgttttgtgccatggtcttagcggattttggggctcgcgttgtgcgtgtggatcgcccaggctctaggtatgacgtctcgcggttgggacgtgggaagcgcagtcttgtactggatctcaaacagcccaggggagcagcggtgctgcgccggttgtgtaaacgctcagacgtgcttctggaaccgttccggcgaggtgttatggaaaagctgcaactgggaccagagattcttcaaagagaaaatccaagattaatttacgcgcggttgagcggctttggtcagtcaggcagtttttgccgtcttgcaggtcatgatatcaattaccttgcgttgagcggcgtactttccaaaataggccgaagtggggagaatccgtatgcaccgcttaatttactggctgattttgccggagggggtttgatgtgcgctcttggcattatcatggcactattcgatcggacaaggactggcaagggacaggtcattgatgccaacatggtagaaggcactgcgtatctgagttcttttttatggaaaacgcaaaaattatcattatgggaagccccgcgtggtcaaaacatgcttgatggaggcgcgcctttttatacgacttatcggactgccgatggcgaatttatggcagtcggtgcgatcgagcctcagttttacgaattgttaattaaaggccttggacttaaatctgacgagctccctaatcagatgagcatggatgattggccggaaatgaagaaaaaatttgcagatgtgtttgcagaaaaaacgaaagcagagtggtgccagatttttgatggcacggatgcctgtgtaacgccggtgctgacgttcgaggaagtcgtacatcatgatcataataaagaacgtggtagttttatcacgagtgaagaacaagacgtatcaccccgaccggctccactactgcttaacacgcctgcgatcccgtcctttaaacgggatccgttcataggagagcatacggaagagattcttgaagaatttggcttttcacgtgaagaaatttaccaattaaattcagacaaaattattgagtcaaacaaagtaaaggcgagtctg

SEQ ID NO: 179337 - DNA, 1146 bp, Artificial Sequence
  derived and/or modified sequence
atggcgcttcagggtatttcagttgtggaattaagcggcctagcccctggtcctttttgtgccatggtacttgcggattttggagctcgagtggtgagagtagatcgacccggttctcgctacgacgtgtcacggttaggccggggcaaacgtagcttagtcttggatctgaagcagccaagaggcgcagctgtccttcgacggttatgtaaacgcagcgatgtactgctggaaccttttcgtaggggagtgatggaaaaacttcagcttggtcctgaaattttgcaaagagagaatccgcgcttaatttatgctaggttgtctggttttggacagtcaggcagcttttgcagacttgccggacatgacatcaattatctggcgttgtctggagttcttagtaaaatcggccggtctggcgaaaatccgtacgctccgttaaatctcctggccgatttcgcggggggtggattgatgtgtgcgctgggcatcattatggcgttgtttgaccgtacaagaacgggtaaaggccaggtgattgacgcgaatatggttgagggaacagcttatctgtcttcatttctttggaaaacgcaaaaattgtctctgtgggaagcgccgagaggccaaaatatgcttgatggtggggctcccttttacacgacatatcgtacagcggacggcgaatttatggcggtgggcgcgattgaaccgcagttttacgagcttcttattaaaggactgggccttaaatcagatgaactgccgaatcagatgtccatggacgattggcctgaaatgaagaagaaatttgcggatgtttttgccgaaaaaacaaaggcagaatggtgccaaatctttgacggaaccgatgcatgcgtcacgccggttcttacctttgaggaagtagtacaccacgaccataacaaggaacgcggttcttttatcacgtctgaagagcaggatgttagcccgcgtccggctccccttctattgaatacaccggccataccgtcattcaaacgcgaccccttcatcggggaacatacggaagaaattttggaagaatttggattttcaagggaagaaatctatcaattgaattcagacaaaatcattgaatcgaataaagtgaaagcaagctta

SEQ ID NO: 179338 - DNA, 1146 bp, Artificial Sequence
  derived and/or modified sequence
atggctctgcaggggatctctgttgttgaactgtccggactggcccctggtccattttgcgccatggttctcgctgattttggcgcccgagtggtgagagtcgatagaccagggagtaggtatgacgtgtctcgcctgggcagagggaagcgttccctcgtgctagatttgaagcagcctaggggcgctgccgtgctgaggcgactgtgcaagaggtctgacgtactgctggaacccttcagacgcggcgtcatggaaaagttgcagctcggccctgagattctccaacgggagaaccccagactaatatatgcccggctaagcggattcggccaatctggttccttctgccgactggccggtcatgatataaattatttagctctgtctggagttctgtccaaaatcggcagatctggcgagaacccttatgccccactcaacctgctggctgactttgctggcggcgggttaatgtgcgcattaggcatcatcatggctctgtttgatcgtaccaggactggcaaaggtcaggtgattgacgccaacatggtcgaggggaccgcctacctatctagctttctgtggaagacacagaaactatccctctgggaagctccaaggggtcaaaacatgctggacggtggggctcctttttacaccacataccggaccgccgacggagaattcatggcagtgggcgccatcgaacctcagttttatgaattactaataaagggcttaggtctgaagtccgatgagctacccaatcaaatgtccatggatgactggcccgagatgaagaagaaattcgctgatgtgtttgctgaaaagacaaaagccgagtggtgccaaatctttgatggtaccgatgcctgcgtgactcctgtccttaccttcgaagaggtagtgcaccatgatcacaacaaggagaggggctcctttataacttcagaagaacaagacgtgtctcccaggccagcccctctgctgctgaacactccagccatccccagcttcaaacgtgacccattcatcggggagcacactgaagagattctagaggagttcggctttagtagagaggagatataccaactgaactcagataagataattgaatccaacaaggtgaaggcctccctg

SEQ ID NO: 179339 - DNA, 1146 bp, Artificial Sequence
  derived and/or modified sequence
atggcgcttcaaggaatatccgtcgtcgagctttcaggactggcacctggtcctttttgtgcaatggtccttgcggatttcggggcaagagtggtgcgggtcgatcggcctggctccagatacgatgtgtcgcgtctcgggcgtggcaaaagatccttggtgctggacctgaagcaaccgcggggggcagcggtgcttagacgcctgtgtaaacggtcagatgtccttctggagccatttcggcggggtgtgatggaaaagctccaactgggacctgaaattctgcagagagaaaacccacgcctgatctacgcgcgcctttccggtttcggacaaagcggtagcttctgtcgactggcaggccacgatatcaattaccttgcactgtcaggagtgcttagcaaaattggccgatcgggagagaacccctacgcccctcttaaccttctggcagattttgccggtggaggactgatgtgcgccctcggcatcattatggctctttttgatagaaccaggacggggaagggccaagtgattgacgcaaatatggtggaaggcaccgcatacctttcttcctttctctggaaaacccagaaactcagcctgtgggaagcaccacgcggacagaacatgcttgatggaggtgccccattttacaccacttaccggactgcagacggagaattcatggctgtgggcgccattgagccccaattctacgaactgttgatcaagggactgggtcttaagagcgatgaactgcccaaccaaatgtccatggatgattggcctgaaatgaagaagaaatttgcagatgtctttgcagaaaagactaaagccgagtggtgtcagatttttgatggtacggatgcatgcgtgactcctgtcctgaccttcgaggaggtggtccaccacgaccataacaaggaacgggggagcttcattacctccgaagaacaagacgtctccccccgacccgccccccttctgctgaacactcctgccataccatcgtttaaacgtgatccgtttataggtgaacataccgaagaaattctggaagaatttggcttctccagggaagagatttatcagttgaactcggataagattatagaatcaaacaaggtgaaggccagcttg

SEQ ID NO: 179340 - DNA, 1146 bp, Artificial Sequence
  derived and/or modified sequence
atggccctgcagggaatctcagtcgtggagttgtccggtctcgcccccggtccattttgcgccatggtactggctgatttcggtgctcgcgtggtcagggtagatagacctggaagccgctatgacgtatctcgattgggcaggggtaagcggagcctcgtgctggacctcaagcaaccgcgaggtgctgcggtgctcagacggttgtgcaaaaggagcgatgtgttgcttgagccatttcggcgcggtgtgatggagaagctccagcttggcccagaaatcctgcagagggaaaatccgaggctgatttatgctcgactgagtggatttggccagtctgggtctttctgtcggttggcaggtcatgacattaattatctcgcactgtctggagtactcagtaaaatagggcggtctggagagaacccttatgcacccctgaatcttctggcggatttcgccggaggagggttgatgtgtgccttgggaatcataatggccctgtttgacaggacccggacaggaaagggccaagtcatagatgctaacatggtcgagggcaccgcctacctctcctcttttttgtggaaaacccagaaactctcactgtgggaagccccacgcggccaaaacatgctcgatgggggagcaccgttttataccacttacaggactgccgatggagaattcatggcagtgggtgcaatcgagccacaattttatgaattgctcatcaaaggcctcggcctgaagtcagatgagctgccgaatcagatgagcatggacgattggccagagatgaagaaaaagttcgctgacgttttcgctgagaagactaaggccgaatggtgtcagatattcgacggcaccgacgcttgcgttacccccgtgctcacattcgaggaggtagtgcaccatgaccataacaaggaaagaggctcctttatcacctccgaggagcaagatgtcagccctcgccctgcaccgcttctgcttaacactcctgcaatccccagctttaaaagggacccctttatcggtgagcacactgaggagattctggaggagtttggattcagccgcgaagagatctaccagctgaactcagacaagattattgaaagcaataaggtgaaagcaagcctc

SEQ ID NO: 179341 - DNA, 1146 bp, Artificial Sequence
  derived and/or modified sequence
atggccttgcaggggatatctgtggtggagctctccggtctggcgcccgggccgttctgcgcgatggtcctggctgactttggggctagggtggtgcgggtcgataggccgggctctcggtatgacgtttctcgactgggcagggggaagcgatccttggtgctagacctgaagcaaccccggggggcagctgtactgcgcagactgtgcaagcgcagcgatgtgctgcttgagccattccggcgtggggtcatggaaaagctgcagctgggacccgaaatactccagagggagaacccccgattgatctacgctagattgagcggattcggacagagcgggtctttctgccgcttggccggacacgacatcaattatctggctctctcaggcgtcctgtccaagattgggagatccggtgagaacccttacgctcccttgaatctgttagccgatttcgccggcggcgggctgatgtgcgctttgggtatcatcatggctctgttcgacagaacacgcaccgggaaggggcaggttattgacgctaatatggtggagggaacagcctacctcagttcctttttgtggaaaacccagaagcttagtctgtgggaagccccccgaggccagaatatgctggatggcggggcacccttttacaccacctaccgcaccgccgatggagagtttatggccgtcggagcaatagaaccccagttttatgagttgctcattaaggggctgggactgaagtccgacgagctgcctaatcaaatgtctatggatgactggccagaaatgaaaaaaaagttcgctgacgtctttgctgaaaagacaaaggccgagtggtgccagattttcgatggcacagacgcgtgtgttacgcccgtcctgacgttcgaggaagtagtgcaccatgaccataataaggagcgcggttcctttataacgagcgaggagcaggacgtgagcccaagaccggcaccactcctgctgaataccccagccatcccgtcatttaagcgcgatccatttataggagaacatactgaagagattctcgaggagtttggcttttcacgagaagagatataccagctgaatagtgacaagatcattgaatccaacaaagtcaaagcctcgctg

SEQ ID NO: 179342 - DNA, 1146 bp, Artificial Sequence
  derived and/or modified sequence
atggctttgcaaggtatcagcgtcgtggaactttcgggactggctccgggacccttctgtgctatggtacttgcggacttcggcgcgagggtggtgcgcgtcgaccgtcccggttcccggtacgatgtgagcagactgggacgaggaaagagaagcttggttttggacttgaaacagccgcgtggtgctgctgtgttacgacggttgtgtaaacgttcagacgtcctgctggagcccttccgccggggcgtcatggaaaagctccagctgggtccggaaatcctgcagcgcgagaacccgcgtctgatctatgcccgactgtcaggattcggccaatccggatctttctgccgcttggccgggcatgatataaactacctggcgctttcgggtgtgctgagcaaaatcggtcgctccggagaaaacccctacgcgccgctaaatctgctggccgatttcgccggtggcgggctgatgtgcgctttagggatcattatggcgctattcgatcgcacccggacgggaaagggccaagtcatcgatgcaaacatggtggagggcacggcctatctgagctccttcctctggaagacacaaaagctctctctatgggaggctccacgcggtcagaatatgcttgacggaggcgccccgttctatactacgtatcgaacggcggatggcgagttcatggccgtgggcgccattgaaccgcaattttacgagctgctgataaagggtttgggattgaagtccgatgagttgcccaaccagatgagcatggatgattggcccgagatgaagaagaagtttgcagatgtgttcgcagagaagactaaggcagagtggtgccagatcttcgatggcactgatgcctgcgtgacgccggtgttgacctttgaggaagtagttcaccacgatcacaacaaagagcgaggatccttcattaccagtgaggagcaggatgtgtccccacgccctgcacctctgctgctgaacacaccagctattccctcgttcaaacgtgatccatttatcggagagcacacggaagagatactggaagagtttgggttctcgcgtgaggagatctaccagctgaactcggacaagataatcgaatcgaacaaggttaaggcttcgctg

SEQ ID NO: 179343 - DNA, 1146 bp, Artificial Sequence
  derived and/or modified sequence
atggccctgcagggtatcagcgtggtggaactgtcaggtttagccccaggccccttctgtgcaatggttctagccgacttcggggcccgcgttgtgcgtgtagaccggcccgggagccgctacgatgtatcccgactagggcgcggaaaaaggagccttgtgcttgacctcaagcagccccggggcgcagctgtgttaagacgcctctgcaagaggtctgatgtgctgttagagccattccgccggggggtgatggagaaactgcagcttggcccagaaattctgcaacgagagaacccacgcctcatatacgctcggctgtcaggctttgggcagtccggttcattctgccggttagctgggcatgacatcaattacctggcactctccggcgtgctctctaagattggacgcagcggagagaacccgtatgcaccccttaatctattggcagacttcgctgggggcggcctcatgtgtgcactggggatcatcatggcactcttcgatagaacgcgcacaggcaagggccaggtcattgacgcaaatatggtcgaaggcaccgcctacttaagttccttcctttggaaaacacagaagctttctctgtgggaagccccccgtggccagaatatgttagacggaggtgcaccgttctataccacctaccggactgctgatggggaatttatggccgtgggggctatcgaacctcagttttatgagttactgattaaagggttgggactgaagagcgacgagttgcccaatcagatgtctatggacgattggcccgaaatgaaaaagaagttcgctgacgtgtttgctgaaaaaactaaagccgagtggtgtcaaatcttcgatgggaccgacgcctgtgtgacgcctgtgctgaccttcgaggaagtcgtgcaccatgaccataataaggagaggggatcctttatcacgtcagaagagcaggacgtctcaccacgccccgcaccccttcttcttaatacgccagctatcccctcattcaaaagggatccctttatcggagagcataccgaggaaatactcgaagagtttggtttttcgcgtgaggaaatctaccagctgaatagtgacaaaattattgagtctaataaagtgaaggcttcacta

SEQ ID NO: 179344 - DNA, 1146 bp, Artificial Sequence
  derived and/or modified sequence
atggccttgcaaggaatctccgtggtggagctgtcgggtctggcgccgggacctttctgtgcgatggtcctggcagacttcggagccagagtggtcagggtcgatcgcccgggcagcagatacgacgtcagccgcttgggtagaggcaagagatcccttgtgcttgatctgaagcagccacgcggggcggcagtgctgcggcggctgtgcaagaggtccgatgttctgctggagcctttccgccggggagtcatggagaaactgcagttgggaccggagatccttcagagagaaaatccgcggttgatctacgcacggctctcagggttcggtcagtcgggcagcttctgtcggctcgctggccatgatatcaactacctggccctgtccggcgtgctctcgaaaatcggccgctcaggcgagaatccgtacgcgccacttaacctgctggcggattttgcgggaggcggactgatgtgcgccctgggcatcatcatggccctgtttgatcggacccggactggaaagggacaggtgatcgacgcgaatatggttgaaggaaccgcctacctgtcgtcctttctctggaaaactcagaagctctcactctgggaggcaccccgcggacaaaacatgcttgatggaggagcgcctttctacactacttaccgcaccgccgacggcgaattcatggccgtgggggctatcgagccacaattctatgagttgcttatcaagggactcgggcttaaatccgacgagctgccaaatcagatgtcaatggacgattggccggagatgaagaaaaagttcgctgatgtgttcgccgagaaaactaaggccgaatggtgtcagatcttcgacgggactgatgcgtgtgtcaccccagtgttgacgtttgaagaggtggtgcatcacgaccacaacaaggaaagaggtagcttcattaccagcgaagaacaggacgtctcgccgcgcccggcgcctctgctgctgaataccccagcgatcccatcattcaagcgggatccctttatcggagaacacaccgaggagatcctcgaggaattcggattctcccgggaggaaatctaccaactgaacagcgacaagattatcgaatccaacaaggtgaaggccagcctg

SEQ ID NO: 179345 - DNA, 1146 bp, Artificial Sequence
  derived and/or modified sequence
atggctttgcaaggcatttctgttgtcgaactctctggcttagctccaggcccattctgcgcaatggtactcgccgatttcggtgctcgtgttgtcagagtggatagacctggttccaggtatgatgtgagtaggttgggaagaggaaaaagatccttagttttggacttaaagcaaccacgaggagctgctgttttgcggagattatgtaagagatctgatgtccttctagagccctttagaaggggtgttatggagaagttgcaacttggccctgaaatcttgcagagggaaaacccacgtttaatttatgccaggctttctggttttggtcagtctggttccttctgtaggcttgctggtcacgacattaattacctggccttatcgggcgttttgtcaaagattggtagatcgggtgagaacccatacgcacctcttaatctcctcgctgacttcgccggagggggacttatgtgtgctcttggcatcatcatggctttgttcgataggactcggacaggaaagggacaggttatcgacgccaacatggtagagggtactgcttacctatcgtcttttctatggaaaacccagaagctgtctctatgggaggctcctaggggtcagaatatgttagacgggggggcgcctttctatacaacctaccgaactgctgatggtgaattcatggcggtcggcgctatagagcctcagttctacgaattgctcataaaaggacttggccttaaatccgatgagcttccgaatcaaatgagtatggatgattggccggaaatgaagaagaaatttgcagatgttttcgctgaaaagacgaaggcagaatggtgccagatattcgatgggacggatgcttgtgtgacgcctgttcttactttcgaggaggtggttcatcacgatcacaataaggagagaggatcctttatcacctctgaggaacaagacgtatctccacggccggcacctttgttgttaaacaccccagctatccctagctttaaacgtgatcctttcattggagaacatactgaggagatcctggaagaatttggtttctcaagagaagaaatctaccagctaaattctgataaaattatagaatctaataaggtcaaggctagcttg

SEQ ID NO: 179346 - DNA, 1146 bp, Artificial Sequence
  derived and/or modified sequence
atggcccttcagggtatttcagtagtcgaactgtccggactggcacctggtccattttgcgcaatggtgctcgcggactttggagcgcgggtggtgagagtcgaccgcccaggatcgagatacgatgtgtcgagacttgggagaggaaagagaagcctggtccttgatctgaagcaaccgcgcggcgcagcagtgcttagaaggctgtgtaagcgctcagatgtcctcctggaaccatttagaaggggagttatggagaaactccagttggggccagaaatcctccagagggagaacccgcgactcatatatgcacggctctctggttttggacagagcggatccttttgtcggcttgcagggcatgacatcaactacctggcgctgtcgggtgtcctttcgaagatcggacgctccggcgaaaacccatacgcgcctcttaaccttctcgctgattttgcagggggaggacttatgtgtgcactggggattatcatggcactgtttgatcgcacccgaaccggaaaagggcaggtgatcgatgccaatatggtggagggaactgcatacctcagcagctttctctggaaaactcagaagctgagcctttgggaagctccccgggggcagaacatgcttgatggtggcgcgccattctacaccacttaccgtaccgccgatggagaattcatggcagtgggtgcaattgaacctcaattctacgagctgctcataaaaggtctgggactcaaatcagacgaattgccaaatcaaatgtccatggacgactggcctgaaatgaaaaagaagttcgccgatgtgtttgcagagaaaactaaagcagaatggtgccagatctttgatggcacggatgcatgtgtgactcctgtgctcacttttgaagaagtggtccatcacgatcataacaaagaacgcggttcgttcataacctccgaggaacaggacgtgagccctagacccgcccccttgctgctgaacactcccgccattccttcctttaaacgagatccttttatcggtgaacacaccgaggaaatactggaagaatttgggttctcgagggaagagatctaccagctcaactccgacaaaatcattgaatcaaacaaagtgaaagcctcgctt

SEQ ID NO: 179347 - DNA, 1146 bp, Artificial Sequence
  derived and/or modified sequence
atggctttgcaaggcatctctgttgtggagctttcgggcctggctccgggtcccttctgcgcgatggtcctagccgatttcggtgcgcgcgttgtacgcgtcgaccggccaggcagccgctacgacgtgtcacgcttgggcagaggcaaacggtcgctagtgctggacctgaagcaaccgcgcggagcagctgtattgcgcagactctgcaagcgctccgatgtgctgctcgaaccgtttcgtcgaggtgtcatggagaagttgcaacttggccctgagattctgcagcgcgagaatccgcgtctgatttatgctcgcctatcggggtttggtcaatccggatccttttgtcgattagccggtcacgatattaattatctggccctttccggggtgctatcgaaaatcggacgaagcggagaaaacccgtacgcgccgttgaatctgctcgccgacttcgcgggtggtggactgatgtgcgcgctgggcatcatcatggcactgttcgaccggacgaggacaggtaaaggccaggtgatcgatgcgaacatggtggagggcacggcatatctgtcctccttcctgtggaagacccaaaagctaagtctgtgggaggccccgcgaggacagaacatgttggacggcggtgcccccttctacactacttataggacagcggatggtgagtttatggccgtcggcgccattgaaccacaattctacgagttgctaattaaaggcctcggtctcaagtcggatgagctgccaaaccagatgagcatggatgactggcccgagatgaagaagaagttcgccgacgttttcgccgagaagaccaaggccgagtggtgccaaatatttgatggcacagacgcctgcgttacaccagtactgacatttgaggaagtggtgcaccatgaccacaataaggagagaggttctttcatcacttccgaggagcaggatgtgtccccccgccctgctcctcttctgttgaacacccccgcaatcccctcgtttaaacgggacccatttataggggagcacaccgaagagatactcgaggagttcggcttctcgcgtgaggagatctatcaactgaattctgacaaaatcatagagagtaataaggtgaaggcctcctta

SEQ ID NO: 179348 - DNA, 1146 bp, Artificial Sequence
  derived and/or modified sequence
atggcgttgcagggtatttccgtagttgagctgtccggtctggctcccggaccgttttgcgcgatggtgctcgccgacttcggtgcccgggtggtgcgcgtggaccggcctggcagtcgctacgacgtttcccgtctcggacgtggtaagaggtcccttgtgttggacttaaaacaaccgagaggcgctgctgtgctgcgccggctctgcaagcgctccgatgtcctgttggaaccgttccggcggggggtgatggagaagctccagctaggccccgagatcctgcagcgcgagaaccccagacttatctacgctcgcttgtcgggcttcggtcagtccggtagcttctgccgtctcgccggtcacgacattaactatctcgcgcttagcggcgtgctgtcgaagatcggtaggtcgggtgagaatccctacgcccctctcaatttgttggcggacttcgcgggtggaggcttaatgtgcgccctcggcatcattatggcactgttcgatcgtacacgcaccggtaagggtcaggtcattgatgccaacatggtggagggaaccgcctacctgtcttctttcctctggaagacccagaagcttagcctatgggaggccccgcgcggccagaatatgcttgacggtggtgctcccttctacactacctaccgcaccgccgacggagagttcatggcggtaggcgccattgagccgcaattctacgaactgctaataaagggcctcggcctgaagtcggatgagctccccaaccagatgagtatggacgattggcctgagatgaagaagaagttcgccgatgtgttcgctgagaagacgaaggccgagtggtgccaaatcttcgacggtaccgacgcatgcgtcactcccgtgttgacattcgaagaggtggtccatcatgatcacaacaaggagaggggctccttcattacctcagaagagcaagacgtcagtccgaggccagctccccttctgctgaacactcctgcaatcccttcctttaaacgcgacccgttcattggtgagcatactgaagagatcctggaggagttcggctttagcagggaagaaatataccagctgaacagtgataagattatcgagtccaacaaggtgaaggcctcgctg

SEQ ID NO: 179349 - DNA, 1146 bp, Artificial Sequence
  derived and/or modified sequence
atggctctgcagggaatcagtgtagtggaattatccgggctggcgccaggtcccttctgcgcaatggtgctggcggatttcggcgcgagggttgtgcgggtcgatcgaccggggtctcgctacgacgtgtcgagactgggcagaggcaaacgctccctggtgctggatttgaagcagccaaggggggctgccgtcctgaggagactgtgtaagcgctccgacgtcctcctcgagccctttagacgcggagtcatggaaaagttacagctcgggcctgaaatactccagcgggagaatccgagactgatttacgctaggttatccgggttcggccagtcaggtagtttttgccgcctggccggccacgacatcaactacctcgctctgtccggcgtgctatcaaaaatcggaagatccggtgagaacccctacgcccccctgaacctcctggccgattttgctggaggagggctaatgtgtgccctgggtatcattatggctctgttcgacagaacccgcacagggaaaggccaggtgatcgatgccaatatggtggagggaacagcctacctgagttcttttctgtggaagacccagaaactgtctctgtgggaggctcccaggggccagaatatgcttgacggcggagcgccgttctacaccacttacagaacagcagacggggagtttatggccgtcggagccatagaaccccagttctacgagctgctgatcaaggggctcggacttaagtcagatgagctacctaatcagatgagcatggatgactggcccgaaatgaagaagaaattcgcagatgtcttcgctgaaaagaccaaagccgagtggtgccagatattcgatggcacggatgcttgtgttaccccagtactgacgtttgaggaagtggtccaccacgatcacaataaagaacgggggagctttatcacttcagaggaacaggacgtctccccaagacccgcccccctcctgcttaataccccagccattccctcttttaaacgcgatcccttcatcggcgagcacacagaagagatactggaagagttcggattctcaagagaggagatttatcaactgaatagtgacaaaataatcgagagcaacaaagtcaaagccagcctc

SEQ ID NO: 179350 - DNA, 1146 bp, Artificial Sequence
  derived and/or modified sequence
atggccctccaggggatcagtgttgtcgagctgtccggtctggccccaggcccgttctgtgcaatggtattggccgatttcggagcaagagtcgtgcgtgttgatcggcctggaagccgctacgacgtgagccgcctcggcagagggaagcgttccctcgttttggacctcaaacagcctagaggcgccgctgtcctgcggcggctgtgcaaacggtcagacgtcttgctcgagccttttcggcgaggggtgatggagaagctccagctgggccccgagattctgcagcgagaaaaccctagactcatatacgccaggctgagcgggttcggccaatctgggtcattttgtaggctggcgggacatgatattaactatcttgcactctccggcgtgttgagcaagatcgggcggagcggcgagaatccttatgccccactcaacctgttggctgattttgctggcggaggcttgatgtgcgccctcgggatcatcatggctctgttcgaccggacaaggaccggcaaaggccaggtcatagacgcgaacatggtcgaaggcaccgcgtatctgtcatccttcctgtggaaaacccaaaaactgagcctgtgggaggccccaagagggcagaacatgctggatggcggagctcccttctacaccacttaccggacagcagacggtgagttcatggctgtgggcgccatcgaaccgcaattctatgaattgctgatcaagggcctgggcctgaaatcagatgaattgcctaaccagatgagtatggacgattggcctgagatgaagaagaagtttgccgatgtcttcgccgagaagaccaaagctgagtggtgtcagatcttcgacggaactgacgcttgtgtaacccctgtactgacttttgaagaagtcgtgcatcatgatcataataaagaaagaggttccttcattaccagtgaggagcaggatgtgtccccccgacctgcaccactcctcctgaatacccccgcaatcccatcattcaagagagatccatttatcggcgagcatactgaggaaattctggaagagttcggattttctagagaggagatataccaactcaattcagataaaatcatcgaatccaataaggtgaaggcctcattg

SEQ ID NO: 179351 - DNA, 1146 bp, Artificial Sequence
  derived and/or modified sequence
atggctctccaggggatcagcgtggttgagttgagcggtttggcccctggaccattctgcgccatggtactggcagatttcggagccagggtcgtgcgggtcgatagacctggatctcgctacgatgtgtccaggctggggcgcgggaagaggtcgctggtgctggatctcaagcaaccaagaggagccgcggtgctcagacggctttgcaagcgctccgatgtcctgctggaaccgtttaggcgcggcgtcatggaaaagctccaactgggcccggaaatcctgcaacgcgaaaatccccggctgatttacgcccggctctccggattcggacagtcaggaagtttctgcagattggcgggacatgacattaactacctcgctctttcgggagtcctcagtaagatcggtcgaagtggggagaacccttacgctcctctgaatctgctggccgactttgcgggaggaggcctcatgtgcgcactcggcattatcatggcactgtttgacaggaccaggaccggcaaagggcaagtgatcgacgctaacatggtggagggcaccgcatatttgtcctcctttctgtggaaaactcagaagctctccctgtgggaggcaccgcgcgggcagaacatgttggacggaggagcgccgttctacactacgtaccgcactgcggacggcgagtttatggccgtgggcgccatcgaaccgcagttctacgagctcttgattaagggtttgggacttaaatcggacgaactgccgaaccaaatgagcatggatgattggccagagatgaagaagaagttcgcagacgtctttgctgaaaagaccaaagcggaatggtgtcagatcttcgatggcacggacgcctgtgttaccccagtgctgactttcgaggaagtggttcatcacgaccataacaaggaacgggggagcttcattacttcggaggaacaggacgtgtcgccgcggcccgccccactgctgttgaacactcccgcgatcccttcgttcaagcgcgacccattcatcggagagcatactgaagaaatcctggaggaattcggattcagccgggaagagatctaccagcttaatagcgacaaaatcatcgaatcgaataaagtgaaagcaagcctg

SEQ ID NO: 179352 - DNA, 1146 bp, Artificial Sequence
  derived and/or modified sequence
atggccctacagggaatctcagtggtcgaactgtctggtctggcccctggaccattctgcgctatggtgctcgcggactttggcgcacgcgtggtacgggtggatcgccctgggtctagatacgacgtgtcaaggctgggaaggggcaaaaggagtctggtgctggacttgaaacaaccgcggggcgctgcggtcctccgtcgtctgtgcaagagatccgacgttttgctggagccattccgtagaggagttatggaaaagctccagttaggaccagaaatcctgcagagggagaacccgaggctcatctatgctcgcctatccggattcggacaatcaggtagtttctgccgactggctgggcacgatattaactatctggccctgagcggcgtattgagtaaaatcgggcggtcaggcgaaaacccatatgccccactgaatttgctggctgacttcgctggcggcggcctgatgtgtgcgctcggaataattatggccctgtttgacaggacacgtacaggtaaaggacaggtgatcgacgctaatatggtcgaagggactgcgtatctgtcttctttcctatggaaaacacagaaactgagtctctgggaggcccctaggggccagaacatgttggacggcggcgcccctttctacaccacctatagaacagcagacggagagttcatggcagtgggcgctatcgagccccagttttacgagcttctaatcaaagggctgggcctgaagagcgacgagttaccaaaccaaatgagtatggacgactggccggaaatgaaaaagaagttcgcagatgtgtttgctgaaaagaccaaggcggagtggtgtcaaattttcgacggcaccgatgcatgcgttacccccgtgctcaccttcgaagaagtggtgcatcacgaccacaacaaggagcgcggcagctttatcacctcagaggagcaggacgtttctcctcggcctgctcctcttctgttgaatactcccgctatccctagtttcaagagagacccgttcattggcgagcacactgaggaaattcttgaggagttcggtttcagtagggaggagatctaccagcttaactcagataagatcatcgagtccaataaagttaaggccagttta

SEQ ID NO: 179353 - DNA, 1146 bp, Artificial Sequence
  derived and/or modified sequence
atggcccttcagggaataagtgttgttgaactttctggactggcgcccggcccattttgtgcaatggtgctggcagactttggggccagagtagtgcgagtcgataggcccggatctcgctatgatgtcagtcgtctgggcaggggaaaaagatccctggtactggacctgaagcagccccggggagcggcggtcctccgcaggctgtgcaagcggtctgatgtcctgctagaacctttccgacggggtgttatggagaaattgcagctagggccagaaatcctccaacgagagaatccccgcctgatttacgctaggcttagtggattcggacagagcggttctttctgtcgtctcgccggacatgatatcaattatttagctctgtctggcgtgctgagcaagatcggacgatctggggagaatccttatgctccgttgaacctgttggcggatttcgccggcggcgggctgatgtgtgcactagggattattatggcactgttcgacaggacacgcactggaaagggccaggtgatcgatgcaaacatggtagagggtacagcctacctctcaagctttctatggaaaacccagaagctttccctttgggaggctccacgagggcaaaatatgctcgatggcggggctccattctatactacataccggacagctgacggtgaatttatggccgtgggcgccatcgagcctcaattctatgaactactgatcaagggactcgggctgaaaagcgatgaactgcctaatcagatgtccatggacgattggcctgaaatgaaaaaaaagttcgccgacgtgtttgccgagaaaacaaaggccgaatggtgtcagatttttgatgggactgatgcctgcgtcacgcctgtccttacctttgaagaagtggtgcatcacgatcacaacaaggaaagaggttctttcatcacctccgaggagcaggacgtctccccccgaccagcaccacttctgttaaatacccccgctatccctagttttaaacgagatccattcatcggggaacatacagaggagatcttggaggaatttgggttttctagggaggagatttaccaacttaactccgataagattattgaatcgaacaaggtaaaggcgtctctg

SEQ ID NO: 179354 - DNA, 1146 bp, Artificial Sequence
  derived and/or modified sequence
atggcgctgcagggcatctccgtcgtcgaattgtcggggctggctcccggcccgttctgcgcaatggtgctcgctgattttggcgccagagtggtgcgcgtggaccgcccgggttcccgctacgacgtgtcgaggcttggacgaggtaagcggtccctcgtcttggacctcaaacagcccagaggagctgcggtgctgcgccggctctgcaagcggtccgatgtgctcctcgaaccgttccgccgcggagtcatggagaaactgcaactgggccctgaaatccttcaacgggaaaatccacgcttgatctacgcaaggctctccggatttggtcagtcgggtagcttttgtcgacttgccggacacgacatcaattacctcgcacttagcggagtgctgagcaagatcggaagatcgggagagaatccatacgcccctctgaacttgctggccgatttcgctggcggtggactgatgtgcgcgctcggaatcatcatggcgctgtttgaccggactaggactggaaagggccaggtcattgacgccaacatggtggaaggcactgcctacttgtcgtcctttctgtggaaaacgcaaaagctgtccttgtgggaagccccgaggggacaaaacatgttggacggcggagcaccattttacaccacctaccggactgccgacggggaattcatggcagtcggcgcaatcgagccacagttctacgagcttctcattaagggactgggcctcaagtcagacgaactcccgaatcaaatgtcgatggatgattggccggagatgaagaagaagttcgcagacgtgttcgccgagaaaaccaaggctgagtggtgtcagatcttcgacggaacggacgcctgcgtcactccggtgctgactttcgaagaagtggtgcatcacgaccacaacaaggagcggggatcattcatcacctccgaagaacaggatgtgtcaccgcgccctgccccactcctgctgaacaccccagcgataccgtcattcaagagggatccctttatcggagagcatacggaggaaatcctcgaggagttcggtttcagcagagaggagatttaccaacttaattccgacaagattatcgagtcgaataaggtcaaggcctcgctc

SEQ ID NO: 179355 - DNA, 1146 bp, Artificial Sequence
  derived and/or modified sequence
atggcactacagggaatttccgtagtggaactcagtgggctcgcgcctgggccattttgcgcgatggtgctggccgatttcggggccagggtggtaagggttgatcgccccggatctcggtatgatgtctctcgactggggagaggaaaaaggtcccttgttttggatcttaaacagcccaggggggccgctgttctgcggagactatgcaagcggagtgatgttctcctagaacccttcaggcgaggagtgatggaaaaactccagctcggacccgaaattctccagcgcgagaacccccggcttatatatgctcgactttccggatttggacagtccgggtccttctgccggttagccgggcatgacatcaactacctcgccctgagtggagtgctgagtaaaatcggaaggtctggggaaaacccttatgcccctctgaatctattggctgatttcgctggaggagggttaatgtgcgctctggggatcataatggccctttttgatagaactcggacagggaaagggcaggtaatcgatgccaatatggttgaggggactgcttacctttcaagttttctctggaaaactcagaaactttccttatgggaggctccgcgaggacagaatatgctcgacgggggggctcccttttatactacatatcgaacagctgacggggaattcatggccgtgggggctatcgagcctcagttttatgaactcctcataaaaggactgggacttaaatcagatgagttgccgaatcagatgtccatggatgattggccagaaatgaaaaaaaaatttgccgatgtttttgccgagaagacaaaagctgaatggtgtcagatctttgatggaactgacgcctgcgtaactcccgtacttacttttgaggaagtggtgcatcatgatcataacaaagaaagggggtcatttatcacatccgaagaacaggacgtctccccaaggcctgccccccttcttctaaacactcctgccataccttcatttaaacgagatccattcattggagaacatactgaagaaatcctcgaagagttcggattctcaagagaggaaatataccagctaaattccgacaaaattatagaatcgaacaaggttaaagcctctctt

SEQ ID NO: 179356 - DNA, 1146 bp, Artificial Sequence
  derived and/or modified sequence
atggcccttcagggaattagtgttgtggaactgtccggtcttgcccccggaccattctgcgccatggtgttagccgatttcggggctcgcgtggtgagagtggatcgacctgggagcagatatgatgtgagcagattggggcggggcaagcgaagcctggttcttgatctcaaacaaccgcgaggtgctgccgttctcagaagactctgcaaacggagtgatgttctcctggagccgttccgaaggggagtgatggaaaagctgcagttgggccctgaaatactacagcgcgagaaccccagactgatatatgcacgtctgtcaggctttggccagagcggtagcttctgtaggctagcagggcacgacatcaactaccttgcgctgagcggtgtcctatccaagattggtcggagtggcgaaaatccctatgccccactgaacctattagctgattttgccggcggcggcctgatgtgcgcgctgggaattattatggctttgttcgatcgaacccgtaccggaaaaggacaggtaattgacgctaatatggtggagggaaccgcatatctaagttcctttctttggaaaacacagaagctcagcctttgggaggcccctagaggccagaatatgttggacgggggcgctccattctatacgacctataggaccgcagacggcgagttcatggcggtgggcgccatcgaaccccagttttatgaactgctgattaaagggctcggattgaagtccgacgagctgcctaatcagatgagcatggatgattggcctgagatgaagaaaaaatttgctgacgttttcgctgagaaaactaaggcagaatggtgccaaatctttgatggtacagacgcatgtgtgacccctgtcctgacttttgaggaggtggtccatcacgaccacaataaagagagaggcagtttcataaccagcgaggagcaggacgtaagcccgcgacccgctcctctgttgctaaatacccccgccatcccttctttcaaacgggatcccttcatcggggagcatacagaggaaatccttgaggaatttggtttcagtcgtgaggagatataccagctcaactcagacaagatcatcgagtccaataaagttaaggcgtccctc

SEQ ID NO: 179357 - DNA, 1146 bp, Artificial Sequence
  derived and/or modified sequence
atggcgctgcagggcattagcgtggtagaactttctggtcttgcccccggtccgttttgcgccatggtgctcgctgactttggagctagagtggtcagggtggatcgcccaggctccagatatgacgtgtctagactcggaaggggcaagcgctctctggtcctggatcttaagcaacctaggggtgctgctgttctgagacgcctctgcaaaaggtccgacgttctcctcgagccttttcgcaggggcgtgatggaaaagctgcaacttggcccggaaatcttgcagagagaaaaccctagactgatatatgccaggttgtccggattcggacagtccggctccttctgccgcctcgccggccacgacatcaattacctggccctcagtggtgtactttcaaaaatcggtaggtctggtgagaatccctatgccccactgaacctgcttgcggacttcgccggaggaggattgatgtgtgccctcggcataattatggctttgttcgatagaacaaggactggaaaaggccaggtcatagacgctaacatggtcgagggtaccgcttacctgtcatcctttctctggaagacacagaaactctctctttgggaagccccaagaggacagaacatgttggacggtggagctcccttctataccacataccgcacggcggacggcgagttcatggccgtgggtgcaattgaacctcaattctacgagcttctgattaagggccttggactcaaatccgatgaactcccgaaccaaatgtccatggatgactggcctgagatgaagaagaagttcgccgatgtgtttgccgaaaaaactaaagcagaatggtgccagatttttgacggaacggatgcatgtgtgactcccgtcctcacgtttgaggaagtcgttcaccatgaccacaacaaggagcgcggaagcttcatcacttctgaggagcaggacgtgagtccccgcccggctcctctgctcctcaatacccccgccatcccttccttcaaaagggatccctttatcggagagcatacagaagaaatactggaagagtttggttttagcagagaggaaatctatcaactcaatagcgataaaatcatcgagtcaaacaaggtgaaagctagcctc

SEQ ID NO: 179358 - DNA, 1146 bp, Artificial Sequence
  derived and/or modified sequence
atggccctgcagggtatatccgtagtcgagctctccgggctggcaccgggccctttttgtgccatggtactcgcagacttcggcgcaagggtcgtgcgagtcgaccggccgggcagccggtatgatgtgtcacgcctggggagaggaaagagatccctggtcctcgacttaaagcagccccggggcgccgccgtcctccgcaggctttgcaagcgcagtgacgtgttactggaacctttcaggcgaggagtgatggaaaaactgcagttaggccccgagatcttgcaaagagaaaaccccaggctgatttatgcccggcttagtggttttggtcagagtggaagcttttgtagactggccgggcacgacattaattacctcgccctctcgggcgtgcttagcaaaattggcaggtctggagaaaacccatatgcccccctaaatctcctcgctgactttgctggcggagggctgatgtgcgccctcggaatcatcatggccttgttcgaccgcacccggaccggcaaagggcaggtcattgacgccaatatggtagagggaaccgcttacctgtcgtctttcctgtggaaaactcaaaagctctccctgtgggaggctccacgcggacagaacatgctggacgggggggcgccattttatacaacatacaggaccgcagacggcgaatttatggctgtgggtgctattgaaccccagttctatgaacttctgatcaagggtctgggcctgaaaagcgacgaactccccaaccagatgagcatggacgattggccagagatgaaaaaaaaattcgccgacgtattcgccgaaaaaacaaaggcagagtggtgccagatttttgacgggaccgatgcgtgcgtaacacccgtgctcacatttgaggaagtggtgcaccacgaccataataaggagagagggtctttcattacctcagaggagcaggatgtgtcccctcgcccagcacctctgttacttaatactcccgccattccgtcgttcaagagggaccctttcatcggtgagcacactgaggagattctagaggaatttggattctcccgcgaggaaatctaccagctcaactctgacaaaatcatcgagtctaacaaagtcaaagcaagtttg

SEQ ID NO: 179359 - DNA, 1146 bp, Artificial Sequence
  derived and/or modified sequence
atggccctccagggtatatctgtcgtcgagctttctggtctcgcacctggacccttttgtgccatggttcttgctgatttcggtgcaagggtcgtacgcgtggatcgccccgggtccagatacgatgtctcacggctgggccgcggaaaacggtcactcgttttggacctgaagcagccccgaggtgccgccgttctccgccgcctgtgtaaacggtccgatgtgctgctggagccatttcgacggggggtaatggagaaacttcagcttggacctgaaatcctccagagagaaaacccaaggctgatatacgcacggttgtccggattcggacaatcaggatccttttgccgactggcaggacacgacatcaactatttggcactcagtggcgtgctgtccaagattgggcgctcaggcgagaacccctatgcacccttgaatctgctggctgatttcgctggcggaggactgatgtgcgctctgggtatcatcatggctttgtttgatagaaccagaactgggaagggccaagtgattgacgccaatatggtagaaggcaccgcctacctctcctctttcttgtggaaaacccaaaagctttccctgtgggaggcccctcgcggacagaacatgctcgacgggggagcccccttttacactacatacaggaccgcagacggggaattcatggctgtcggggcgatcgaacctcagttctacgaactgcttattaaaggactgggcttgaaaagtgacgagctgcccaaccagatgagtatggatgactggccagaaatgaagaagaagttcgcagacgtcttcgctgagaaaaccaaggccgagtggtgtcagatcttcgatggcactgatgcgtgcgttaccccagtgctgactttcgaggaagtggtgcaccacgaccacaacaaggagcgaggctcatttatcacatcagaagagcaggatgtgagtcctaggcccgccccacttcttctgaacacaccggccattccctcctttaagcgcgacccatttatcggcgagcatactgaggaaatactcgaggagtttggcttctcacgagaggagatttaccagctcaactccgataaaatcattgaaagtaataaagttaaagcgtccctg

SEQ ID NO: 179360 - DNA, 1146 bp, Artificial Sequence
  derived and/or modified sequence
atggcccttcaaggtatcagcgtcgtggagctgtcgggactcgcgcccggacctttctgcgctatggtgctggcagacttcggagccagagtggtccgggtggatagacctggatctcgctacgacgtttcgcgcctgggaaggggtaagaggtcgttggtgctggaccttaagcagccgagaggagccgccgtgctccgacggctgtgcaagcgctcggacgtgctgctggaacctttccggcggggagtgatggagaagctgcaactgggtcccgaaatcctgcaacgcgaaaacccgcggctgatttacgcccgcttgtcaggattcgggcaaagcggatcattctgtagactcgccgggcatgatatcaactacctggcactgtccggggtcctctccaagatcggtaggtccggagagaacccgtacgcccccctcaatctcctggcggacttcgctggcggcggcctgatgtgtgcgctgggcattatcatggccttgtttgatcggacccgcactggtaagggccaggtcatcgacgcgaacatggtcgagggcactgcctatctgtcatcctttctttggaaaacgcagaaactgtcactctgggaagctccgcgtggccagaatatgctcgatggaggcgccccgttttacaccacctaccgcactgcagacggagaatttatggcagtgggagcaatcgaacctcagttctacgagctccttattaaggggctggggttgaagagcgacgagctcccaaaccagatgtcgatggacgattggccggaaatgaaaaagaaatttgcggatgtgttcgcggaaaaaaccaaggctgagtggtgccagatcttcgatggaaccgacgcgtgcgtgactccggtgcttaccttcgaggaagtggtccaccatgaccacaacaaggagcggggcagcttcatcacttcggaggagcaagatgtgtcgccacgcccggctccattgctgctcaacaccccagccatcccgtccttcaagcgcgacccattcatcggagaacacacggaggaaattctcgaagagtttggattctcaagagaagaaatctaccagctgaatagtgacaagatcatcgaatccaataaggtcaaagcaagcctg

SEQ ID NO: 179361 - DNA, 1146 bp, Artificial Sequence
  derived and/or modified sequence
atggcgctacaaggtatatcggtagttgaactatcgggtttagcgccgggtccgttttgtgcgatggtattagcggattttggtgcgcgagttgttcgtgtagatcgtccgggttcgcgttatgatgtatcgcgtttaggtcgtggtaaacgttcgttagtattagatttaaaacaaccgcgaggtgcggcggttttacgacgtctatgtaaacgatcggatgttttactagaaccgtttcgtcgtggtgttatggaaaaattacaactaggtccggaaatactacaacgtgaaaatccgcgactaatatatgcgcgtctatcgggttttggtcaatcgggttcgttttgtcgactagcgggtcatgatataaattatttagcgttatcgggtgtactatcgaaaataggtcgttcgggtgaaaatccgtatgcgccgttaaatttactagcggattttgcgggtggtggtctaatgtgtgcgttaggtataataatggcgttatttgatcgaacgcgaacgggtaaaggtcaagtaatagatgcgaatatggtagaaggtacggcgtatctatcgtcgtttctatggaaaacgcaaaaattatcgttatgggaagcgccgcgtggtcaaaatatgttagatggtggtgcgccgttttatacgacgtatcgtacggcggatggtgaatttatggcggtaggtgcgatagaaccgcaattttatgaattactaataaaaggtttaggtttaaaatcggatgaattaccgaatcaaatgtcgatggatgattggccggaaatgaaaaaaaaatttgcggatgtatttgcggaaaaaacgaaagcggaatggtgtcaaatatttgatggtacggatgcgtgtgttacgccggtactaacgtttgaagaagtagttcatcatgatcataataaagaacgaggttcgtttataacgtcggaagaacaagatgtttcgccgcgtccggcgccgttactattaaatacgccggcgataccgtcgtttaaacgagatccgtttataggtgaacatacggaagaaatattagaagaatttggtttttcgcgtgaagaaatatatcaattaaattcggataaaataatagaatcgaataaagtaaaagcgtcgtta

SEQ ID NO: 179362 - DNA, 1146 bp, Artificial Sequence
  derived and/or modified sequence
atggcactccagggcatatccgtggtagagcttagtgggctggcccctggacctttttgtgccatggtcctcgccgattttggagctagggttgtaagggtggatcgtcctggttcaaggtacgacgtgtcccggttaggaagaggaaaacggtccctggtccttgatttgaagcaacccaggggggccgcagtgctcaggaggctttgtaaacgtagcgacgttcttcttgaaccatttcggcggggagtcatggagaaactacagctcgggcccgagatcctgcagcgcgagaacccccgactcatttatgcaagactgtccggattcggccagtcggggagtttttgtcgtttagctgggcacgatataaactatttggcgctatccggcgtgctatcgaagattggacgcagcggagagaatccctatgctcccctcaatttgctggctgacttcgccggaggtggcttgatgtgcgccctgggtatcattatggccttgtttgaccgcacgcgcacaggaaaaggacaggtcatcgacgcaaacatggtggaggggacagcctatctgagcagcttcttatggaaaacccagaaactctctctttgggaagccccccgcgggcagaacatgctggatgggggcgcaccgttctacaccacataccgcaccgcggatggggagtttatggcagtgggagccatcgagcctcagttttatgagctattgatcaagggccttggcttgaagagcgatgaacttcccaaccagatgtccatggatgactggcctgagatgaagaagaaattcgctgacgtgttcgccgagaaaaccaaagctgagtggtgccagattttcgatggcacagatgcctgcgtaacacctgttctgacttttgaagaggtggtccaccatgaccacaacaaggaaaggggctcttttattactagcgaggaacaggacgttagccctcgcccagcaccgttgttactgaatacgcctgcgatcccctccttcaaacgggacccctttatcggagaacatacagaggagatcctcgaggagtttgggttctcacgggaggagatctatcagctgaacagcgacaaaattatcgaaagcaataaggtgaaggcttccttg

SEQ ID NO: 179363 - DNA, 1146 bp, Artificial Sequence
  derived and/or modified sequence
atggctcttcaggggatcagcgtggtggaactcagtgggcttgcccccggacccttttgcgccatggtcttagcagattttggagccagagtggtacgagtcgaccgtcctgggagcaggtacgatgtgagcaggctgggccgggggaagaggagcctcgtcctggatcttaagcaaccccggggagccgccgtattgcgccggctttgtaaaagatctgacgtgttgcttgagccttttaggaggggagtaatggaaaaactgcaactcggccctgagattctccagcgcgagaacccccggttaatctacgccaggctgtctggattcggccaatctggcagcttctgccgtctggccggccacgacatcaactatctggccctgtccggagtgctgtcgaaaatcggcagaagtggagagaacccgtatgcgccattgaatcttctggctgacttcgccgggggcggattaatgtgcgctctggggattataatggctctcttcgataggacgcgaactggtaaagggcaggtgattgacgccaatatggtcgaaggaactgcctacctctcttcattcctttggaagacacagaaactatccctgtgggaggccccccgagggcaaaacatgctggatggcggcgcaccattttacacgacataccgtaccgccgacggtgagtttatggcagttggcgccattgagccacaattctacgaactccttataaaaggacttggcctgaaatctgacgagctgccaaaccagatgagcatggacgactggccagaaatgaagaagaagttcgctgacgtcttcgccgaaaagacaaaggcagagtggtgtcagatatttgatggaactgacgcttgtgtaactcccgtcttgacgttcgaagaggttgtgcatcatgaccataataaagaacgaggctcttttatcacgagcgaggaacaggacgtgagcccaagaccagctccactgttactcaatactccggcgatccccagctttaaacgcgatcccttcattggagaacacactgaggagatcctggaagagttcgggttctccagggaagagatctaccagctgaactctgataagatcatagaaagcaacaaagtcaaggcttctctg

SEQ ID NO: 179364 - DNA, 1146 bp, Artificial Sequence
  derived and/or modified sequence
atggctttacagggcatctccgtggttgagctgtccggtctggcccccggtcccttttgtgcgatggtgttagccgacttcggcgcaagagtagttcgggtggatcgcccaggatcacgctatgacgttagccgtctggggcgaggaaaaaggtcactagttctggatctgaaacagccaaggggggcagccgtgttacggcggctctgtaagcgaagtgacgtcctcctggagccctttcgcaggggtgtgatggaaaaactccagctagggccagaaatcctccagagagaaaaccctcgcctgatctatgccagactgtctggatttgggcagagcggatcattttgtcggctggcggggcatgatatcaactatctggcactgtctggcgtattaagcaagatcggccgtagcggagagaatccgtatgcccctttaaacctactcgccgacttcgccggagggggcctcatgtgcgccttgggcattatcatggccctgttcgaccgcaccagaaccggcaagggccaggtcatcgacgccaatatggtggaaggcacagcttaccttagtagttttctttggaaaactcagaagctctcactttgggaagcccccagaggccagaacatgctggacggcggcgctcctttttataccacgtatcgtaccgccgacggcgagtttatggcagtgggcgccattgagccacagttttatgaattgctaatcaaggggctgggtctgaagtcagatgagctgccgaaccaaatgagtatggatgactggcctgagatgaaaaagaaatttgcagatgtgttcgcggagaaaactaaagccgagtggtgccaaatctttgatggtacggatgcatgcgtgacccccgtactgacttttgaggaggtcgtgcatcatgatcataataaagagcgcggttcgttcatcacgagcgaggagcaggatgtgtcaccgcgtcctgcaccactcctgctgaatacccctgctatccccagctttaagcgagacccttttataggtgagcacaccgaggaaatccttgaagagtttggtttctctcgggaggaaatttatcagctcaattccgataaaattattgagtctaataaagttaaagcttctctg

SEQ ID NO: 179365 - DNA, 1146 bp, Artificial Sequence
  derived and/or modified sequence
atggcactccagggtatctcggtggtcgaactgtcaggccttgcgccgggacccttctgcgcaatggtgctcgcggacttcggagcacgcgtggtgagagtggaccgccctggctcgcgctacgacgtttcccgactgggcagggggaaacgcagccttgtgctggacctgaagcagccgagaggcgctgcagttctgagacggctgtgcaagcggtcagacgtgcttctcgagcccttccgccgcggagttatggaaaaactgcaactgggtcccgagatcctgcaacgggaaaacccgcggctcatctacgcgcgactgtcgggattcggacagtccggatcgttctgccgattggctggacatgacatcaattacttggccctgtccggcgtgctgtcaaagatcggaagatccggtgaaaatccgtacgcgccactcaatctcctcgccgactttgcgggaggcggactcatgtgtgccctgggaatcatcatggcgctttttgacagaacgcgcacgggcaagggacaggtgatcgacgcaaacatggtggaaggcaccgcatacctgtcatccttcctgtggaaaacccaaaaacttagcctctgggaagcgccgcgcggtcagaacatgcttgacggaggtgctcccttttacaccacttacagaactgccgacggagaatttatggctgtgggggctattgagccgcagttctacgaactgctcattaagggactcggtctgaagtcagatgagctccctaaccagatgagcatggatgactggcccgaaatgaagaaaaagttcgcggacgtgtttgcggagaaaaccaaggccgaatggtgccaaattttcgacgggactgacgcgtgtgtcacgccggtgctgacctttgaggaggtggtgcatcacgatcacaataaggaacggggctcgttcatcacgtcagaagagcaagacgtgtcccctcgcccggctccactgcttttgaacaccccagccatcccatccttcaaaagggaccctttcatcggcgaacacacggaagagatcctcgaggaattcggattctctagggaggagatttatcagcttaattcggataagatcatcgagagcaacaaggtgaaggcctccttg

SEQ ID NO: 179366 - DNA, 1146 bp, Artificial Sequence
  derived and/or modified sequence
atggctttgcaaggaatttccgtcgtggaactgtcgggccttgcacctggaccattttgtgctatggtgctggcagacttcggagccagggttgttcgagtggatagaccggggtctagatatgacgtgagccgcctgggacggggtaaacgcagcttagtgctcgacctgaaacagccgcgaggggcagccgtactccgcagactctgcaagagaagcgatgtgttactagagcctttccgcaggggcgttatggagaagcttcagctcggacccgagatactccagcgtgaaaatcctcgcctgatctacgcccggctttcaggattcggccagtctggctccttttgtcgtcttgccggccatgacataaattatctggccttatctggagtgttgtctaaaatcggtcgaagcggagaaaacccttatgcgccactgaacttacttgccgattttgcaggcggcgggctgatgtgtgcactgggcataatcatggcgctctttgaccggacccggaccggaaaaggacaggttatcgatgccaatatggtggagggcaccgcttacctgtcctctttcctgtggaaaacacagaagttaagtttgtgggaagcccctcgcggccagaatatgttggacggcggtgcccctttctacacaacatatagaacagccgatggggagtttatggctgtcggagccatagagccccagttctatgagcttcttatcaaggggctgggccttaagagcgacgagctgcctaatcagatgagcatggacgactggccggaaatgaagaagaagttcgcggatgtgtttgccgagaaaacaaaagctgaatggtgccaaattttcgacgggaccgacgcatgtgtgaccccagttctgacttttgaggaggtcgtgcatcacgaccacaacaaagaacgaggaagcttcattaccagcgaagagcaggatgtgagcccacggcctgcaccgctgcttctaaatacacctgccatcccatcgtttaaacgggaccccttcattggcgaacacaccgaagagatcctagaagaatttgggttcagcagggaggagatataccaactgaattccgataagattatcgagtcaaataaggtgaaagccagcctg

SEQ ID NO: 179367 - DNA, 1146 bp, Artificial Sequence
  derived and/or modified sequence
atggcactgcaggggattagcgtcgtagagctctccgggctcgcacctggtcccttctgtgcaatggtgctcgcagacttcggcgctcgggtggtgcgggtcgaccgccccggttcaagatacgacgtcagccgcctcggtcgcggaaagcggtcacttgtgttggatctgaagcagccaagaggggcggctgtgctgcgaagattgtgtaagcggtcggatgtccttctggagccttttcgtcgaggagtcatggaaaaacttcagttgggacccgaaattctgcaaagggaaaacccgaggctcatctatgcacgcctttccggtttcggacagtcagggtcattttgtagacttgccggacatgacatcaactacctcgccctctccggcgtcttgtcgaaaatcggccgaagcggcgagaatccttacgcaccgctcaacctgctcgccgatttcgcaggcggaggacttatgtgtgcattggggatcataatggcactgtttgacaggacgcgcaccggcaagggacaagtgattgatgccaacatggtggaaggcactgcgtacttgagcagctttctctggaaaactcaaaaactctcattgtgggaagccccaagaggacaaaacatgctggatggcggagcacccttttacactacctacagaactgccgacggtgaattcatggctgtgggcgcaatcgagcctcagttttacgaactgctcataaagggtctggggctgaagtcggacgaactgcctaatcagatgtcaatggacgattggccggaaatgaagaagaagttcgcagacgtgtttgcggagaaaaccaaggctgaatggtgtcaaatcttcgatggaaccgacgcatgcgtgactcctgtccttactttcgaagaagtcgtgcaccacgatcataacaaggaacgcggttcgtttatcacctcggaggaacaggacgtgagcccacgtcctgctcctcttcttctcaacactcctgcaatacccagcttcaaacgtgacccatttatcggagaacacaccgaggagattcttgaagagttcggattttcccgggaggagatctaccagctgaatagcgataagattattgaaagcaacaaagtcaaggcatcactg

SEQ ID NO: 179368 - DNA, 1146 bp, Artificial Sequence
  derived and/or modified sequence
atggcacttcaggggatatccgtcgttgagctgtcaggacttgctccagggccattttgtgcaatggtccttgctgattttggcgcgagggtcgtccgcgtcgatcgacccggttcacggtacgacgtgtctcgcctcggccggggaaaacgaagccttgttctggatttgaaacagccccgcggtgcggctgtgctgaggagattgtgcaaaagaagtgacgtcctcctggagcctttcaggagaggagtaatggagaagcttcagctgggacctgagatccttcagcgggagaaccccaggttgatatacgcacgcctctccggttttggtcagagcggctcattctgccggctcgctggccatgacattaactatttggctctgagtggggtgctgagcaaaattgggcggtccggagagaacccttacgcacctcttaacctgctggcagatttcgctggcgggggtctgatgtgcgcactgggaatcataatggcactgttcgacaggacgaggaccggcaaaggccaagtgatcgatgccaatatggtggagggcaccgcgtacctcagtagttttctgtggaagacccagaaattgagtctgtgggaggccccaaggggccagaatatgttggacggtggagcccctttctacactacttatcgcaccgctgacggggagtttatggcagttggggccattgagccacagttctatgagctgctgatcaaggggttgggactgaaaagtgatgagctccccaaccagatgtccatggacgactggccagagatgaagaaaaagtttgcagatgtgttcgctgaaaagacgaaagctgagtggtgtcagatttttgacggcaccgacgcctgtgtgactcctgtgctgactttcgaagaggttgtgcatcacgatcacaataaggagagaggatctttcattacatcagaggaacaggatgtaagtcctaggccggctccgttgttgctgaacaccccagcgatcccttctttcaagcgcgacccgttcatcggcgaacacacagaggagattctggaggaattcggattctccagggaggagatctatcagcttaattctgacaagataatcgagtcaaacaaggtgaaggccagtctg

SEQ ID NO: 179369 - DNA, 1146 bp, Artificial Sequence
  derived and/or modified sequence
atggcgctacagggaataagtgtcgtggagctctcggggctagcccccggccccttctgcgctatggtgctggcagactttggcgccagagtggtgagggtggacagaccaggaagcaggtacgacgtctcccgcttagggcgcggaaaacgctctctggtgctagatctaaagcagccccgaggagcggcggtgcttaggcgcttgtgtaaacgctccgatgtgctgcttgaaccattccgcagaggtgtgatggagaagctgcagctaggaccagagatcctgcaacgggagaacccacgactcatctacgccaggctgtctggttttgggcaatcggggtccttctgccggttggccgggcacgacatcaattacctcgccctgtccggggtgctgtctaagattggcaggagcggcgagaacccatatgcaccgcttaatttgctggccgattttgctggcggggggttaatgtgcgctttggggattatcatggccctgttcgaccggacccgaactggtaaaggccaagtaattgatgcgaacatggtcgaaggcacagcttacttgtcatcatttttgtggaagactcagaagttgagtctgtgggaggcgcccaggggccagaatatgctggacggcggcgctcccttttacacaacctatcggacggcagatggcgagtttatggcagtgggagctattgaaccgcagttttacgagctcctgatcaaggggcttggcctgaagagcgatgagttgcccaatcagatgtccatggacgattggcctgaaatgaaaaaaaaatttgctgatgtgttcgccgagaaaaccaaggcagagtggtgtcagatctttgatggaactgacgcatgtgtcacaccagtcctgacctttgaagaggtggttcaccacgaccataataaggaaagggggtcgttcatcaccagcgaagaacaagacgtgagcccccggcctgcccctctcttactgaacacccccgcgatcccatccttcaagagagacccattcattggcgagcataccgaggaaatcctcgaagaattcggcttcagccgcgaggaaatttaccagctgaattcagataaaataatcgagagcaataaggtcaaggcttccctg

SEQ ID NO: 179370 - DNA, 1146 bp, Artificial Sequence
  derived and/or modified sequence
atggcgctgcagggaatttcagttgtggagctcagtggacttgcccctggacctttctgtgcaatggttctcgctgatttcggagcgcgggtagttcgtgtggacagaccggggtccaggtatgatgtgagcaggttgggcagggggaaaagatcactggtgctggaccttaagcagccgcgcggcgctgctgtgcttagaagactgtgtaagagatcagacgtattgctggagccattccggagaggcgtgatggaaaagctccagctcggccctgagatactccaacgggagaatccccgccttatttacgcccggttgagtggatttggccagagcggcagcttttgtcgccttgcaggacatgatattaattacctagctttgagcggagtgttgagcaagataggaagaagtggagagaatccttatgccccactgaatctgcttgcagattttgctggcggcggcctgatgtgcgcgctggggattattatggcacttttcgataggacacggacaggtaagggccaagtgatagacgccaatatggtggaagggactgcatacttgagctccttcttatggaaaacccagaaattgtcactgtgggaggcccccagaggtcaaaacatgctggacgggggcgctcccttctacacaacctatcgtactgcagacggggagttcatggccgtcggcgctatagagcctcaattctatgagctgctaatcaagggtctgggccttaaatccgacgagctccctaaccagatgagcatggacgattggccagaaatgaagaagaagttcgccgatgtcttcgcagagaagaccaaggccgagtggtgtcagatatttgacggaactgatgcatgtgtcacacccgtattgacatttgaggaggttgtgcaccatgatcacaataaagagagaggcagtttcatcaccagcgaagagcaagatgtttctccgaggccagcacccctgctgctgaatacccctgcaatccctagttttaagagggacccattcatcggagaacacaccgaggaaattttggaagagttcggattctctcgggaagaaatctatcagttgaacagcgataaaatcatagagagcaataaagtgaaggcctcgctt

SEQ ID NO: 179371 - DNA, 1146 bp, Artificial Sequence
  derived and/or modified sequence
atggccctgcagggtatttctgtggtggaactttcaggacttgctccaggcccattttgcgcaatggttttggcagattttggggcccgcgtagtccgggtggatcggcctggatcgagatacgacgtgagccgcctcggaagaggcaagcgctccttggtgctggacctgaagcagcccagaggcgcagcagtgcttagacgtctgtgtaagagatcggatgtgttgttggagcctttcaggaggggggtcatggaaaaactgcagctgggaccagagatccttcaaagagaaaaccccagactgatctatgccagactctcgggattcggacaatcaggatccttttgtagactggcgggacatgacataaactacctggcacttagcggcgtgttgagcaagatcgggcgctcaggtgagaatccttacgcacccctgaaccttctggcagacttcgcaggtggggggttgatgtgtgcgcttggtatcataatggcactgttcgataggactaggaccggaaagggtcaagtgattgacgcaaatatggtggagggtaccgcctacctgtcatcgtttctctggaaaacgcaaaagttgtcactttgggaggcaccgcgaggtcagaacatgcttgatggaggagcacctttctacaccacttaccggaccgccgatggagagttcatggcagtgggcgcaattgagcctcagttttacgaactgttgatcaagggtcttggcctcaagtcggatgaacttcctaaccagatgtcaatggatgactggccagagatgaagaaaaagttcgcggacgtttttgctgagaaaactaaggccgagtggtgtcagattttcgatggaaccgatgcgtgtgtgacgcctgtccttacctttgaagaagtcgtccatcatgatcacaacaaggaaagaggatcgttcattacttcggaagaacaggatgtctcacctcggcctgcacctcttctgctgaatactccggcgattccctccttcaagcgtgatcccttcattggagaacacacggaagaaatcctggaagagttcgggttttcacgagaagaaatctatcagctgaactcggacaaaatcatcgagtcgaataaggtgaaggcatcactc

SEQ ID NO: 179372 - DNA, 1146 bp, Artificial Sequence
  derived and/or modified sequence
atggcccttcaaggaataagcgtggtagaactgtctgggctagccccggggcctttctgcgccatggtattagccgatttcggagctagagtcgtgagggtggaccgcccaggttccagatacgacgtttctagattggggcggggaaaaagaagcctcgtgctcgatttgaagcaaccaagaggggctgctgttttgcggagactgtgtaagcgatctgacgtcctccttgagccatttcgcagaggtgttatggagaagctacagctggggccagaaattctgcaacgcgaaaatcctcgacttatttacgctaggctttctgggtttggacagagtgggtcattttgtaggctcgcaggacatgacattaactatctggccctgagcggcgtgctcagtaaaatcggaagaagcggagaaaacccctacgcgcctcttaatcttcttgcagatttcgctggaggtgggttgatgtgcgcactgggcataatcatggcacttttcgatcggacaagaacaggaaagggacaggtgatcgacgcgaatatggtggagggcaccgcatacctgtcatcatttctgtggaagactcagaaactctcactgtgggaggctcctagaggtcagaacatgttggatggaggagccccattttacaccacctacagaaccgccgacggtgagtttatggcagtaggggcaattgagcctcagttttatgagctgttgatcaagggcctgggcttaaagagcgatgagctgcctaaccagatgtctatggatgattggcccgagatgaagaagaaatttgcagacgtgttcgctgaaaaaacaaaggcggagtggtgccagattttcgatggaaccgacgcatgcgttacccccgtgctgacatttgaagaagtggtccaccacgatcacaacaaagaaaggggatcatttatcacctctgaggagcaggatgtgtcacctaggccggcccctctgctgcttaacacacctgcaataccttcctttaagagagatccatttatcggggaacataccgaagagatcttggaagagtttgggttctcaagagaggagatataccagctgaatagtgacaaaatcatcgaatcaaacaaggtgaaggctagccta

SEQ ID NO: 179373 - DNA, 1146 bp, Artificial Sequence
  derived and/or modified sequence
atggctcttcaaggcatctccgtggtggagctgagcggcctcgcgcccggcccgttctgtgccatggtgctggcggacttcggcgctagggtggtgcgggtggacaggccgggatcacgctacgatgtgtcgagactgggacgggggaagcgaagcctcgtgctggacctgaagcaaccacggggagccgcagtgcttcgccggctttgtaagagatctgatgtcctgcttgagccattccgccggggcgtcatggaaaaactgcagctgggcccggaaattctgcagcgagagaatccgcgcctgatctacgcacgcctgtcgggtttcggccaatcggggagcttctgcagacttgccggccacgacatcaattacctggctctgtccggggtgctgagcaaaatcggacggagcggggagaacccgtacgcccccctgaatctcctggctgattttgccggtggcggactgatgtgtgccctggggatcattatggcgctgttcgaccgcaccagaactggaaagggacaagtcatcgatgcgaacatggtggaaggaaccgcctaccttagctcattcctgtggaaaactcagaaactcagcctgtgggaagcgccgcgggggcagaacatgcttgatggcggggcccctttttacaccacctaccgcaccgcggatggagagttcatggctgtgggtgctatcgaaccccagttctacgaactgctcatcaagggacttggcctgaagtcggacgagctgccgaaccagatgtcaatggatgattggcctgagatgaagaagaagttcgccgacgtgtttgccgagaaaaccaaggcggagtggtgccagatattcgatgggaccgacgcatgcgtgaccccagtcttgaccttcgaagaggtagtccaccatgaccataacaaagagcggggctccttcattacctcggaagagcaggacgtctcgccgaggccggcgccgctgctcttgaacaccccggccatccctagcttcaagcgcgaccccttcatcggtgaacacactgaagaaatcctggaagaatttggattctcccgcgaagaaatctaccaactgaattcagacaaaatcatcgaatcgaacaaggtgaaggcctcgctc

SEQ ID NO: 179374 - DNA, 1146 bp, Artificial Sequence
  derived and/or modified sequence
atggcactgcagggaatctcagtggtcgaactgtccggtctggctccgggaccattctgtgccatggtgttagcagacttcggggcgagagtggtccgcgtggatcggcccggctcacgctatgacgtcagcagacttggccgcggtaaacgcagtctggtgctggatcttaaacagcctagaggcgccgccgtgctgagaaggctgtgcaagagatccgatgttctgttggaacctttccgtaggggagtaatggaaaagctacagctgggacctgagatcttgcaaagggaaaatccaaggctgatatatgcacggctctcaggcttcgggcagagcggctctttctgcaggctggctgggcatgatattaactacttagctctgtcaggggttttaagtaagattggccgttctggagagaacccttacgcgcccctgaatctgcttgcggacttcgcagggggagggctgatgtgtgctctcggtatcattatggcgctgttcgatcggactcggactgggaaaggacaggtcattgacgcaaacatggtcgagggaacggcctacctgtcttccttcctttggaagacacagaaacttagcctctgggaggcaccacggggacagaacatgttggacgggggggctccattctacactacttatcgcactgctgacggcgagtttatggctgtaggtgcaatcgagccgcagttttacgagctgctgatcaagggcctgggcctcaagtccgatgaattgcctaaccaaatgagcatggatgattggcccgagatgaaaaagaagtttgctgatgtgtttgcagagaagacaaaagccgagtggtgccaaatcttcgacgggaccgatgcctgtgtaacacctgtgctcacatttgaggaagtggtgcaccacgaccataataaggaacgcgggagctttataacctccgaagagcaggatgtgagtccgaggccagctcccctgcttttaaatacccccgctatcccgtccttcaaacgtgacccctttattggggagcacacagaggagatactggaagagttcggtttttccagggaggaaatctaccagctgaacagtgacaagatcattgagtctaacaaagtgaaggccagcctc

SEQ ID NO: 179375 - DNA, 1146 bp, Artificial Sequence
  derived and/or modified sequence
atggcacttcaaggcatttccgttgtggagctctctggcttggcgccgggcccgttctgtgccatggtgctggcggacttcggtgcccgtgtcgttcgcgttgatcggcccggttcgcggtatgacgtatcgcgtctgggccgcgggaagcgctctctcgtgctagatctaaagcaaccccgtggagctgctgtcttgcgccgcctctgcaagcgctccgacgtacttctggagcccttccgccgcggcgtcatggaaaagttacaactcggtccagagatcctccaacgtgagaaccctcgccttatttatgcaagactgtccggcttcggccagtcaggaagcttctgtcgcctggctggtcatgacatcaactaccttgccctctccggtgtcctcagcaagatcggtcgttctggggagaatccctacgcccccctgaacctgctcgccgattttgccggcggtggcttgatgtgcgcgcttggtattattatggccctgtttgacaggacccgaaccggcaaaggtcaggttattgatgccaacatggttgagggtaccgcctatttgagtagctttctctggaagacccaaaagctcagcctttgggaagctccccgcggccaaaacatgcttgacggaggcgctcccttctacacaacgtatcggacggctgatggagagttcatggctgtcggcgctatagagccccaattctatgagttattgatcaagggtctaggacttaagagcgatgaacttccaaaccaaatgtcgatggacgattggcccgaaatgaaaaaaaagttcgctgatgttttcgccgagaagactaaggccgagtggtgtcaaatcttcgatggcaccgatgcttgtgtcacccctgttttgactttcgaggaagtagtgcaccacgaccacaacaaggaacgcggctcattcattacatccgaggagcaggatgtctcccccagacccgcgcctctactattgaacacgccagccataccgtccttcaaaagagatccctttatcggcgagcacacggaggagatcctggaagagttcggtttcagtcgagaggagatctaccagctcaacagtgacaagatcatcgagagtaacaaagtcaaggctagcctg

SEQ ID NO: 179376 - DNA, 1146 bp, Artificial Sequence
  derived and/or modified sequence
atggccctgcagggaatttccgtggtggaactttccggactcgccccaggaccgttctgtgcgatggtgctggccgacttcggcgcgcgcgtggtcagagtggatagaccgggttcacgctacgacgtgtccaggctgggacgcggaaagcggtccttggtgctggatctgaaacaaccacggggagcggccgtgctgcgccgcctgtgcaagcgctccgacgttttgctggagccgttccgaagaggtgtgatggaaaaactgcaactgggcccagagatattgcagcgggagaaccctcgcttgatctatgccagactgagcggttttggtcagtcaggctccttctgcaggctggctggccacgacattaactacctggcgctctccggggtgctgtccaaaatcggacggagcggggagaacccctacgctccactgaacctcctggcagatttcgcaggaggaggactgatgtgcgcactcggtattatcatggcactttttgatagaacccgcacgggcaagggacaggtcatcgatgcgaacatggtggaggggactgcataccttagctcgttcctgtggaaaacgcagaagctcagcctttgggaagccccgcgcggtcagaatatgcttgatggtggggccccgttttacactacctaccgcactgccgatggtgagtttatggccgtcggcgcgatcgagccgcagttctacgaactgcttatcaaggggctcgggctgaaatcggacgaactcccaaatcagatgtccatggacgactggccggaaatgaaaaagaaattcgccgacgtgttcgcggaaaaaaccaaggccgaatggtgccagatcttcgacggcactgatgcgtgcgtcacgccggtcctgacctttgaggaggtcgtccaccatgaccataacaaggaaagggggtcgttcatcacttcggaggagcaggacgtgtcgccacgacctgctccgctgctgctcaacactccggccatcccgtccttcaagcgggacccattcattggagaacacaccgaagaaatcttggaggagttcggattttcccgcgaggagatctaccaactgaatagcgacaagatcatagaatccaacaaagtgaaagctagcctc

SEQ ID NO: 179377 - DNA, 1146 bp, Artificial Sequence
  derived and/or modified sequence
atggcacttcaaggaatttcagttgtagaactttcaggacttgctccaggaccattctgtgctatggttttagcagactttggagcacgagttgtacgtgttgataggccaggatcaagatatgatgtatcaagactcggaagaggaaaaagatcgcttgttttagacttaaaacaaccaagaggtgctgcagttcttagacgattatgtaagagatcagatgtgttattagaaccatttcgtagaggtgttatggaaaaacttcaattaggaccagaaattctacagagagaaaatccaagactaatatatgcaagactttcagggtttggtcaatctggatcattttgtagacttgcaggtcatgatattaattatcttgcactttcaggagttctttcaaaaattggaagatctggagaaaatccatatgcaccattaaatcttttggctgattttgctggaggtggattaatgtgtgctcttggaattatcatggccctttttgatagaacacgtacaggaaaaggtcaagttatagatgctaatatggttgaaggaacagcttatctttcgtccttcttatggaagacacaaaaactttctctttgggaagctcctagaggtcaaaacatgcttgacggtggagcaccattttatactacttaccgaactgctgatggagaattcatggctgttggagctattgaaccacaattctacgaattactaattaaaggattaggattaaagtcagatgagcttccaaatcaaatgagtatggatgattggccagaaatgaagaaaaaatttgctgatgttttcgcagaaaaaacaaaagctgaatggtgtcaaatattcgatggtactgatgcatgtgtgacacctgttttaacttttgaagaagttgtacatcatgatcataataaagaaagaggatcatttataactagtgaagaacaagatgtctcaccaagaccagctcctttattattgaacactccagcaattccatcatttaaaagagatccatttattggagaacatacggaagaaattttagaagagttcggattcagtcgagaagaaatttatcaattaaatagtgataaaataattgaatccaacaaagttaaagcatcattg

SEQ ID NO: 179378 - DNA, 1146 bp, Artificial Sequence
  derived and/or modified sequence
atggccctccagggcatctcagttgtggagctgagtggcctggccccgggacccttttgcgctatggtcctggctgatttcggggctcgcgtcgtgagggtggatcgcccaggttctcgttacgatgtatcacgactcggacgggggaagcgcagtcttgtgctggatctcaagcaacctaggggcgccgccgtcctgcgcaggctctgcaagaggagcgacgtcctcctggaacctttcagacgcggcgttatggagaaactccagctcggccctgagatcctccaaagggagaacccccgcctgatttacgccagattatccggctttggtcagtctgggagtttctgtagactagcgggccacgacattaactacctggctctgtcaggagtgctgtctaagattggccggtctggtgagaacccctatgccccactcaatctactcgccgatttcgccggcggtggcttaatgtgcgctctcggtatcatcatggccctgtttgatcgtacccgaacgggcaagggccaggtgatagacgccaacatggtggaggggactgcatatctaagcagcttcctgtggaagacacaaaaattgtctctgtgggaagcccccagagggcagaacatgctcgatggaggcgctccattctatacgacttaccgcaccgccgacggagagttcatggctgtgggtgcaattgaaccccaattttatgaattgctgataaagggtctgggattgaaaagcgacgaactgccaaaccaaatgagcatggacgactggcccgagatgaagaaaaagttcgcggatgtgttcgctgaaaaaactaaggccgaatggtgtcagatctttgatggcaccgacgcgtgtgtgacccctgtgctcacatttgaggaggttgtacatcacgatcacaacaaagagcgcggctctttcatcaccagcgaggaacaggacgtgtctcctcgtcccgcccccctgctccttaacactcctgctatcccttccttcaagagagacccattcatcggcgagcataccgaggaaatcttggaggagtttggcttctcccgcgaggagatctatcagcttaatagtgataaaatcatcgaatctaacaaagtgaaggcaagtcta

SEQ ID NO: 179379 - DNA, 1146 bp, Artificial Sequence
  derived and/or modified sequence
atggcgttgcaaggtattagcgttgttgagctgagcggtctggccccgggcccattctgtgctatggtactagcggactttggcgcgcgcgtggttagagtggaccggccgggctctcgctatgacgtgagccgcctgggtcgcggtaagagaagcctggtcctcgatcttaaacagccaaggggagccgctgtccttcgccggctgtgcaaacgctctgacgtgttgcttgaacctttccgaaggggtgtcatggagaaattgcaactcggacctgaaattttgcaacgcgaaaatcctcgcctgatttatgcgcgcctctccggttttggtcaaagcggcagcttctgtcgcctggcgggccacgatataaactacctggcactgtccggcgttctcagcaaaatcggccgctctggggaaaatccttacgctcctttgaatctgctggccgacttcgcaggaggcggtttgatgtgtgctctgggcatcatcatggcgctgttcgaccggacgcgcacgggtaaaggtcaggtgatagatgccaatatggtagaaggtaccgcttacctgtcttcatttctttggaagactcagaagctgtcgctgtgggaagcgcctcgtggtcagaacatgctggatggcggtgccccgttttatactacttaccgtaccgcggacggtgagttcatggcggtcggggccatcgagccccagttctacgagctgttgatcaagggcctcgggcttaagtccgatgagctaccgaatcaaatgagcatggacgactggccagagatgaagaaaaaatttgctgacgtatttgccgagaaaacgaaagccgagtggtgccagatcttcgatgggactgatgcgtgcgtgacgccggttctgaccttcgaagaggttgtgcaccatgaccataacaaggagcgcggttccttcataaccagtgaagaacaagacgtcagccctcggccggcgccgctgctgcttaacaccccagcaattcccagcttcaaacgcgacccatttatcggagagcacaccgaggaaatcctggaagagtttggcttcagcagagaggaaatttatcaactgaacagcgataaaatcatcgagtcaaataaggtgaaggccagcctg

SEQ ID NO: 179380 - DNA, 1146 bp, Artificial Sequence
  derived and/or modified sequence
atggcgttgcagggaatctccgtcgtggagctgtctgggctggcgcctggacctttctgcgcgatggtgctggccgactttggagcccgagtggtgagggtggacaggccgggatcgcgctacgatgtgtcgagactgggaaggggtaaacgcagcctcgtgctggatctgaagcaaccgcgcggagcggctgtgctccgtagactctgtaagcggtcggacgtgctgcttgaaccattccggcgcggagtgatggaaaaactgcagttgggaccggaaattctccaacgcgaaaacccgcggctgatctacgcccgcttgtcaggtttcggacagtccgggtccttctgccgcctcgccggccatgacatcaactacctggcactgagcggcgtcctctccaagatcggacggtcgggagaaaatccctacgcgcctttgaatttgctggcggatttcgcgggcggggggctcatgtgtgcacttgggattatcatggcacttttcgaccgcacgcggaccggcaagggacaggtcatcgacgcaaacatggtggaaggaaccgcatacttgtcatcgtttctgtggaaaactcagaagttgagcctctgggaggccccgagaggtcagaacatgcttgacggcggcgccccgttctacactacttatcgcaccgctgacggcgagtttatggctgttggagccatcgagccacaattctacgaactgctgatcaagggtttgggccttaaaagcgatgagctccccaaccaaatgtctatggatgactggccagagatgaagaagaagttcgcggacgtctttgccgagaaaaccaaagccgaatggtgccagatttttgacggaactgatgcctgcgtcaccccagtcctcacgttcgaggaagtggtgcatcacgaccacaataaggaaaggggctcattcataacctccgaagaacaagacgtctccccacgtccggctccgctgctcctgaataccccagcgatcccgtcgttcaagcgagatccctttataggtgagcacactgaagaaatactggaggagttcggattctcgcgcgaggaaatctaccagttgaactccgataagatcatcgagtcaaacaaggtgaaggctagcctg

SEQ ID NO: 179381 - DNA, 1146 bp, Artificial Sequence
  derived and/or modified sequence
atggccctgcagggtatcagtgttgttgaactctctgggttagctccgggtcctttctgcgcaatggtacttgcagacttcggcgcaagggtggtgcgggtggatcgacctgggagtagatacgacgtgtcccgcctgggccggggcaagcggtctctggtgctcgatctcaagcagccgagaggagccgccgtgctgagaaggctatgcaaaaggtccgacgttctgctggagccattccggaggggcgttatggagaaactacagctcgggccagagattctgcaaagagagaacccccgcctgatttatgctagactgagcggatttggccagagcggatccttttgcaggctggctggtcacgatatcaactatcttgcactctcaggcgtgctgtcaaaaattggccgctccggcgaaaacccatacgcaccactgaatctgcttgccgattttgccggggggggactaatgtgtgctctcgggatcattatggccctcttcgataggaccagaactggtaagggtcaggtaatagacgccaacatggtggagggcacggcctacctgagttccttcctgtggaaaacccagaaactgagcctgtgggaagcacccagagggcagaatatgcttgatggtggagcacccttttacacaacctaccgcacagccgacggggaattcatggccgtgggtgcgattgagccgcaattctacgagctcctgattaaaggcttgggtctgaaaagcgatgaattgcccaatcagatgagcatggacgattggcccgaaatgaaaaagaagttcgcagatgttttcgccgaaaagactaaagcagagtggtgtcagatcttcgatggaactgacgcttgtgtgactcccgtattaaccttcgaggaagtagtccaccacgatcacaataaagaacgaggcagctttatcaccagcgaggagcaggatgtcagcccccggcctgcgccccttctgttaaatactcctgccatacctagcttcaagcgcgatccgttcattggagagcacaccgaggagatcttagaagagttcggatttagtcgtgaggaaatctaccagctgaacagcgacaagataattgagtctaacaaggtgaaagctagtctg

SEQ ID NO: 179382 - DNA, 1146 bp, Artificial Sequence
  derived and/or modified sequence
atggcccttcaaggtatttcagtggtcgagctctccggtctggcaccaggtcctttttgcgccatggtgctggcagatttcggcgccagagtggtgcgtgtggacagaccaggctcacgctacgatgtctcaaggctgggacgagggaagagatcactggtgctggatctcaagcaacctagaggtgccgcagtgcttagacgtctgtgtaagcggtccgacgtgctgcttgaacctttccgcagaggagtgatggaaaagctgcagttgggtccagagattttgcagcgtgagaatcctcgactgatatatgcacgactttcaggtttcggccaatccggttcattctgtcggctggccggtcatgatatcaactaccttgcactgtccggggtgctttccaagattggacgctccggagaaaatccatacgcaccactgaacctgctggcggatttcgccggtggcggactcatgtgcgcactgggcatcattatggcgcttttcgaccgcactcggactggaaagggacaggtcatcgatgcaaacatggtcgaaggaacggcatatctctcctcgtttctgtggaaaacccagaagctgagtctgtgggaagcacctcgaggtcagaacatgctggatggtggcgcacctttttacactacttaccgtactgcagacggtgagtttatggcggtgggtgctatagaaccccagttctacgaactgcttatcaaggggctcggcctgaaatccgatgaactcccaaaccaaatgtcaatggatgattggcctgagatgaagaaaaagttcgccgatgtctttgcggaaaaaacgaaagccgaatggtgtcagattttcgatggaaccgatgcgtgtgtcaccccagtcctgacttttgaagaagttgtccatcacgaccataacaaggagaggggttcgttcataacctcggaagaacaagacgtgtcgccaaggcctgcccctcttctcctgaatactccagctattccgtcgtttaaacgcgacccttttatcggagagcacaccgaagaaattctggaagagtttggattcagccgggaagagatttaccaactcaattccgataagatcattgaatcaaataaggtcaaggcaagcctg

SEQ ID NO: 179383 - DNA, 1146 bp, Artificial Sequence
  derived and/or modified sequence
atggcacttcagggcatatccgtggtcgaactgtccggcctggcaccaggacctttctgcgccatggtccttgcagatttcggagcaagggttgtcagagtggatcgcccaggatcaagatacgacgtaagcaggttgggaagaggtaaacggtcacttgtgctcgatcttaagcaaccgaggggtgcagccgtcctgcggcgcctttgtaagagaagcgatgtgcttcttgaaccatttcgaaggggcgtgatggaaaaacttcaacttgggcccgaaattcttcaacgtgagaatccaagactcatctacgcgagactttcagggtttggacagagcggttccttttgcaggctcgcaggccatgacattaactacttggcactttcaggcgtgctgtccaagatcggacgatcaggagaaaatccttacgcacctcttaacctgctcgcagattttgcaggaggaggactcatgtgtgccctcggaatcattatggccctgtttgatagaaccagaaccggcaagggacaggttatagatgccaacatggtggagggcaccgcctaccttagttcgtttctgtggaaaactcaaaaactttccctctgggaagctcctcgtggacagaacatgcttgacgggggcgcacccttctatacgacgtaccgtaccgcagatggggagtttatggccgtcggggcgattgagcctcagttttacgagttgctcataaaaggcttgggtcttaagtcagacgaactgccgaatcaaatgtcgatggatgattggccagaaatgaagaagaagttcgcggatgtctttgcagagaaaactaaagcagaatggtgtcagattttcgacggtactgacgcatgtgtaaccccagtgctgacctttgaggaagtggtgcaccatgatcataacaaggaacgaggatcctttatcaccagcgaggaacaggacgtgtcgcctagaccggcacctttgctgcttaatacccccgcaatcccgtcatttaagcgcgatccttttatcggagaacacactgaagagattctggaggaattcggattctcgcgcgaagagatttaccaactgaactcggacaaaatcattgagtcgaacaaggtcaaagcctctttg

SEQ ID NO: 179384 - DNA, 1146 bp, Artificial Sequence
  derived and/or modified sequence
atggctctccagggaatttccgtggttgaactttccggcctggctcccgggcctttctgtgctatggtgttagcggacttcggggcccgtgtggtccgcgtggatcgaccaggatcaagatacgacgtgtcccggctcggtcgcgggaaacgctcgctcgtcctagacctgaagcagccgaggggtgctgccgtcctccggcgactctgcaaacgctcagacgtgcttttggagccgttccgacggggagtgatggagaaactgcagcttggtcccgagatcctccaacgagaaaacccgcgcttgatttacgcacggctctccggattcggacagtcaggctctttctgtagactggcgggacacgacattaactatttagccctcagcggtgtgttatccaaaataggccggagcggcgagaatccatacgcacctctgaaccttcttgcggatttcgctgggggcggtctgatgtgcgcactaggaatcatcatggctctcttcgacaggactcgaaccggaaagggtcaggtgatcgatgcgaacatggtcgagggcacagcctatcttagtagcttcctgtggaagactcagaaactgagtttgtgggaagcccccagaggacagaacatgttggacggcggagcccctttctataccacctacaggacagcggacggagagtttatggcagtcggggcaatagagccgcagttctatgagctgctgattaaaggtctgggacttaaatctgacgagctgcccaaccagatgagcatggacgattggccagagatgaagaaaaagtttgccgacgtgttcgcagaaaaaactaaggctgaatggtgccagatattcgacggcacagacgcatgcgtgacgcccgtgctgacattcgaagaagttgtccaccatgaccacaacaaggagcgaggaagttttattacctcagaggagcaggacgtctcccctcgccccgcccctcttctgcttaatacccctgccatcccaagttttaaaagagacccctttatcggagagcacactgaggagattctggaggaatttggcttttcccgcgaggaaatataccaactgaacagcgataagatcatcgaatccaataaggtgaaggctagtcta

SEQ ID NO: 179385 - DNA, 1146 bp, Artificial Sequence
  derived and/or modified sequence
atggcgttgcaggggattagcgtcgtcgagctttctggactggcacctggtccattttgcgcgatggtgttagctgactttggtgctagggtagttcgcgttgaccgtcctggctcccgctatgacgtttcaaggcttggtaggggaaagcgtagtctcgttcttgatcttaaacaaccaaggggagcagcagtgttgcgacgcctgtgtaagcgctccgatgttcttttggagccattccgtcggggagtgatggaaaaacttcagctgggacctgagattcttcaacgagagaatcccaggcttatttatgccagactttccggatttgggcagagtggatctttctgtaggttagcaggccatgacataaactatctggctctttcaggggtcctgtccaagatcggtaggtccggtgaaaatccatatgctccacttaatcttctcgcagacttcgctgggggaggtcttatgtgtgcacttggcattatcatggctttatttgatcgaactagaaccggtaagggtcaagttattgacgcaaatatggttgagggaacggcttatctctcaagtttcttatggaagacccagaaattatccctatgggaagcgccaagggggcaaaatatgctcgatggtggggctccgttctataccacatatagaaccgctgatggggaatttatggcagtcggggctatagaaccacagttctatgagctcctgatcaagggactaggtcttaaatctgatgaattgcccaatcaaatgtcaatggatgattggccagagatgaaaaaaaaatttgccgatgtgtttgcagagaaaaccaaagctgagtggtgtcagatattcgatggtacggatgcttgtgtcacccccgtcctgacgttcgaggaagtagtccatcatgatcataataaggaacgtggttcatttattacctcagaggaacaagatgtgtcccccagacctgcccccctcctgcttaatacacccgcaattccctccttcaagcgagatccctttatcggagaacatacagaagagattctcgaagaatttggattcagcagagaagagatctatcagctcaactctgacaagatcattgagtccaataaggttaaggcttcactg

SEQ ID NO: 179386 - DNA, 1146 bp, Artificial Sequence
  derived and/or modified sequence
atggcattgcaaggaatatcagtggtggagctcagtggcctcgcccctggacctttttgcgccatggttcttgctgacttcggagctagggtggttcgagtcgatcgtcctggatctcgctatgacgtcagtagactgggtcggggcaagcggagcctggtgctggacctgaaacagcctcgcggggctgctgtccttaggcgcttgtgcaaaagaagcgatgtgctgcttgaacccttccgccgcggcgtgatggaaaaactgcagctggggcctgagattttgcagagagagaacccccggctcatctacgctagactcagcgggtttggccaatccggctccttttgccggttggccggccacgatatcaactacctcgcacttagcggagttttgtctaagattggaagaagtggcgagaacccttacgcccctttgaacctgctggctgatttcgctggcggaggattgatgtgcgctctgggcatcatcatggctcttttcgatagaaccagaaccggaaaaggtcaggtcatagacgctaacatggtcgaagggaccgcctacctctcatcttttctgtggaagacacaaaaactttcgctctgggaagcccctagaggccagaacatgctcgatggcggagcccccttctatactacctatagaactgcggacggggagttcatggcagtgggagccatcgaacctcagttctatgagctgctgataaaaggcctcggcctcaagtccgacgagttacctaaccagatgagtatggacgattggcccgagatgaagaaaaaatttgcagatgtgttcgcagaaaaaacaaaagcagagtggtgtcaaattttcgacggaacagatgcctgcgtcacccctgtgttgactttcgaagaagttgtccatcatgatcacaacaaggagcgaggctctttcatcacctccgaagaacaggatgtgtcacctaggccagctcccctgttgttaaacactccggctatcccaagcttcaagcgggatcccttcatcggagaacacacagaagaaatcctggaggagttcggctttagccgcgaagagatttaccaactgaacagcgacaagattatcgagagcaacaaggtgaaggcaagtctt

SEQ ID NO: 179387 - DNA, 1149 bp, Artificial Sequence
  derived and/or modified sequence
atggccctgcagggcatcagcgtggtggagctgagcggcctggcccccggccccttctgcgccatggtgctggccgacttcggcgccagagtggtgagagtggacagacccggcagcagatacgacgtgagcagactgggcagaggcaagagaagcctggtgctggacctgaagcagcccagaggcgccgccgtgctgagaagactgtgcaagagaagcgacgtgctgctggagcccttcagaagaggcgtgatggagaagctgcagctgggccccgagatcctgcagagagagaaccccagactgatctacgccagactgagcggcttcggccagagcggcagcttctgcagactggccggccacgacatcaactacctggccctgagcggcgtgctgagcaagatcggcagaagcggcgagaacccctacgcccccctgaacctgctggccgacttcgccggcggcggcctgatgtgcgccctgggcatcatcatggccctgttcgacagaaccagaaccggcaagggccaggtgatcgacgccaacatggtggagggcaccgcctacctgagcagcttcctgtggaagacccagaagctgagcctgtgggaggcccccagaggccagaacatgctggacggcggcgcccccttctacaccacctacagaaccgccgacggcgagttcatggccgtgggcgccatcgagccccagttctacgagctgctgatcaagggcctgggcctgaagagcgacgagctgcccaaccagatgagcatggacgactggcccgagatgaagaagaagttcgccgacgtgttcgccgagaagaccaaggccgagtggtgccagatcttcgacggcaccgacgcctgcgtgacccccgtgctgaccttcgaggaggtggtgcaccacgaccacaacaaggagagaggcagcttcatcaccagcgaggagcaggacgtgagccccagacccgcccccctgctgctgaacacccccgccatccccagcttcaagagagaccccttcatcggcgagcacaccgaggagatcctggaggagttcggcttcagcagagaggagatctaccagctgaacagcgacaagatcatcgagagcaacaaggtgaaggccagcctgtag

SEQ ID NO: 179388 - RNA, 1307 nt, Artificial Sequence
  derived and/or modified sequence
gggaaauaagagagaaaagaagaguaagaagaaauauaagagccaccauggcgcugcagggaauuagcguggucgagcugucgggacucgccccuggcccauuuugcgcaaugguguuggcagacuuuggagcacgggucguccggguggaucgucccgguagcagauacgacgugucccgauuggguagaggaaagaggucccucgugcuugaucugaaacaaccccguggagccgcaguccuuagacgccuuuguaagaggucagacguccugcuugaaccuuuuagaaggggcgugauggaaaaacuucaacucgguccggaaauucuucagcgcgaaaacccacggcugauauacgcuagacuguccggauucggccagucaggauccuuuuguagacuggccggacacgauaucaauuaccuugcauugucgggggugcugucaaagauuggacggagcggagaaaacccguacgcaccauugaaccuucucgcagacuuugcggguggcggucuuaugugugcacuggggauuaucauggcacuguuugaucgaacucgcaccggaaagggccaagugauugacgccaauaugguggaagggacugcauaccucagcucguuucuuuggaaaacgcaaaaacuuucacucugggaagcuccucggggucagaacaugcucgaugguggugccccauucuacaccaccuaccgaaccgccgauggcgaguuuauggcagugggagcaauugaaccccaauucuaugagcuccugaucaagggacuggggcuuaagagcgacgaacuuccuaaccaaaugucgauggaugacuggccagagaugaaaaagaaguucgcggauguguuugccgaaaagaccaaagcugaauggugucagauuuucgaugggacugaugcaugcgucaccccuguccucacuuuugaggaaguggugcaucaugaucacaacaaggagaggggaucguuuaucacgagcgaggaacaagauguguccccuagaccagcaccucugcugcugaauaccccugcgauuccaucguucaagcgcgaucccuucaucggugagcauacugaagaaauacuggaggaauuuggcuucucgcgcgaggaaaucuaccagcugaauuccgacaagaucauugaauccaacaagguuaaggcaucucuuugauaauaggcuggagccucgguggccaugcuucuugccccuugggccuccccccagccccuccuccccuuccugcacccguacccccguggucuuugaauaaagucugagugg

SEQ ID NO: 179389 - protein, 370 aa, Artificial Sequence
  derived and/or modified sequence
MFQASMRSPNMEPFKQQKVEDFYDIGEELGSGQFAIVKKCREKSTGLEYAAKFIKKRQSRASRRGVSREEIEREVSILRQVLHHNVITLHDVYENRTDVVLILELVSGGELFDFLAQKESLSEEEATSFIKQILDGVNYLHTKKIAHFDLKPENIMLLDKNIPIPHIKLIDFGLAHEIEDGVEFKNIFGTPEFVAPEIVNYEPLGLEADMWSIGVITYILLSGASPFLGDTKQETLANITAVSYDFDEEFFSQTSELAKDFIRKLLVKETRKRLTIQEALRHPWITPVDNQQAMVRRESVVNLENFRKQYVRRRWKLSFSIVSLCNHLTRSLMKKVHLRPDEDLRNCESDTEEDIARRKALHPRRRSSTS

SEQ ID NO: 179390 - DNA, 1113 bp, Artificial Sequence
  derived and/or modified sequence
atgttccaggccagtatgaggagcccgaacatggagccttttaaacagcagaaagttgaggacttttatgacatcggagaggagctgggatctgggcagttcgcaatagtcaaaaagtgcagggaaaaaagcaccggactcgaatacgctgcaaagtttatcaagaagcggcagtcccgcgcctcgcgacgcggggtgtcccgggaagaaatcgagcgagaggtttcaattctgcgccaggtgctccaccacaacgtgatcacgttgcatgatgtgtatgagaatagaacagacgtggtactcattctggagctcgtcagtggaggggaattattcgattttctcgcccagaaggagtccctgagtgaggaggaggccacaagcttcataaaacaaattctcgacggggtcaattacctacacacaaagaaaattgcccactttgatttgaaaccagaaaatatcatgctcttggataagaacatacctatcccacacatcaagcttatagacttcggcttagctcacgagattgaagacggtgtggagtttaaaaacatttttggcaccccagaattcgtggcaccagagattgttaactacgaacccttagggctcgaagctgacatgtggagcatcggcgtcataacatatatcctgctaagcggggcctcgccgtttctgggggacaccaagcaggagacattagcaaacatcaccgctgtgtcttacgactttgatgaagaattctttagccagacatcagaactggccaaggatttcatccggaagctcctcgttaaagagactaggaaacggctcaccattcaggaagcacttcgccacccttggattaccccggtagacaatcaacaagccatggttcggagggaatctgtagtcaatttagagaacttccggaaacagtatgtcaggagacggtggaaactgtcgttcagcattgtgagcctgtgcaatcacctcacaaggtcccttatgaagaaggtgcacctgaggcctgatgaggatcttcggaattgtgagagcgatactgaggaggacattgcccgcaggaaagctttacatccaagacggaggtctagcacttcttag

SEQ ID NO: 179391 - DNA, 1113 bp, Artificial Sequence
  derived and/or modified sequence
atgtttcaggctagcatgcgcagtccaaatatggaaccgtttaaacagcaaaaggtggaagacttctatgatattggggaggagctgggaagcggccagtttgccatcgttaaaaagtgtagggaaaagtccaccggactggaatatgccgctaagtttatcaagaaacggcagagcagagcaagtagaagaggagtttccagggaggaaatcgaacgtgaagtgtccattctcagacaggtgcttcatcacaatgtgattacactgcacgacgtttacgagaatcggactgacgttgtgctgatcttggaattagtctcaggcggagaacttttcgacttcctcgcccagaaggagagcttatctgaggaggaggccactagcttcataaaacagatcttggacggagtgaactatctccacacaaaaaagattgcacacttcgatcttaagcccgaaaacattatgctgctcgacaaaaacattccaattcctcatataaagctcatagactttgggctcgcccacgagatcgaagatggcgtcgaatttaagaatattttcgggacacctgagttcgtggctcccgaaatcgtgaactacgaacccctggggctggaggctgacatgtggagcataggagtgattacatatatactcctttcaggtgcttctccattcctgggggatacaaaacaggaaacgctggcaaacatcaccgctgtttcttatgattttgatgaagagtttttctcacagacgagcgagcttgcaaaggacttcatcaggaaactccttgtaaaggaaactcggaaaagactcactatacaggaagcattgcggcacccctggattacacctgtggataatcaacaggccatggtacggcgcgagtcagtagtgaatcttgagaatttccgtaagcagtacgttaggaggcgctggaagctgagctttagtatcgtcagtttatgtaatcatctgacgaggagccttatgaagaaagtgcatttaagacctgatgaagacctgcgcaattgcgagtcagacacagaggaggacatcgcccgaagaaaagccctgcaccccaggaggagatcttccacttcttag

SEQ ID NO: 179392 - DNA, 1113 bp, Artificial Sequence
  derived and/or modified sequence
atgttccaggcctccatgaggagccccaacatggagcccttcaagcagcagaaggtggaggacttctatgacattggagaggagctgggcagcggccagtttgccatcgtgaagaagtgccgggagaagagcacaggcctggagtatgctgccaagttcatcaagaagaggcagagccgggccagcagaagaggagtgtcccgggaggagattgagcgggaggtgtccatcctgcggcaggtgctgcaccacaacgtcatcaccctgcatgatgtgtatgagaacagaacagatgtggtgctgatcctggagctggtgtctggaggagagctgtttgacttcctggcccagaaggagagcctgtctgaggaggaggccaccagcttcatcaagcagatcctggatggagtgaactacctgcacaccaagaagatcgcccactttgacctgaagccagagaacatcatgctgctggacaagaacatccccatcccccacatcaagctgattgactttggcctggcccacgagattgaagatggagtggagttcaagaacatcttcggcaccccagagtttgtggcccctgagatcgtgaactatgagcccctgggcctggaggccgacatgtggagcattggagtcatcacctacatcctgctgagcggggccagccccttcctgggggacaccaagcaggagaccctggccaacatcacagctgtgtcctatgactttgatgaggagttcttcagccagaccagcgagctggccaaggacttcatcaggaagctgctggtgaaggagaccaggaagaggctgaccatccaggaggccctgcggcacccctggatcacccctgtggacaaccagcaggccatggtgcggcgggagagcgtggtgaacctggagaacttcaggaagcagtatgtgagaagacgctggaagctgtccttcagcatcgtgtccctgtgcaaccacctgaccaggagcctgatgaagaaggtgcacctgcggccagatgaggacctgaggaactgtgagagtgacacagaagaagatattgcccggaggaaggccctgcaccccaggagaagaagcagcaccagctag

SEQ ID NO: 179393 - DNA, 1113 bp, Artificial Sequence
  derived and/or modified sequence
atgttccaggccagcatgcggagccccaacatggagcccttcaagcagcaaaaggtggaggatttttacgacatcggcgaagaactaggaagcggacaattcgctatcgtcaagaagtgtagagaaaagtctaccggcctagaatacgccgctaagttcataaaaaaaaggcaatccagggccagccgcagaggggtctcacgtgaagagatagagagagaagtatctatccttaggcaggtgctgcaccataacgtcataaccttgcatgacgtctacgagaaccgaaccgatgtggtcctgatccttgagctggtttcgggcggggagctgtttgactttttggctcagaaagagtccctttcggaggaggaggctacctcctttattaaacaaattctggacggtgtcaactatctgcacactaaaaagatcgcacactttgacctgaaaccagaaaatattatgctgcttgataagaatattcccatacctcatatcaaactgatagacttcggactcgcgcacgagattgaggatggagtggagttcaaaaacatcttcggcactcctgagtttgttgcaccagaaatcgtgaactatgaacccttggggcttgaagctgatatgtggtccatcggagtcattacttatatacttctgtcaggcgcttcacccttcttaggcgatacgaagcaagagaccctggccaatattaccgctgtttcttatgacttcgatgaggagttctttagccagacgagcgagctcgccaaggatttcatccgcaaattgctggtcaaagagacacggaaacggctcaccatacaggaggccttaagacatccctggattaccccagtagataaccagcaagctatggtccggagggagtcagtcgtcaacctggaaaacttcaggaagcaatacgtcagacgcagatggaaattgagcttttcaatcgtatcactgtgcaaccatctgacacggtcactgatgaagaaagtacatctccgccctgacgaggatcttaggaactgcgagagcgatactgaggaggatatcgccaggcgaaaggcgttgcatccccggagacgatcttcaacctcttag

SEQ ID NO: 179394 - DNA, 1113 bp, Artificial Sequence
  derived and/or modified sequence
atgttccaggccagcatgcggagccccaacatggagcccttcaagcagcagaaggtagaggatttctacgacatcggagaagagcttgggtcaggtcaatttgcgatagtgaaaaagtgtagagaaaagagcacaggattagagtacgctgcaaaattcattaaaaagaggcagagtcgggcctctcgacgcggtgtttcccgggaggagattgagagagaagtctcgattctgagacaagtgcttcatcataacgtaattactctgcacgacgtttatgagaaccgtaccgatgtggttctaatcctggaactagtatcaggaggagaattatttgattttctggcccagaaagaaagtctctcagaggaagaagccacgtcattcataaaacagattctggacggcgtcaactatctgcataccaaaaaaatcgctcacttcgacctgaagcccgaaaatatcatgctgctcgataaaaacatacccatccctcacattaagctcatcgatttcgggcttgcccacgagatcgaagacggagtggagtttaagaatatcttcggtacgccagagtttgtcgccccagagatcgtgaactatgaacccctaggtctggaagctgatatgtggagtattggtgttatcacttatatactcctgtctggcgcctcgcccttcttgggcgatacaaagcaagagacactggcaaatataacagcggtgtcctacgactttgacgaggaattctttagccaaacttccgaactcgccaaagatttcattaggaagctgttggtgaaggaaacccgcaagcgtctcactatacaggaagcactgagacatccttggattacgcctgtagacaatcaacaggccatggtgcgacgtgaaagcgtggtgaatctcgagaattttcggaaacagtacgtacgacgtcgctggaaactctctttttctattgtttcactgtgcaatcatctcacgcgaagtctgatgaaaaaagtgcacctccgccctgacgaggacttgcgtaactgtgagtctgatacagaagaggacattgcacggcggaaggcactgcaccccagacgaaggtcctccacctcttag

SEQ ID NO: 179395 - DNA, 1113 bp, Artificial Sequence
  derived and/or modified sequence
atgtttcaggcctctatgcgcagtcccaatatggagccattcaaacagcagaaagtcgaagatttctacgatatcggagaagagctgggctccggacaattcgctatcgtcaagaagtgccgcgaaaagtctacaggcttggaatatgccgcaaaattcattaagaagagacagagtagggcaagcagacgcggtgtgtctagggaagaaatcgagcgtgaggtaagtattttacggcaggtgcttcaccacaatgtcatcactctgcacgacgtctatgagaacaggaccgacgtggttctgatcctggaactcgtcagcggcggagagttattcgatttcctggcgcagaaggaaagcttgagcgaagaggaggccacctctttcatcaaacagatcctggacggagtgaattatctccataccaagaagattgcccacttcgacttaaaaccagagaacattatgctcctggataagaatattccaattccgcacattaagttaatcgactttggtctggcacatgaaatagaggacggcgtcgagttcaagaatatattcggtacaccagagtttgtcgcgcctgagattgtgaactatgaaccgctaggattggaggcagacatgtggtctatcggcgttattacctacattctgctgagcggcgcttcccctttcctgggcgacacaaagcaggaaaccctagcaaacatcactgcggtctcatacgacttcgacgaagagttcttctcacagaccagtgagctagctaaggacttcatccgaaaactgctcgttaaagaaaccaggaaacgacttactatacaggaggcgctgagacacccctggattactccagtagacaatcagcaggccatggtaaggcgagagtctgttgtaaacctcgaaaactttcgaaaacagtatgtgcggaggcgttggaagctgtctttttcaatagtttcattgtgcaaccacctgactagatcgctgatgaaaaaggtacacttgcgccctgacgaagatctccggaactgcgagagcgacactgaggaagacatcgcaaggcggaaggccctgcaccccagaaggagaagctctacctcctag

SEQ ID NO: 179396 - DNA, 1113 bp, Artificial Sequence
  derived and/or modified sequence
atgttccaggcatctatgagatccccaaatatggaaccattcaagcagcagaaggtcgaggatttttatgacatcggggaagagctaggatctggccagtttgccatcgtgaagaaatgtcgtgaaaaatcaacgggcttggagtatgctgcgaaatttatcaagaaacggcagagcagggccagtagacgtggagtgagccgtgaggaaatcgaacgggaggtcagcatccttcgacaagtgttgcaccataatgttattaccctccacgacgtatatgaaaatagaacagatgtcgtgctgattctggagcttgtgagtggaggcgaactgttcgacttcttggcccagaaggaaagccttagtgaggaagaggccacttcatttatcaagcagatcctcgatggagttaattatctgcacacgaaaaaaattgctcacttcgatctgaaacccgaaaatatcatgttgctggacaaaaacatccctatcccccatataaagctcattgactttgggttggcgcatgagatcgaggatggggtggagtttaaaaacatctttggaaccccagaatttgttgcgccagagattgtgaattatgagcccctagggttagaagctgacatgtggagcattggcgttatcacatacatcctgctttcgggcgctagcccttttttaggggacactaaacaagaaacgctcgcaaacattaccgcggtgtcttacgatttcgatgaggaattcttctctcagactagtgaactcgctaaagactttatccgcaagctgctggttaaagaaaccagaaagcgtctaactatccaggaagctctgcgccatccctggatcactccagtggataatcagcaagctatggtcaggagggaatctgtggttaacctagaaaattttcgtaagcaatacgtgcgcagaagatggaagttgtcattctcaatcgtctcgctgtgcaaccacctgacacggagcctgatgaagaaagtccatctcagaccagacgaggatttacgcaattgcgaaagtgacaccgaggaggacatcgccaggcggaaggcccttcaccccaggaggcgatcttctacatcctag

SEQ ID NO: 179397 - DNA, 1113 bp, Artificial Sequence
  derived and/or modified sequence
atgttccaggccagcatgagaagccccaacatggagcccttcaagcagcagaaggtggaggacttctacgacatcggcgaggagctgggcagcggccagttcgccatcgtgaagaagtgcagagagaagagcaccggcctggagtacgccgccaagttcatcaagaagagacagagcagagccagcagaagaggcgtgagcagagaggagatcgagagagaggtgagcatcctgagacaggtgctgcaccacaacgtgatcaccctgcacgacgtgtacgagaacagaaccgacgtggtgctgatcctggagctggtgagcggcggcgagctgttcgacttcctggcccagaaggagagcctgagcgaggaggaggccaccagcttcatcaagcagatcctggacggcgtgaactacctgcacaccaagaagatcgcccacttcgacctgaagcccgagaacatcatgctgctggacaagaacatccccatcccccacatcaagctgatcgacttcggcctggcccacgagatcgaggacggcgtggagttcaagaacatcttcggcacccccgagttcgtggcccccgagatcgtgaactacgagcccctgggcctggaggccgacatgtggagcatcggcgtgatcacctacatcctgctgagcggcgccagccccttcctgggcgacaccaagcaggagaccctggccaacatcaccgccgtgagctacgacttcgacgaggagttcttcagccagaccagcgagctggccaaggacttcatcagaaagctgctggtgaaggagaccagaaagagactgaccatccaggaggccctgagacacccctggatcacccccgtggacaaccagcaggccatggtgagaagagagagcgtggtgaacctggagaacttcagaaagcagtacgtgagaagaagatggaagctgagcttcagcatcgtgagcctgtgcaaccacctgaccagaagcctgatgaagaaggtgcacctgagacccgacgaggacctgagaaactgcgagagcgacaccgaggaggacatcgccagaagaaaggccctgcaccccagaagaagaagcagcaccagctag

SEQ ID NO: 179398 - DNA, 2603 bp, Artificial Sequence
  derived and/or modified sequence
gattgtatgttccaggcctcaatgaggagtccaaacatggagccattcaagcagcagaaggtggaggacttttatgacatcggagaggagctggggagtggccagtttgccatcgtgaagaagtgccgggagaagagcacggggcttgagtatgcagccaagttcatcaagaagcggcagagccgggcgagccggcgcggtgtgagccgggaggagatcgagcgggaggtgagcatcctgcggcaggtgctgcaccacaatgtcatcacgctgcacgacgtctatgagaaccgcaccgacgtggtgctcatccttgagctagtgtctggaggagagctcttcgatttcctggcccagaaggagtcactgagtgaggaggaggccaccagcttcattaagcagatcctggatggggtgaactaccttcacacaaagaaaattgctcactttgatctcaagccagaaaacattatgttgttagacaagaatattcccattccacacatcaagctgattgactttggtctggctcacgaaatagaagatggagttgaatttaagaatatttttgggacgccggaatttgttgctccagaaattgtgaactacgagcccctgggtctggaggctgacatgtggagcataggcgtcatcacctacatcctcttaagtggagcatcccctttcctgggagacacgaagcaggaaacactggcaaatatcacagcagtgagttacgactttgatgaggaattcttcagccagacgagcgagctggccaaggactttattcggaagcttctggttaaagagacccggaaacggctcacaatccaagaggctctcagacacccctggatcacgccggtggacaaccagcaagccatggtgcgcagggagtctgtggtcaatctggagaacttcaggaagcagtatgtccgcaggcggtggaagctttccttcagcatcgtgtccctgtgcaaccacctcacccgctcgctgatgaagaaggtgcacctgaggccggatgaggacctgaggaactgtgagagtgacactgaggaggacatcgccaggaggaaagccctccacccacggaggaggagcagcacctcctaactggcctgacctgcagtggccgccagggaggtctgggcccagcggggctcccttctgtgcagacttttggacccagctcagcaccagcacccgggcgtcctgagcactttgcaagagagatgggcccaaggaattcagaagagcttgcaggcaagccaggagaccctgggagctgtggctgtcttctgtggaggaggctccagcattcccaaagctcttaattctccataaaatgggctttcctctgtctgccatcctcagagtctggggtgggagtgtggacttaggaaaacaatataaaggacatcctcatcatcacggggtgaaggtcagactaaggcagccttcttcacaggctgagggggttcagaaccagcctggccaaaaattacaccagagagacagagtcctccccattgggaacagggtgattgaggaaagtgaaccttgggtgtgagggaccaatcctgtgacctcccagaaccatggaagccaggacgtcaggctgaccaacacctcagaccttctgaagcagcccattgctggcccgccatgttgtaattttgctcatttttattaaacttctggtttacctgatgcttggcttcttttagggctacccccatctcatttcctttagcccgtgtgcctgtaactctgagggggggcacccagtggggtgctgagtgggcagaatctcagaaggtcctcctgaaccgtccgcgcaggcctgcagtgggcctgcctcctccttgcttccctaacaggaaggtgtccagttcaagagaacccacccagagactgggagtggtggctcacgcctataatccctgcgctttggcagtccgaggcaggggaattgcttgaactcaggagttggagaccagcctgggcaacatggcaaaacgcagtctgtacaaaaaatacaaaaaattagccaggtgtaggggtaggcacctggcatcccagctactccaggggctgaggtgacagcattgcttaagcccagaaggtcgaggctgcagtgagctgagatcacgccactgcactccagtctgggtgacagagagagaccatatccaaaaaaaaaaaaagttgccagagacgagtatgcccatgctccctctacctcactgccaccactcctgctgttaggagctgagtgtgtctccctaaaatttctatgttgaagtcttaacccttggtaccacagaatatcactgtatttggagatggggtctttagaaaggcacttaaattaaaatgagctcactgatatgggccccgatgcaatataattggtgtccttataagaaggggaggttaggacacgcaggaaagaccacatgaaggcccaggagtgggagggggaatagccatcgacaaactaagggggcctcagaggaaaccaaccctgctgacacctcaatcttagactctggcctcaaaaattgtaagaaaataaacttctgtcttttaagcca

SEQ ID NO: 179399 - DNA, 1741 bp, Artificial Sequence
  derived and/or modified sequence
gaccgcggcagctcagcctcccgccgattgtatgttccaggcctcaatgaggagtccaaacatggagccattcaagcagcagaaggtggaggacttttatgacatcggagaggagctggggagtggccagtttgccatcgtgaagaagtgccgggagaagagcacggggcttgagtatgcagccaagttcatcaagaagcggcagagccgggcgagccggcgcggtgtgagccgggaggagatcgagcgggaggtgagcatcctgcggcaggtgctgcaccacaatgtcatcacgctgcacgacgtctatgagaaccgcaccgacgtggtgctcatccttgagctagtgtctggaggagagctcttcgatttcctggcccagaaggagtcactgagtgaggaggaggccaccagcttcattaagcagatcctggatggggtgaactaccttcacacaaagaaaattgctcactttgatctcaagccagaaaacattatgttgttagacaagaatattcccattccacacatcaagctgattgactttggtctggctcacgaaatagaagatggagttgaatttaagaatatttttgggacgccggaatttgttgctccagaaattgtgaactacgagcccctgggtctggaggctgacatgtggagcataggcgtcatcacctacatcctcttaagtggagcatcccctttcctgggagacacgaagcaggaaacactggcaaatatcacagcagtgagttacgactttgatgaggaattcttcagccagacgagcgagctggccaaggactttattcggaagcttctggttaaagagacccggaaacggctcacaatccaagaggctctcagacacccctggatcacgccggtggacaaccagcaagccatggtgcgcagggagtctgtggtcaatctggagaacttcaggaagcagtatgtccgcaggcggtggaagctttccttcagcatcgtgtccctgtgcaaccacctcacccgctcgctgatgaagaaggtgcacctgaggccggatgaggacctgaggaactgtgagagtgacactgaggaggacatcgccaggaggaaagccctccacccacggaggaggagcagcacctcctaactggcctgacctgcagtggccgccagggaggtctgggcccagcggggctcccttctgtgcagacttttggacccagctcagcaccagcacccgggcgtcctgagcactttgcaagagagatgggcccaaggaattcagaagagcttgcaggcaagccaggagaccctgggagctgtggctgtcttctgtggaggaggctccagcattcccaaagctcttaattctccataaaatgggctttcctctgtctgccatcctcagagtctggggtgggagtgtggacttaggaaaacaatataaaggacatcctcatcatcacggggtgaaggtcagactaaggcagccttcttcacaggctgagggggttcagaaccagcctggccaaaaattacaccagagagacagagtcctccccattgggaacagggtgattgaggaaagtgaaccttgggtgtgagggaccaatcctgtgacctcccagaaccatggaagccaggacgtcaggctgaccaacacctcagaccttctgaagcagcccattgctggcccgccatgttgtaattttgctcatttttattaaacttctggtttacctga

SEQ ID NO: 179400 - protein, 1401 aa, Artificial Sequence
  derived and/or modified sequence
MASCASIDIEDATQHLRDILKLDRPAGGPSAESPRPSSAYNGDLNGLLVPDPLCSGDSTSANKTGLRTMPPINLQEKQVICLSGDDSSTCIGILAKEVEIVASSDSSISSKARGSNKVKIQPVAKYDWEQKYYYGNLIAVSNSFLAYAIRAANNGSAMVRVISVSTSERTLLKGFTGSVADLAFAHLNSPQLACLDEAGNLFVWRLALVNGKIQEEILVHIRQPEGTPLNHFRRIIWCPFIPEESEDCCEESSPTVALLHEDRAEVWDLDMLRSSHSTWPVDVSQIKQGFIVVKGHSTCLSEGALSPDGTVLATASHDGYVKFWQIYIEGQDEPRCLHEWKPHDGRPLSCLLFCDNHKKQDPDVPFWRFLITGADQNRELKMWCTVSWTCLQTIRFSPDIFSSVSVPPSLKVCLDLSAEYLILSDVQRKVLYVMELLQNQEEGHACFSSISEFLLTHPVLSFGIQVVSRCRLRHTEVLPAEEENDSLGADGTHGAGAMESAAGVLIKLFCVHTKALQDVQIRFQPQLNPDVVAPLPTHTAHEDFTFGESRPELGSEGLGSAAHGSQPDLRRIVELPAPADFLSLSSETKPKLMTPDAFMTPSASLQQITASPSSSSSGSSSSSSSSSSSLTAVSAMSSTSAVDPSLTRPPEELTLSPKLQLDGSLTMSSSGSLQASPRGLLPGLLPAPADKLTPKGPGQVPTATSALSLELQEVEPLGLPQASPSRTRSPDVISSASTALSQDIPEIASEALSRGFGSSAPEGLEPDSMASAASALHLLSPRPRPGPELGPQLGLDGGPGDGDRHNTPSLLEAALTQEASTPDSQVWPTAPDITRETCSTLAESPRNGLQEKHKSLAFHRPPYHLLQQRDSQDASAEQSDHDDEVASLASASGGFGTKVPAPRLPAKDWKTKGSPRTSPKLKRKSKKDDGDAAMGSRLTEHQVAEPPEDWPALIWQQQRELAELRHSQEELLQRLCTQLEGLQSTVTGHVERALETRHEQEQRRLERALAEGQQRGGQLQEQLTQQLSQALSSAVAGRLERSIRDEIKKTVPPCVSRSLEPMAGQLSNSVATKLTAVEGSMKENISKLLKSKNLTDAIARAAADTLQGPMQAAYREAFQSVVLPAFEKSCQAMFQQINDSFRLGTQEYLQQLESHMKSRKAREQEAREPVLAQLRGLVSTLQSATEQMAATVAGSVRAEVQHQLHVAVGSLQESILAQVQRIVKGEVSVALKEQQAAVTSSIMQAMRSAAGTPVPSAHLDCQAQQAHILQLLQQGHLNQAFQQALTAADLNLVLYVCETVDPAQVFGQPPCPLSQPVLLSLIQQLASDLGTRTDLKLSYLEEAVMHLDHSDPITRDHMGSVMAQVRQKLFQFLQAEPHNSLGKAARRLSLMLHGLVTPSLP

SEQ ID NO: 179401 - protein, 638 aa, Artificial Sequence
  derived and/or modified sequence
MPPINLQEKQVICLSGDDSSTCIGILAKEVEIVASSDSSISSKARGSNKVKIQPVAKYDWEQKYYYGNLIAVSNSFLAYAIRAANNGSAMVRVISVSTSERTLLKGFTGSVADLAFAHLNSPQLACLDEAGNLFVWRLALVNGKIQEEILVHIRQPEGTPLNHFRRIIWCPFIPEESEDCCEESSPTVALLHEDRAEVWDLDMLRSSHSTWPVDVSQIKQGFIVVKGHSTCLSEGALSPDGTVLATASHDGYVKFWQIYIEGQDEPRCLHEWKPHDGRPLSCLLFCDNHKKQDPDVPFWRFLITGADQNRELKMWCTVSWTCLQTIRFSPDIFSSVSVPPSLKVCLDLSAEYLILSDVQRKVLYVMELLQNQEEGHACFSSISEFLLTHPVLSFGIQVVSRCRLRHTEVLPAEEENDSLGADGTHGAGAMESAAGVLIKLFCVHTKALQDVQIRFQPQLNPDVVAPLPTHTAHEDFTFGESRPELGSEGLGSAAHGSQPDLRRIVELPAPADFLSLSSETKPKLMTPDAFMTPSASLQQITASPSSSSSGSSSSSSSSSSSLTAVSAMSSTSAVDPSLTRPPEELTLSPKLQLDGSLTMSSSGSLQASPRGLLPGLLPAPADKLTPKGPGQVCDWVCV

SEQ ID NO: 179402 - DNA, 4206 bp, Artificial Sequence
  derived and/or modified sequence
atggccagctgcgccagcatcgacatcgaggacgccacccagcacctgagagacatcctgaagctggacagacccgccggcggccccagcgccgagagccccagacccagcagcgcctacaacggcgacctgaacggcctgctggtgcccgaccccctgtgcagcggcgacagcaccagcgccaacaagaccggcctgagaaccatgccccccatcaacctgcaggagaagcaggtgatctgcctgagcggcgacgacagcagcacctgcatcggcatcctggccaaggaggtggagatcgtggccagcagcgacagcagcatcagcagcaaggccagaggcagcaacaaggtgaagatccagcccgtggccaagtacgactgggagcagaagtactactacggcaacctgatcgccgtgagcaacagcttcctggcctacgccatcagagccgccaacaacggcagcgccatggtgagagtgatcagcgtgagcaccagcgagagaaccctgctgaagggcttcaccggcagcgtggccgacctggccttcgcccacctgaacagcccccagctggcctgcctggacgaggccggcaacctgttcgtgtggagactggccctggtgaacggcaagatccaggaggagatcctggtgcacatcagacagcccgagggcacccccctgaaccacttcagaagaatcatctggtgccccttcatccccgaggagagcgaggactgctgcgaggagagcagccccaccgtggccctgctgcacgaggacagagccgaggtgtgggacctggacatgctgagaagcagccacagcacctggcccgtggacgtgagccagatcaagcagggcttcatcgtggtgaagggccacagcacctgcctgagcgagggcgccctgagccccgacggcaccgtgctggccaccgccagccacgacggctacgtgaagttctggcagatctacatcgagggccaggacgagcccagatgcctgcacgagtggaagccccacgacggcagacccctgagctgcctgctgttctgcgacaaccacaagaagcaggaccccgacgtgcccttctggagattcctgatcaccggcgccgaccagaacagagagctgaagatgtggtgcaccgtgagctggacctgcctgcagaccatcagattcagccccgacatcttcagcagcgtgagcgtgccccccagcctgaaggtgtgcctggacctgagcgccgagtacctgatcctgagcgacgtgcagagaaaggtgctgtacgtgatggagctgctgcagaaccaggaggagggccacgcctgcttcagcagcatcagcgagttcctgctgacccaccccgtgctgagcttcggcatccaggtggtgagcagatgcagactgagacacaccgaggtgctgcccgccgaggaggagaacgacagcctgggcgccgacggcacccacggcgccggcgccatggagagcgccgccggcgtgctgatcaagctgttctgcgtgcacaccaaggccctgcaggacgtgcagatcagattccagccccagctgaaccccgacgtggtggcccccctgcccacccacaccgcccacgaggacttcaccttcggcgagagcagacccgagctgggcagcgagggcctgggcagcgccgcccacggcagccagcccgacctgagaagaatcgtggagctgcccgcccccgccgacttcctgagcctgagcagcgagaccaagcccaagctgatgacccccgacgccttcatgacccccagcgccagcctgcagcagatcaccgccagccccagcagcagcagcagcggcagcagcagcagcagcagcagcagcagcagcagcctgaccgccgtgagcgccatgagcagcaccagcgccgtggaccccagcctgaccagaccccccgaggagctgaccctgagccccaagctgcagctggacggcagcctgaccatgagcagcagcggcagcctgcaggccagccccagaggcctgctgcccggcctgctgcccgcccccgccgacaagctgacccccaagggccccggccaggtgcccaccgccaccagcgccctgagcctggagctgcaggaggtggagcccctgggcctgccccaggccagccccagcagaaccagaagccccgacgtgatcagcagcgccagcaccgccctgagccaggacatccccgagatcgccagcgaggccctgagcagaggcttcggcagcagcgcccccgagggcctggagcccgacagcatggccagcgccgccagcgccctgcacctgctgagccccagacccagacccggccccgagctgggcccccagctgggcctggacggcggccccggcgacggcgacagacacaacacccccagcctgctggaggccgccctgacccaggaggccagcacccccgacagccaggtgtggcccaccgcccccgacatcaccagagagacctgcagcaccctggccgagagccccagaaacggcctgcaggagaagcacaagagcctggccttccacagacccccctaccacctgctgcagcagagagacagccaggacgccagcgccgagcagagcgaccacgacgacgaggtggccagcctggccagcgccagcggcggcttcggcaccaaggtgcccgcccccagactgcccgccaaggactggaagaccaagggcagccccagaaccagccccaagctgaagagaaagagcaagaaggacgacggcgacgccgccatgggcagcagactgaccgagcaccaggtggccgagccccccgaggactggcccgccctgatctggcagcagcagagagagctggccgagctgagacacagccaggaggagctgctgcagagactgtgcacccagctggagggcctgcagagcaccgtgaccggccacgtggagagagccctggagaccagacacgagcaggagcagagaagactggagagagccctggccgagggccagcagagaggcggccagctgcaggagcagctgacccagcagctgagccaggccctgagcagcgccgtggccggcagactggagagaagcatcagagacgagatcaagaagaccgtgcccccctgcgtgagcagaagcctggagcccatggccggccagctgagcaacagcgtggccaccaagctgaccgccgtggagggcagcatgaaggagaacatcagcaagctgctgaagagcaagaacctgaccgacgccatcgccagagccgccgccgacaccctgcagggccccatgcaggccgcctacagagaggccttccagagcgtggtgctgcccgccttcgagaagagctgccaggccatgttccagcagatcaacgacagcttcagactgggcacccaggagtacctgcagcagctggagagccacatgaagagcagaaaggccagagagcaggaggccagagagcccgtgctggcccagctgagaggcctggtgagcaccctgcagagcgccaccgagcagatggccgccaccgtggccggcagcgtgagagccgaggtgcagcaccagctgcacgtggccgtgggcagcctgcaggagagcatcctggcccaggtgcagagaatcgtgaagggcgaggtgagcgtggccctgaaggagcagcaggccgccgtgaccagcagcatcatgcaggccatgagaagcgccgccggcacccccgtgcccagcgcccacctggactgccaggcccagcaggcccacatcctgcagctgctgcagcagggccacctgaaccaggccttccagcaggccctgaccgccgccgacctgaacctggtgctgtacgtgtgcgagaccgtggaccccgcccaggtgttcggccagcccccctgccccctgagccagcccgtgctgctgagcctgatccagcagctggccagcgacctgggcaccagaaccgacctgaagctgagctacctggaggaggccgtgatgcacctggaccacagcgaccccatcaccagagaccacatgggcagcgtgatggcccaggtgagacagaagctgttccagttcctgcaggccgagccccacaacagcctgggcaaggccgccagaagactgagcctgatgctgcacggcctggtgacccccagcctgccctag

SEQ ID NO: 179403 - DNA, 1917 bp, Artificial Sequence
  derived and/or modified sequence
atgccccccatcaacctgcaggagaagcaggtgatctgcctgagcggcgacgacagcagcacctgcatcggcatcctggccaaggaggtggagatcgtggccagcagcgacagcagcatcagcagcaaggccagaggcagcaacaaggtgaagatccagcccgtggccaagtacgactgggagcagaagtactactacggcaacctgatcgccgtgagcaacagcttcctggcctacgccatcagagccgccaacaacggcagcgccatggtgagagtgatcagcgtgagcaccagcgagagaaccctgctgaagggcttcaccggcagcgtggccgacctggccttcgcccacctgaacagcccccagctggcctgcctggacgaggccggcaacctgttcgtgtggagactggccctggtgaacggcaagatccaggaggagatcctggtgcacatcagacagcccgagggcacccccctgaaccacttcagaagaatcatctggtgccccttcatccccgaggagagcgaggactgctgcgaggagagcagccccaccgtggccctgctgcacgaggacagagccgaggtgtgggacctggacatgctgagaagcagccacagcacctggcccgtggacgtgagccagatcaagcagggcttcatcgtggtgaagggccacagcacctgcctgagcgagggcgccctgagccccgacggcaccgtgctggccaccgccagccacgacggctacgtgaagttctggcagatctacatcgagggccaggacgagcccagatgcctgcacgagtggaagccccacgacggcagacccctgagctgcctgctgttctgcgacaaccacaagaagcaggaccccgacgtgcccttctggagattcctgatcaccggcgccgaccagaacagagagctgaagatgtggtgcaccgtgagctggacctgcctgcagaccatcagattcagccccgacatcttcagcagcgtgagcgtgccccccagcctgaaggtgtgcctggacctgagcgccgagtacctgatcctgagcgacgtgcagagaaaggtgctgtacgtgatggagctgctgcagaaccaggaggagggccacgcctgcttcagcagcatcagcgagttcctgctgacccaccccgtgctgagcttcggcatccaggtggtgagcagatgcagactgagacacaccgaggtgctgcccgccgaggaggagaacgacagcctgggcgccgacggcacccacggcgccggcgccatggagagcgccgccggcgtgctgatcaagctgttctgcgtgcacaccaaggccctgcaggacgtgcagatcagattccagccccagctgaaccccgacgtggtggcccccctgcccacccacaccgcccacgaggacttcaccttcggcgagagcagacccgagctgggcagcgagggcctgggcagcgccgcccacggcagccagcccgacctgagaagaatcgtggagctgcccgcccccgccgacttcctgagcctgagcagcgagaccaagcccaagctgatgacccccgacgccttcatgacccccagcgccagcctgcagcagatcaccgccagccccagcagcagcagcagcggcagcagcagcagcagcagcagcagcagcagcagcctgaccgccgtgagcgccatgagcagcaccagcgccgtggaccccagcctgaccagaccccccgaggagctgaccctgagccccaagctgcagctggacggcagcctgaccatgagcagcagcggcagcctgcaggccagccccagaggcctgctgcccggcctgctgcccgcccccgccgacaagctgacccccaagggccccggccaggtgtgcgactgggtgtgcgtgtag

SEQ ID NO: 179404 - DNA, 4751 bp, Artificial Sequence
  derived and/or modified sequence
ggaagtggaggcggttggtggggttggcggggctcagcgacgctgcgcgggtggcggtttgcgaactgcgggtggactgtgtagtgaccggcgtcccgctgtctcgccccgtggcgggtgagcgagggtgcgtggtgcgcggcggcggcggaacgaacgcggtgcgggcggggcgcccgccgcagggcccatggcctcctgcgcgagcatcgacatcgaggacgccacgcagcacctgcgggacatcctcaagctggaccggcccgcgggcggccccagtgcagagagcccacggccatccagtgcctacaatggggacctcaatggacttctggtcccagacccgctctgctcaggtgatagtacctcagcaaacaagactggtcttcggaccatgccacccattaacctgcaagagaagcaggtcatctgtctctcaggagatgatagctccacctgcattgggattttggccaaggaggtggagattgtggctagcagtgactctagcatttcaagcaaggcccggggaagcaacaaggtgaaaattcagcctgtcgccaagtatgactgggaacagaagtactactatggcaacctgattgctgtgtctaactccttcttggcctatgccattcgggctgccaacaatggctctgccatggtgcgggtgatcagcgtcagcacttcggagcggaccttgctcaagggcttcacaggcagtgtggctgatctggctttcgcgcacctcaactctccacagctggcctgcctggatgaggcaggcaacctgttcgtgtggcgcttggctctggttaatggcaaaattcaagaagagatcttggtccatattcggcagccagagggcacgccactgaaccactttcgcaggatcatctggtgccccttcatccctgaggagagcgaagactgctgtgaggagagcagcccaacagtggccctgctgcatgaagaccgggctgaggtgtgggacctggacatgctccgctccagccacagtacctggcctgtggatgttagccagatcaagcagggcttcattgtggtaaaaggtcatagcacgtgcctcagtgaaggagccctctctcctgatgggactgtgctggctactgcgagccacgatggctatgtcaagttctggcagatctacattgaggggcaagatgagccaaggtgtctgcacgagtggaaacctcatgatgggcggcccctctcctgcctcctgttctgtgacaaccataagaaacaagaccctgatgtccctttctggaggttccttattactggtgctgaccagaaccgagagttaaagatgtggtgtacagtatcctggacctgcctgcagactattcgcttctccccagatatcttcagctcagtgagtgtgccccctagcctcaaggtttgcttggacctctcagcagaatacctgattctcagcgatgtgcaacggaaggtcctctatgtgatggagctgctgcaaaaccaggaggagggccacgcctgcttcagctccatctcggagttcctgctcacccaccctgtgctgagctttggtatccaggttgtgagtcgctgccggctacggcacactgaggtgctgcctgccgaagaggaaaatgacagcctgggtgctgatggtacccatggagccggtgccatggagtctgcggccggtgtgctcatcaagctcttttgtgtgcatactaaggcactgcaagatgtgcagatccgcttccagccacagctgaaccctgatgtggtggccccactgcccacccacactgcccacgaggacttcacatttggagagtctcggcccgaactgggctctgagggcctggggtcagccgctcacggctcccagcctgacctccgacgaatcgtggagctgcctgcacctgccgacttcctcagtctgagcagtgagaccaagcccaagttgatgacacctgacgccttcatgacacctagcgcctccttgcagcagatcactgcctctcccagcagcagcagcagcggtagcagcagcagcagcagcagtagcagcagctcccttacagctgtgtctgccatgagcagcacctcagctgtggacccctccttgaccaggccacctgaggagctgaccttgagccccaagctgcagctggatggcagcctgacaatgagcagcagtggcagccttcaggcaagcccgcgtggcctcctgcctggcctgctcccagccccagctgacaaactgactcccaaggggccgggccaggtgcctactgccacctctgcactgtccctggagctgcaggaagtggagcccctggggctaccccaagcctcccctagccgcactcgttcccctgatgtcatctcctcagcttccactgccctgtcccaggacatccctgagattgcatctgaggccctgtcccgtggttttggctcctctgcaccagagggccttgagccagacagtatggcttcagccgcctcggcactgcacctgctgtccccacggccccggccagggcccgagctcggcccccagctcgggcttgatggaggccctggggatggagatcggcataataccccctccctcctggaggcagccttgacccaggaggcctcgactcctgacagtcaggtttggcccacagcacctgacattactcgtgagacctgcagcaccctggcagaaagccccaggaatggccttcaggaaaagcacaagagcctggccttccaccgaccaccatatcacctgctgcagcaacgtgacagccaggatgccagtgctgagcaaagtgaccatgatgatgaggtggccagccttgcctctgcttcaggaggctttggcaccaaagttcctgctccacggctgcctgccaaggactggaagaccaagggatcccctcgaacctcacccaagctcaagaggaaaagcaagaaggatgatggggatgcagccatgggatcccggctcacagagcaccaggtggcagagccccctgaggactggccagcactaatttggcaacagcagagagagctggcagagctgcggcacagccaggaagagctgctgcagcgtctgtgtacccaactcgaaggcctgcagagcacagtcacaggccacgtagaacgtgcccttgagactcggcacgagcaggaacagcggcggctggagcgagcactggctgaggggcagcagcggggagggcagctgcaggagcagctgacacaacagttgtcccaagcactgtcgtcagctgtagctgggcggctagagcgcagcatacgggatgagatcaagaagacagtccctccatgtgtctcaaggagtctggagcctatggcaggccaactgagcaactcagtggctaccaagctcacagctgtggagggcagcatgaaagagaacatctccaagctgctcaagtccaagaacttgactgatgccatcgcccgagcagctgcagacacattacaagggccgatgcaggctgcctaccgggaagccttccagagtgtggtgctgccggcctttgagaagagctgccaggccatgttccagcaaatcaatgatagcttccggctggggacacaggaatacttgcagcagctagaaagccacatgaagagccggaaggcacgggaacaggaggccagggagcctgtgctagcccagctgcggggcctggtcagcacactgcagagtgccactgagcagatggcagccaccgtggccggcagtgttcgtgctgaggtgcagcaccagctgcatgtggctgtgggcagcctgcaggagtccattttagcacaggtacagcgcatcgttaagggtgaggtgagtgtggcgctcaaggagcagcaggccgccgtcacctccagcatcatgcaggccatgcgctcagctgctggcacacctgtcccctctgcccaccttgactgccaggcccagcaagcccatatcctgcagctgctgcagcagggccacctcaatcaggccttccagcaggcgctgacagctgctgacctgaacctggtgctgtatgtgtgtgaaactgtggacccagcccaggtttttgggcagccaccctgcccgctctcccagcctgtgctcctttccctcatccagcagctggcatctgaccttggcactcgaactgacctcaagctcagctacctggaagaggccgtgatgcacctggaccacagtgaccccatcactcgggaccacatgggctccgttatggcccaggtgcgccaaaagctttttcagttcctgcaggctgagccacacaactcacttggcaaagcagctcggcgtctcagcctcatgctgcatggcctcgtgacccccagcctcccttagctgctaagcctgccttgcccaggggtgggatggcactgaaggccagcagacaggcctaggctggggcagggtcacggctggcctttacctgctcaggcccccatctctggggtgtttgggggtcagggagcagggagcactggccgtggtctacagcgtgtggtagtcagaaggtttagctgggcccagggcaggtattgcgcctgcttgggttctgccatgcctggagcatgaccctgagatcgtgacaccacttgagtggaattttccatgttcctttttacctctaatttggatctttttgtttttgaaaaacattgagaaattcaattaaatgcttttggaataaaatgga

SEQ ID NO: 179405 - DNA, 4206 bp, Artificial Sequence
  derived and/or modified sequence
atggccagctgcgcctcaatcgacatagaggatgcaacccagcacctccgggacatcctgaagctggatcgccccgccggcggacccagcgctgaatcaccccggccgtctagcgcatacaacggcgatctgaacggcctcctggtgcccgatccactgtgtagcggggactctacaagcgccaataagaccgggctgaggaccatgcctcccatcaaccttcaagagaagcaggtgatctgcttaagcggtgatgacagctccacgtgcatcgggattctggcaaaggaagttgaaatcgtcgccagtagcgatagttccatcagctctaaagctcggggttcaaataaggttaaaattcagcccgtggcaaaatacgattgggagcagaaatattactacgggaacctcatcgcagtcagtaactctttcctcgcctatgcaataagagcagccaacaacggaagcgccatggtgagagtcatcagcgtttcaaccagcgagcgtacccttctcaagggtttcactgggagtgttgcagacctggcgtttgcacacctgaactctccccagctcgcttgcctggacgaagctggcaacctcttcgtgtggcgattagcactggtgaacggaaaaatacaagaagagattctggtccatatcaggcagcccgaagggacaccactgaaccattttcgcagaatcatttggtgtcccttcattccagaggaatctgaggattgctgcgaggagagctctcctaccgtggccctcctgcatgaggatcgggccgaagtttgggacttggacatgttgcggtcttcacatagcacttggccggttgatgtgagtcagatcaagcagggctttatagtcgtgaaaggtcactccacgtgcctcagtgaaggggcactctcccccgatggcactgttctagctaccgcgtcgcatgatggctatgtgaaattctggcagatatacatcgagggccaagacgaaccacgctgcctgcatgagtggaagccgcacgacggcagaccactgtcatgccttctgttttgcgacaatcataaaaagcaagatccagatgtgcccttttggcggtttctcatcaccggtgcagatcagaatagagaactcaagatgtggtgtaccgtgtcttggacctgcctgcagacaataaggttctccccagacatcttctcttccgtctccgtgccaccatcccttaaagtatgcttggacctgtctgctgagtatctgattctgtcggatgtgcagagaaaggtgctgtatgtcatggaactactgcagaaccaagaagaaggccacgcatgctttagctccatctccgaattccttttgacgcaccctgtcctctcctttggaattcaggtggtctctcggtgccgcttgcgtcacacggaggtcctccccgctgaggaagagaacgacagcctaggagcagacggtacacacggcgcaggagctatggaaagcgccgctggggttctgatcaaactgttctgcgtgcatactaaggctctccaggacgtccagattcgattccaaccccagctgaaccccgacgttgtggcacccctgccaacccatacagcgcacgaggactttacgttcggcgagtcgcggcctgaactgggcagcgagggactgggatcagcggctcacggatctcagcccgatctcagacgcattgtggagctgcctgccccagcagactttctgtccctgtccagcgagaccaagccaaaactgatgacccccgacgcgttcatgactccaagcgcaagtctgcagcagatcactgctagtcccagctcatcgagtagcggcagttctagttcttcaagcagtagttcatcgagtctcacggcggtgtccgcaatgtcaagcacgtcggcggtagacccatctctgacgagacctcccgaagaactgaccctaagtccaaagctccagctggacggatcattgaccatgtcttcctcaggatcattgcaggcatcacctaggggcctcttacccggattactgccagctccagcggataagctcacccccaagggaccaggacaggtgcctacggctacttctgcattgtcactggagctacaggaggtcgaaccattaggcctaccccaagccagccccagtcggacacgctccccagacgtgatttcaagtgcgagtaccgcccttagtcaagacattcccgagatcgcctcggaggcactgtccagaggattcggatctagtgcccccgaaggattagagcccgattccatggcaagtgcggccagtgcacttcatctcctctccccaagaccgcgtccgggacccgagctgggaccgcagctgggcctggacggaggcccgggcgacggtgaccggcataataccccttctctactagaggccgctcttacgcaggaagcctctaccccagattcccaggtgtggccaactgcacctgacattactagggagacctgcagtacactggctgaaagtcctagaaacggactgcaggagaaacacaaatcactggccttccatcggcccccctatcacttactgcaacagagagattctcaggacgcttctgccgagcagtctgaccatgacgacgaggtcgccagtcttgctagcgcatctggaggctttggtaccaaagtgcctgccccacgcttgccagctaaggactggaaaacaaaaggcagtcccagaacatctcctaagttaaagcggaaatccaaaaaagatgatggcgacgcagccatgggctcaaggctgacagaacatcaagtcgccgaaccacccgaagattggcccgcactgatctggcagcagcagagagagcttgccgagctgaggcatagtcaggaggagttgttgcagcgcctctgcacccagctcgaagggctgcagtctaccgtaactggtcacgtggagagagcattagagacacgacatgagcaagagcagagaaggctcgagcgcgctctggcagagggacaacaaagaggaggccagctgcaggagcagttgacacagcaactgagccaagctctgtcctccgccgtagctgggcggctggaacggagcatccgagacgaaatcaaaaagactgtccccccatgtgttagccgatcactcgagcctatggccggacaactgtctaactcagtggcaacaaaactgactgccgtggaagggtctatgaaggagaatatttccaagttgctgaaaagcaaaaacctgactgacgccatcgcaagagccgctgctgacacacttcagggccctatgcaggcggcctaccgggaggcctttcaaagcgtcgtcctgcctgcctttgagaagagctgtcaggccatgttccagcaaattaacgattcattcaggctgggtacgcaggagtatctccagcagctggaaagccatatgaaatcccggaaggcccgcgagcaagaagctcgggagcctgtgctcgcccagttgcgaggactcgtgtcgacattacagtccgccacagagcagatggctgccactgtcgctggaagtgtgagggccgaagtacagcaccagctgcatgtggcagtaggctcacttcaggagtctatactggctcaggtccaacgcatcgtgaaaggcgaagtgagtgttgctcttaaggagcagcaggccgcagtgacgtcttcaattatgcaggccatgcgaagtgcagccgggaccccagtcccgagcgctcacctggactgtcaagcccaacaggcacacatccttcagctgctgcagcagggacacttaaatcaagcattccagcaagctcttaccgcggctgatctgaatcttgtgctgtacgtctgtgagaccgtggacccagcacaggtctttggacagcctccctgccccttgagtcagccagtgctactatctttgatccagcaactggcgtccgatcttggcacacggaccgatctaaagttgtcatatctggaggaggcggtgatgcacctcgatcacagcgacccaatcactagggatcatatgggatcagtgatggctcaggtcagacagaagctctttcagtttctccaggctgagccccataattctctaggcaaagctgcccggaggctgtcgctgatgctgcacggcctggtgaccccgtctcttccctag

SEQ ID NO: 179406 - DNA, 1917 bp, Artificial Sequence
  derived and/or modified sequence
atgccacccattaacttgcaggagaaacaggttatttgtttaagtggagatgatagctccacctgcataggcatattggctaaggaagtggaaatcgtggccagcagcgattcttctatatcgtctaaggctaggggctcaaacaaggtgaagatacagcctgtcgccaagtatgactgggaacagaagtactactacggtaatttaatcgctgtgagtaactcattccttgcctacgccattcgcgcggccaacaatgggtctgctatggtgcgagtgattagtgtctctacatccgagcgaacacttctcaaagggtttacagggtcggtggccgacttggctttcgctcacctgaatagccctcagctcgcttgtctggacgaagcgggaaatttattcgtctggcgacttgccctagttaatggcaaaatccaagaggagattctcgtacatattcgacaacctgaaggaacaccactgaatcattttcggagaataatctggtgccccttcataccggaggaatctgaagattgttgtgaagagtcatcacctacagtcgcgttacttcatgaggatcgggccgaggtgtgggacctggacatgctacgcagtagtcattccacctggccggtggacgttagtcaaatcaagcaggggtttattgtagtgaaggggcatagtacctgtctgagcgagggcgccttaagccccgacggaacagtcttagctactgcttcacatgatggctatgtgaaattttggcagatttacattgaaggacaggatgaaccacggtgcctccacgagtggaaacctcacgatggtcggcccctatcttgcttattattctgtgacaaccacaagaagcaggaccccgatgtgcccttctggcggttcctcatcacaggcgccgatcaaaatcgcgagctaaaaatgtggtgcacagtctcttggacatgtctgcagactattaggttttctccagacatattctctagcgtcagcgtccctccgtctctcaaggtgtgtctcgaccttagcgccgagtacctgatcttgagcgatgtgcagcgcaaggtcctgtacgtgatggagctgctacagaatcaggaggagggccatgcttgctttagttctatctctgagttcttactgactcatcccgtgttatctttcggtattcaggtggtgtcacggtgccggctgcgccacactgaggtgctgcccgccgaggaagagaatgactccctaggagcagacggcacgcacggggctggcgccatggaaagcgcggccggcgtcttgatcaagctgttttgcgtacacaccaaagcactacaggacgttcagatccgcttccagccacagctgaatcccgatgtcgtcgcccctctgcctacgcataccgcgcacgaagactttacattcggtgagagccgccccgagctcggctctgaaggcttggggagcgccgcgcatggctcacaaccagaccttaggcgaattgtagagttgcccgccccagccgacttcctgagtctgagtagcgaaactaagcctaaactgatgaccccggacgccttcatgacacccagtgcttctcttcagcagattacggcctctccttcatcaagcagctccggatcgtcctcttcgtcctctagtagttctagctctctgactgccgtttcggccatgtcctctacatcagccgtcgaccccagcctgacaaggccgcccgaagagctgacgctatcccccaaactgcagctagatggatcgcttacaatgtccagtagcggatccttacaggcaagccccagggggttacttccaggcctcctgcccgcacctgcagacaaacttacaccaaagggccctggccaggtgtgtgactgggtatgcgtttag

SEQ ID NO: 179407 - DNA, 4206 bp, Artificial Sequence
  derived and/or modified sequence
atggccagctgtgccagcattgatattgaagatgccacccagcacctgcgggacatcctgaagctggacaggcctgctgggggccccagcgctgagagcccccggcccagcagcgcctacaatggagacctgaatggcctgctggtgcctgaccccctgtgcagcggggacagcaccagcgccaacaagacaggcctgcggaccatgccacccatcaacctgcaggagaagcaggtgatctgcctgtctggagatgacagcagcacctgcatcggcatcctggccaaggaggtggagatcgtggccagcagtgacagcagcatcagcagcaaggcccggggcagcaacaaggtgaagatccagcctgtggccaagtatgactgggagcagaagtactactacggcaacctgattgctgtgagcaacagcttcctggcctatgccatccgggccgccaacaacggcagcgccatggtgcgggtcatctctgtgtccaccagcgagaggaccctgctgaagggcttcaccggctctgtggccgacctggcctttgcccacctgaacagcccccagctggcctgcctggatgaggccggcaacctgtttgtgtggaggctggccctggtgaatggcaagatccaggaggagatcctggtgcacatccggcagcctgagggcacccccctgaaccacttccgccgcatcatctggtgccccttcatccctgaggagagcgaggactgctgtgaggagagcagccccaccgtggccctgctgcatgaagatagagctgaggtgtgggacctggacatgctgcggagcagccacagcacctggcctgtggatgtgtcccagatcaagcagggcttcatcgtggtgaagggccacagcacctgcctgtctgagggcgccctgagcccagatggcaccgtgctggccacagccagccatgatggctacgtgaagttctggcagatctacatcgagggccaggatgagccccgctgcctgcacgagtggaagccccatgatggccggcccctgagctgcctgctcttctgtgacaaccacaagaagcaggaccctgatgtgcccttctggaggttcctgatcaccggggctgaccagaaccgggagctgaagatgtggtgcaccgtgtcctggacctgcctgcagaccatccgcttctccccagacatcttcagctctgtgtctgtgccccccagcctgaaggtgtgcctggacctgtctgctgagtacctgatcctgagtgatgtgcagaggaaggtgctgtatgtgatggagctgctgcagaaccaggaggagggccacgcctgcttcagcagcatcagcgagttcctgctgacccaccctgtgctgagctttggcatccaggtggtgagccgctgccgcctgcggcacacagaggtgctgcctgctgaggaggagaatgacagcctgggcgcagatggcacccatggagctggggccatggagagcgctgctggggtgctgatcaagctgttctgtgtgcacaccaaggccctgcaggatgtgcagatccgcttccagccccagctgaacccagatgtggtggcccccctgcccacccacacagcccacgaggacttcaccttcggggagagcaggcctgagctgggcagcgagggcctgggcagcgctgcccacggcagccagcctgacctgcggcgcatcgtggagctgcctgccccagctgacttcctgagcctgagcagcgagaccaagcccaagctgatgaccccagatgccttcatgacccccagcgccagcctgcagcagatcacagccagccccagcagcagcagcagcggcagcagcagcagcagcagcagcagcagcagcagcctgacagctgtgtctgccatgagcagcaccagcgctgtggaccccagcctgaccaggcctcctgaggagctgaccctgagccccaagctgcagctggatggcagcctgaccatgagcagcagcggcagcctgcaggccagcccccggggcctgctgcccggcctgctgcctgccccagctgacaagctgacccccaagggccctggccaggtgcccacagccaccagcgccctgagcctggagctgcaggaggtggagcccctgggcctgccccaggccagccccagcaggaccaggagcccagatgtgatcagcagcgccagcacagccctgagccaggacatccctgagatcgccagcgaggccctgagccggggcttcggcagcagcgcccctgagggcctggagccagacagcatggccagcgctgccagcgccctgcacctgctgagcccccggcccaggcctggccctgagctgggcccccagctgggcctggatggcggccctggagatggagacagacacaacacccccagcctgctggaggccgccctgacccaggaggccagcaccccagacagccaggtgtggcccacagccccagacatcacccgggagacctgcagcaccctggccgagagccccagaaatggcctgcaggagaagcacaagagcctggccttccacaggcctccctaccacctgctgcagcagagggacagccaggatgccagcgctgagcagagcgaccatgatgatgaggtggccagcctggccagcgccagcggcggcttcggcaccaaggtgcctgccccccggctgcctgccaaggactggaagaccaagggcagccccaggaccagccccaagctgaagaggaagagcaagaaggatgatggagatgctgccatgggcagccggctgacagagcaccaggtggccgagcccccagaggactggccagccctgatctggcagcagcagcgggagctggccgagctgcggcacagccaggaggagctgctgcagaggctgtgcacccagctggagggcctgcagagcacagtgactggacatgtggagcgggccctggagaccaggcatgagcaggagcagaggcggctggagcgggccctggccgagggccagcagaggggcggccagctgcaggagcagctgacccagcagctgagccaggccctgagcagcgctgtggccggccgcctggagaggagcatcagagatgagatcaagaagacagtgcccccctgtgtgagccgcagcctggagcccatggccggccagctgagcaacagcgtggccaccaagctgacagctgtggagggctccatgaaggagaacatcagcaagctgctgaagagcaagaacctgacagatgccatcgcccgggctgctgctgacaccctgcagggccccatgcaggccgcctaccgggaggccttccagagcgtggtgctgcctgcctttgagaagagctgccaggccatgttccagcagatcaatgacagcttccggctgggcacccaggagtacctgcagcagctggagagccacatgaagagcaggaaggcccgggagcaggaggcccgggagcctgtgctggcccagctgcggggcctggtgtccaccctgcagagcgccacagagcagatggccgccaccgtggccggctctgtgcgggcagaggtgcagcaccagctgcacgtggccgtgggcagcctgcaggagagcatcctggcccaggtgcagagaattgtgaagggggaggtgtctgtggccctgaaggagcagcaggccgctgtgaccagcagcatcatgcaggccatgaggtctgctgctggcacccctgtgcccagcgcccacctggactgccaggcccagcaggcccacatcctgcagctgctgcagcagggccacctgaaccaggccttccagcaggccctgacagctgctgacctgaacctggtgctgtatgtgtgtgaaacagtggaccctgcccaggtgtttggccagcccccctgccccctgagccagcctgtgctgctgagcctcatccagcagctggccagtgacctgggcaccaggacagacctgaagctgagctacctggaggaggccgtgatgcacctggaccacagcgaccccatcacccgggaccacatgggctctgtgatggcccaggtgcggcagaagctgttccagttcctgcaggccgagccccacaacagcctgggcaaggccgcccggcggctgagcctgatgctgcacggcctggtgacccccagcctgccctag

SEQ ID NO: 179408 - DNA, 1917 bp, Artificial Sequence
  derived and/or modified sequence
atgccacccatcaacctgcaggagaagcaggtgatctgcctgtctggagatgacagcagcacctgcatcggcatcctggccaaggaggtggagatcgtggccagcagtgacagcagcatcagcagcaaggcccggggcagcaacaaggtgaagatccagcctgtggccaagtatgactgggagcagaagtactactacggcaacctgattgctgtgagcaacagcttcctggcctatgccatccgggccgccaacaacggcagcgccatggtgcgggtcatctctgtgtccaccagcgagaggaccctgctgaagggcttcaccggctctgtggccgacctggcctttgcccacctgaacagcccccagctggcctgcctggatgaggccggcaacctgtttgtgtggaggctggccctggtgaatggcaagatccaggaggagatcctggtgcacatccggcagcctgagggcacccccctgaaccacttccgccgcatcatctggtgccccttcatccctgaggagagcgaggactgctgtgaggagagcagccccaccgtggccctgctgcatgaagatagagctgaggtgtgggacctggacatgctgcggagcagccacagcacctggcctgtggatgtgtcccagatcaagcagggcttcatcgtggtgaagggccacagcacctgcctgtctgagggcgccctgagcccagatggcaccgtgctggccacagccagccatgatggctacgtgaagttctggcagatctacatcgagggccaggatgagccccgctgcctgcacgagtggaagccccatgatggccggcccctgagctgcctgctcttctgtgacaaccacaagaagcaggaccctgatgtgcccttctggaggttcctgatcaccggggctgaccagaaccgggagctgaagatgtggtgcaccgtgtcctggacctgcctgcagaccatccgcttctccccagacatcttcagctctgtgtctgtgccccccagcctgaaggtgtgcctggacctgtctgctgagtacctgatcctgagtgatgtgcagaggaaggtgctgtatgtgatggagctgctgcagaaccaggaggagggccacgcctgcttcagcagcatcagcgagttcctgctgacccaccctgtgctgagctttggcatccaggtggtgagccgctgccgcctgcggcacacagaggtgctgcctgctgaggaggagaatgacagcctgggcgcagatggcacccatggagctggggccatggagagcgctgctggggtgctgatcaagctgttctgtgtgcacaccaaggccctgcaggatgtgcagatccgcttccagccccagctgaacccagatgtggtggcccccctgcccacccacacagcccacgaggacttcaccttcggggagagcaggcctgagctgggcagcgagggcctgggcagcgctgcccacggcagccagcctgacctgcggcgcatcgtggagctgcctgccccagctgacttcctgagcctgagcagcgagaccaagcccaagctgatgaccccagatgccttcatgacccccagcgccagcctgcagcagatcacagccagccccagcagcagcagcagcggcagcagcagcagcagcagcagcagcagcagcagcctgacagctgtgtctgccatgagcagcaccagcgctgtggaccccagcctgaccaggcctcctgaggagctgaccctgagccccaagctgcagctggatggcagcctgaccatgagcagcagcggcagcctgcaggccagcccccggggcctgctgcccggcctgctgcctgccccagctgacaagctgacccccaagggccctggccaggtgtgtgactgggtgtgtgtgtag

SEQ ID NO: 179409 - DNA, 4206 bp, Artificial Sequence
  derived and/or modified sequence
atggccagctgcgccagcatcgacatcgaggacgccacccagcacctgcgagacattctcaagctggatagaccagccggcggccccagtgctgaatctcctaggccaagctccgcatacaatggcgacttgaatgggctgctggtgcctgacccgctctgctccggggattcgacatctgcaaataagaccggcctgagaaccatgccccctatcaatctgcaggaaaaacaggtcatttgtctttcgggggacgattcatcaacctgtattggcatcctagcaaaagaggtggagattgtggcatcgagcgacagttcaatcagtagcaaagctcgcggatctaataaggtaaagattcagcccgttgctaagtacgattgggaacagaagtactactatggcaacttgatcgccgtaagtaatagctttttggcctatgccatcagagccgccaataacggcagtgcaatggtcagggtcatcagcgtatcaacatcggagcgcactctcctgaaaggtttcaccggctccgtggcagatctagctttcgctcacctgaacagcccacagttggcgtgcctggacgaggcagggaacttattcgtgtggcgtctggccctggtaaatgggaagatccaggaggagatcctggttcacatccggcagccggaaggtacacctctcaatcacttccggcgcatcatatggtgcccctttattcccgaggagtccgaggactgttgcgaggagtccagcccaactgtggcgctgcttcacgaagaccgggcagaggtctgggacctggacatgctacgctcctctcatagtacatggccagtggacgtctcacaaatcaaacagggctttattgtggtgaaagggcattccacctgcctgtcggagggagccctctcaccagatggtactgtgctggccacggcttcgcacgatggctacgtgaaattttggcagatctacattgaggggcaagatgaacccagatgcctacacgagtggaaaccccacgatggcagaccactttcatgtctgctgttttgcgacaatcataaaaagcaagaccctgacgtaccgttttggcgcttcttaattaccggagccgatcagaacagggaactgaagatgtggtgcacagtgtcttggacttgcttacagaccattagatttagtccggacattttctcaagtgtgtcggtcccccctagccttaaagtctgtctcgacctgagtgcagagtacctaattctatctgatgtccaacgcaaggtcctgtacgtgatggaattactgcagaaccaggaagaagggcacgcctgtttttcaagtatatcggaattcctcctaactcacccagttctgtcctttgggatccaggtggtaagtaggtgccgcctccgccataccgaggttctgcctgcagaggaagagaatgattcactaggggccgacgggactcacggcgcgggtgcaatggagtctgccgcgggcgtgctgatcaagcttttctgcgtccacacaaaggccctccaggatgtgcagatccgttttcagccccaattgaatccagacgtggtggcccccctgcctactcacacagctcatgaagattttacctttggggagagccgaccggaattagggtccgagggacttggttcagccgcccatggtagccaacctgacctcagacgaatagtggaattacccgctcccgccgacttcctttctctgtcgtccgagaccaaaccaaaattgatgactccggacgcgttcatgacgcccagcgccagtctgcagcagataactgcatcgccaagctcctctagttctggctcgagttcatcttctagcagttcaagtagctctctgacggcagtgagcgccatgtcctctacgtcagctgttgatccttctcttaccagacctccagaggagctgacactatcccctaaactacagctggacggctctttgactatgagctcatccggaagcctgcaggcgtctcctcgaggcttgctgcccgggctcctgccggctcccgctgataagctcactcctaagggtcccgggcaagtgcccactgctacatcggccctgagcttggagctccaggaggtcgagccactggggttaccacaggcttctccatctcggacgagatctcccgacgtaatcagttctgcctccaccgccctatcccaagatatccccgagattgctagcgaagctctttcgcggggattcggctctagtgcacccgagggtttagaaccagactcgatggcttcggccgcaagtgcccttcaccttttgtcccccaggccaaggccaggaccggagctcggaccccagcttggcctggacggaggccctggcgacggagaccgtcataacacaccatccctgctggaggcggcactcacccaggaagccagtacccctgactcacaggtgtggccaactgcaccagacatcactagggaaacttgctcaaccctggctgagtcacctcgaaatggcctgcaagaaaaacacaagagcttggctttccataggcctccttatcaccttctacagcagcgcgatagccaggacgcgtcagcagagcaaagtgatcacgatgatgaggtagcttctctcgccagcgcatccggtgggtttggtaccaaagttcctgcacccaggctgccagcaaaggattggaagactaaggggtcccccagaacctcacccaagctcaagcgcaagagtaagaaggacgatggcgatgccgccatgggaagcaggctgactgaacatcaggtggctgagccccccgaagactggcccgcacttatctggcagcagcagcgcgagctcgctgagctgcgccacagccaggaagaattgctccaacggctctgcacacaactggaaggacttcaaagtactgtgaccgggcatgtcgagcgtgccctggagacccgccatgaacaagagcagcgacgcctcgagcgggccctggccgaaggacaacaaaggggggggcagctccaggaacagctcacacagcaactgagtcaggctctttcgtccgctgtggccggaagattggagcgcagcatccgggacgaaataaagaagactgtgccgccttgtgtgagccggtctctggagccgatggctggccagttgtccaatagcgttgccaccaagttgaccgccgtagaagggtccatgaaagaaaacatcagtaagctgttaaaaagcaagaacctgacagatgctattgcaagagccgcagccgacacgctgcaagggcccatgcaggccgcctaccgggaggcctttcagagcgtggtccttccagcgttcgagaaatcctgtcaggcaatgtttcagcagatcaacgatagtttccgcttaggaacacaggagtacctgcagcagctggagtcacacatgaaatcccggaaggccagggagcaggaagctagagagcccgtgctggcccagttgcggggcctcgtgagcacactgcaatctgcaaccgagcagatggcggccaccgtggcaggatctgtgcgtgcagaggtacagcaccagctgcatgtggcagtcgggtccctgcaggagtccatattagcacaggttcagagaattgtgaaaggtgaagtatctgtggccctcaaagagcaacaagcagcagtgaccagctccattatgcaggctatgcgatcagccgccggaacccccgtacccagcgcccacctggactgccaggctcagcaggcacacattcttcagctgttacaacaaggccatctcaaccaggcatttcagcaggccctcacagcggcagacctaaatcttgtactgtatgtgtgcgagacggtggacccggctcaggtatttggccagccgccatgcccactgagccagccagtgctcctgtccctcatccagcagctggcctctgatcttggaactcggaccgacctgaagttgtcctaccttgaggaggcagtgatgcacctcgaccactctgacccaataacccgcgaccacatgggcagtgtgatggctcaggtcaggcaaaagttatttcagttcctgcaggccgagccccacaattcactcggtaaagcagcaaggcgtctgtctttaatgcttcacgggttggtaactccctcactcccctag

SEQ ID NO: 179410 - DNA, 1917 bp, Artificial Sequence
  derived and/or modified sequence
atgccccccatcaacctgcaggagaagcaggtgatctgcctgagcggtgatgatagcagtacatgcattggaattctggccaaagaggtggagattgtcgcatcttccgactcctcaattagctcgaaagctagaggctctaataaggtgaaaatccaacccgtcgcaaaatatgattgggagcagaaatattactatgggaatctcatcgccgtgtcaaactcatttctggcatacgcaatccgggccgccaacaacggatctgccatggtgagggtaatctcggtctccaccagcgaaagaaccctgctgaaaggatttacaggtagcgttgctgatctggcttttgctcatctcaattccccacagcttgcctgccttgatgaggccgggaaccttttcgtgtggcgattggccctggtaaatgggaaaatccaggaagagatcttggtccacatccgtcaaccagaaggtactccgctaaatcattttcgccgcatcatctggtgtcctttcattcctgaagaatcagaagattgttgcgaagagtcttccccaactgtggcattgttgcacgaggatagagcggaagtctgggatcttgacatgctccggtcgagccattcgacctggcctgtggacgtgtctcaaattaagcagggctttatcgttgtgaaggggcattctacttgtctgagtgagggggccctgtcaccagacgggacagtcttagcgaccgcctcacacgatggctatgtcaagttttggcagatttatatcgaaggccaggatgagccaaggtgcttgcatgagtggaaaccccacgatggccgccccctctcctgtttattgttttgtgacaatcacaagaagcaggatccagacgtgccattctggcgctttctgatcactggggccgatcagaacagggaattaaaaatgtggtgtaccgtgtcttggacgtgcttgcaaacaatcaggttcagtccagatatcttctctagcgttagtgtgccaccctccctgaaggtctgcctggatctgtccgccgagtatctcatcctgagcgacgttcagaggaaggtgctctacgtcatggaacttctccaaaaccaggaggagggtcatgcatgcttttcttccatctccgagtttttgctgactcatcccgtgttgtctttcggtattcaggtcgtctcccggtgcagactcaggcacaccgaggtgctgcctgcagaggaggaaaacgatagtctgggagctgacggcacccacggagccggcgcgatggagagcgctgccggagtgttgattaaactcttctgcgtacacacgaaggctctccaagatgtgcagatacgtttccaaccacagcttaaccctgacgtggtggcccccctgccaacccacacagcccacgaggattttaccttcggtgagtctcggccagaacttggttccgagggtctaggctctgctgcacacggctctcagccagacttgagaagaatagtggagcttccagcaccagccgactttctgagcctatcttccgagacaaagcccaagctaatgaccccagacgcctttatgaccccctccgcttcattacagcagattacggcctcgccaagcagttcaagctctggttcctcctcttcttctagctcatctagttcttcattaacagcggtttccgctatgtcctcaacgtccgctgtcgatcccagcttgacacggccacctgaggagctaactctatcaccgaagctgcagctggacgggagcctgaccatgtcatcatctgggagtctgcaggcatcaccgcgcggtcttctgcctgggttacttcccgcacctgcagataagcttactcctaaggggcctggacaggtttgcgactgggtgtgcgtgtag

SEQ ID NO: 179411 - DNA, 4206 bp, Artificial Sequence
  derived and/or modified sequence
atggcatcttgcgcatctatcgacattgaagatgcgacccaacatttgagagatatcctaaagctggatcggccagccggtggtccaagtgccgaaagtcctcggcctagctccgcgtataatggggacttgaatggcttgctcgtgccagacccactgtgcagcggagattctacatctgcaaacaaaactgggctccgaaccatgccacccatcaacctgcaagaaaagcaggtgatttgcctttccggtgatgacagttcaacctgtatcggaattctcgccaaagaggttgaaatcgtcgcctctagcgactccagtatctcatctaaggcccgtgggagcaacaaggtcaagatccagcctgtggccaaatatgattgggaacaaaaatattattacggaaatttaatcgctgtcagcaattcatttttggcttacgctattcgcgcagctaataacggttccgctatggtccgcgtgatcagcgtgagcacatccgagcggacgcttctgaaggggttcaccgggtcagtagcagacctggctttcgcgcacctaaattcaccccagctggcctgcctcgatgaagccggaaacttgttcgtctggcgactggcattagtgaatggcaaaattcaggaagagatcctggtccacatccgccagccagagggcaccccacttaatcatttccggcgaattatctggtgcccttttattccggaagaatcagaggactgttgtgaggagagctcacccaccgttgcgctattacacgaggacagagcagaggtgtgggatctcgatatgctgcgatcttctcactccacatggccggttgatgttagtcaaataaagcagggcttcatagtggttaagggtcactccacatgcctgtcagagggtgccctaagccccgatggaaccgtgctcgcgacggcctctcacgatgggtacgttaagttctggcaaatctacatagagggtcaggacgagcccaggtgtctgcatgagtggaagccgcacgacggtcgacctctctcttgtctcctattctgtgacaaccacaagaaacaggaccctgatgttcctttttggaggttccttatcaccggagcagaccaaaatagagaactgaagatgtggtgtactgtgagttggacctgcctgcaaacaattcgatttagcccagatatatttagttctgtgagcgttccaccatctctcaaggtttgcctagatctgtcagctgagtatctgattttgagcgacgtgcaaagaaaagtcctatatgtaatggaactgctccagaatcaggaggagggtcatgcatgctttagcagcatttctgagtttttattaactcatcctgtcctgagctttggcattcaggtcgttagccgatgtcggctccgacatactgaggtcctgcccgctgaagaggaaaatgacagcttgggcgcagatggcactcatggtgccggagcgatggagagtgcagcaggcgtcctgatcaagctcttctgtgttcacaccaaggcactgcaggacgttcagattcggttccagccacagctgaaccctgacgttgtcgcaccactccccacgcatacagctcacgaggacttcacctttggggagtcacggcctgagttggggtctgaaggcttgggatctgcagcacatggttcccagcccgacctcagaagaattgtggagctcccagctccagcagacttcctctctctgtccagcgaaactaagcctaagctgatgacaccagatgccttcatgacacccagcgccagcttacagcagattaccgcctccccaagttcaagcagcagtgggtcttcttctagctcatccagttccagcagctctctgacagcagtcagcgctatgagttccacttccgcggtggatcccagcctgacaagaccaccagaggagctgacactgagcccaaagctccaactggatggcagcttgacaatgtcttcttctgggtccctgcaggcgtcaccacggggtctgttacctgggctgttaccagccccagctgacaagctgacccctaagggtcctggacaagtgcccaccgccacttccgccctcagtctggaattacaggaggtggagcctctgggtttgccccaggcatcccctagtaggacgaggagccctgacgttatctcctctgctagtaccgctctgagtcaagatattccagagatcgcctcggaggccttgagcagaggcttcggatccagcgctcccgaagggcttgagccagattccatggccagcgcagcatccgcactgcatctcctcagtcccagacctcgcccaggtccagagttaggtccacagcttggcctggacgggggaccaggcgatggtgataggcacaacacacccagtctgctggaggcagcgttaacccaagaggcaagtacaccggattctcaagtctggcctacagccccagatattactagggagacatgcagcacgctggccgagagtcccagaaacggactgcaagaaaaacataagagtctggcctttcatcgcccaccttatcatctgttgcaacagcgcgactcacaggacgctagtgccgagcagtcagaccatgacgacgaggtggcctccctggcttctgctagcggtggcttcggcaccaaggtgcctgcacccagactacccgctaaagactggaagaccaaggggtctccgagaaccagtccgaaattgaaaaggaagagcaagaaggatgacggagatgcagcaatgggctccaggctgaccgaacaccaggttgctgagcctccggaggactggcctgctttgatctggcagcagcaaagagaactagcggagctgagacattcccaggaggagcttctgcaaagactgtgcactcagctggaaggacttcagtctacagtgaccggccacgttgagcgtgccctggaaacgcggcacgaacaagagcagagacgtctagagagagcccttgcagagggtcagcagaggggaggccagctgcaggagcaattgactcagcagctgtcgcaggctctctccagcgctgttgccggtcggctagagagatcaatcagggacgaaatcaagaagaccgtccccccttgcgtttctcggtccttggaacctatggcaggccaactctccaacagcgtcgctacaaagctcaccgcagtcgaggggtccatgaaggaaaacatttcaaagctcctcaaatccaagaacttgactgatgccattgcgagggccgcagcagacaccctgcaggggcctatgcaggctgcctatcgcgaggcattccagagtgtagttttaccagccttcgagaaatcttgccaggccatgtttcagcagatcaatgacagctttcggcttggcacccaggaatacttacagcagctggaatcccatatgaagagtcggaaggccagagagcaggaggcgcgtgaacccgtgttagcccagcttagaggtttggttagtactcttcagtctgctacagaacagatggccgcaacagtggccggatctgtgcgcgctgaagtacagcaccagctccacgttgccgtcgggtcattgcaagagagcatcttggcccaggtccagcggatcgtcaagggggaagtgtctgtggctctaaaggagcagcaggcagccgtaacatcttcgatcatgcaggcaatgcgatcagcagcagggaccccggtgccatcagcacatttggactgtcaggcacagcaagcacacatactccaactgcttcagcaaggccacctgaatcaggcattccagcaggccctaacagcagccgatcttaacctggttctctacgtgtgtgagacggttgatccggcacaggtgtttggccagccgccttgccctttgtcccaaccggtgctgttaagcctgatccaacaactggcaagtgacttagggacccgtacggatttgaaacttagttatcttgaggaagcggtgatgcacctcgaccattctgatcccataactagagaccacatggggtccgtgatggcccaggtacgtcagaagctgtttcagtttctgcaggcagagccccacaactctctcggaaaagccgcacgccgactttcactgatgttgcacggactggttacccctagcttgccatag

SEQ ID NO: 179412 - DNA, 1917 bp, Artificial Sequence
  derived and/or modified sequence
atgccacccattaacctgcaggagaaacaggtgatctgtctgtcaggagatgacagttctacttgcataggaatcctggcaaaagaggttgaaattgtcgccagcagtgatagcagcatctcatctaaggcacggggaagtaacaaagtcaagatccaaccggttgctaagtatgattgggaacagaagtattactatggaaacctcattgctgtatctaactcattcctggcgtatgctattcgggctgcaaataatggaagcgcaatggtgcgggttatctctgtgagcaccagcgaacgcactttacttaaaggcttcaccggttcagtcgccgacctggcctttgcacatctgaacagtccacaactggcatgtctggacgaagccggaaacctcttcgtttggaggttggcgctggtcaacggcaagatccaggaagagatcctcgttcacattaggcaaccagagggaacaccactcaatcacttccggagaataatttggtgcccatttatcccggaagagagtgaggactgctgcgaggaatcttcccccacagtcgcccttctgcatgaagatcgggcagaggtgtgggaccttgacatgttgcgcagtagccatagtacatggccagtcgacgtttcgcaaataaaacagggctttatcgtggtgaagggtcactccacatgtctctctgaaggcgcactttcccctgatggcaccgtgctggctaccgcaagccatgatggatacgtaaagttctggcagatctacattgagggccaggacgagccaaggtgtctccacgaatggaaaccacatgatgggcgtcctctgagttgtctgctgttttgtgataaccacaaaaagcaggatcctgacgtccctttctggcggtttctgattacaggagctgaccagaaccgggaacttaaaatgtggtgtaccgtgagctggacttgcctccagaccattaggttctctcctgatattttcagctccgttagcgttccaccttctctcaaggtttgcctcgacctaagtgctgaatatctcatcctgtcggacgtgcagcgcaaggtgctctatgtaatggagctgcttcagaatcaggaggaaggacacgcctgctttagctcaatttctgagtttctcctgactcatcccgtgctaagcttcggtatccaggtggtctccaggtgtcgtctgcgccatacagaggtcctccccgctgaggaagagaacgattctttgggtgccgacggaactcacggggcaggagcaatggaatcagctgcaggggtactcataaagctcttctgtgttcacaccaaggctctgcaggacgtccagattcggtttcagcctcaacttaaccctgacgtggtggcgcctctaccaacccatacagcccacgaagatttcactttcggcgaatcacggccagagctgggatccgaagggctgggcagcgctgcccatgggagtcaaccagacctcaggcggattgtagagttgccagctcctgccgacttcctgtctctgagttctgagactaagcccaagttaatgacccccgacgcattcatgaccccatctgcaagcctccagcagatcaccgctagcccgtctagctccagcagcggctcctcatcctcctcctcttccagttcatcttctctgacagctgtgtcagccatgtccagcacatccgcagttgacccctctctcacccgaccgcctgaagaactgacgctgtcaccaaaactgcagctcgatgggtccctgaccatgtcttcttcaggaagtctccaggctagccctcgtgggctgttgcctgggctgctgccagctcccgctgacaaattgactcctaagggacctggacaggtctgtgattgggtttgtgtctag

SEQ ID NO: 179413 - DNA, 2256 bp, Artificial Sequence
  derived and/or modified sequence
aggcgagctgacaaaagggcggcgcgcgtctgaaccgccattggggcccacagctcccttaggactagctctggatcctcccggcgggccccagtgcagagagcccacggccatccagtgcctacaatggggacctcaatggacttctggtcccagacccgctctgctcaggtgatagtacctcagcaaacaagactggtcttcggaccatgccacccattaacctgcaagagaagcaggtcatctgtctctcaggagatgatagctccacctgcattgggattttggccaaggaggtggagattgtggctagcagtgactctagcatttcaagcaaggcccggggaagcaacaaggtgaaaattcagcctgtcgccaagtatgactgggaacagaagtactactatggcaacctgattgctgtgtctaactccttcttggcctatgccattcgggctgccaacaatggctctgccatggtgcgggtgatcagcgtcagcacttcggagcggaccttgctcaagggcttcacaggcagtgtggctgatctggctttcgcgcacctcaactctccacagctggcctgcctggatgaggcaggcaacctgttcgtgtggcgcttggctctggttaatggcaaaattcaagaagagatcttggtccatattcggcagccagagggcacgccactgaaccactttcgcaggatcatctggtgccccttcatccctgaggagagcgaagactgctgtgaggagagcagcccaacagtggccctgctgcatgaagaccgggctgaggtgtgggacctggacatgctccgctccagccacagtacctggcctgtggatgttagccagatcaagcagggcttcattgtggtaaaaggtcatagcacgtgcctcagtgaaggagccctctctcctgatgggactgtgctggctactgcgagccacgatggctatgtcaagttctggcagatctacattgaggggcaagatgagccaaggtgtctgcacgagtggaaacctcatgatgggcggcccctctcctgcctcctgttctgtgacaaccataagaaacaagaccctgatgtccctttctggaggttccttattactggtgctgaccagaaccgagagttaaagatgtggtgtacagtatcctggacctgcctgcagactattcgcttctccccagatatcttcagctcagtgagtgtgccccctagcctcaaggtttgcttggacctctcagcagaatacctgattctcagcgatgtgcaacggaaggtcctctatgtgatggagctgctgcaaaaccaggaggagggccacgcctgcttcagctccatctcggagttcctgctcacccaccctgtgctgagctttggtatccaggttgtgagtcgctgccggctacggcacactgaggtgctgcctgccgaagaggaaaatgacagcctgggtgctgatggtacccatggagccggtgccatggagtctgcggccggtgtgctcatcaagctcttttgtgtgcatactaaggcactgcaagatgtgcagatccgcttccagccacagctgaaccctgatgtggtggccccactgcccacccacactgcccacgaggacttcacatttggagagtctcggcccgaactgggctctgagggcctggggtcagccgctcacggctcccagcctgacctccgacgaatcgtggagctgcctgcacctgccgacttcctcagtctgagcagtgagaccaagcccaagttgatgacacctgacgccttcatgacacctagcgcctccttgcagcagatcactgcctctcccagcagcagcagcagcggtagcagcagcagcagcagcagtagcagcagctcccttacagctgtgtctgccatgagcagcacctcagctgtggacccctccttgaccaggccacctgaggagctgaccttgagccccaagctgcagctggatggcagcctgacaatgagcagcagtggcagccttcaggcaagcccgcgtggcctcctgcctggcctgctcccagccccagctgacaaactgactcccaaggggccgggccaggtgtgtgactgggtgtgtgtgtgaagtgtggggagcaggtgggcagcagcagggaaggtgggtggtgggctcctcccagccccctgctgctgatcctgctctacccgacatggtccgtgtttccctgaggtcatttcaccctcctgtgtttcct

SEQ ID NO: 179414 - protein, 674 aa, Artificial Sequence
  derived and/or modified sequence
MAPGQAPHQATPWRDAHPFFLLSPVMGLLSRAWSRLRGLGPLEPWLVEAVKGAALVEAGLEGEARTPLAIPHTPWGRRPEEEAEDSGGPGEDRETLGLKTSSSLPEAWGLLDDDDGMYGEREATSVPRGQGSQFADGQRAPLSPSLLIRTLQGSDKNPGEEKAEEEGVAEEEGVNKFSYPPSHRECCPAVEEEDDEEAVKKEAHRTSTSALSPGSKPSTWVSCPGEEENQATEDKRTERSKGARKTSVSPRSSGSDPRSWEYRSGEASEEKEEKAHKETGKGEAAPGPQSSAPAQRPQLKSWWCQPSDEEEGEVKALGAAEKDGEAECPPCIPPPSAFLKAWVYWPGEDTEEEEDEEEDEDSDSGSDEEEGEAEASSSTPATGVFLKSWVYQPGEDTEEEEDEDSDTGSAEDEREAETSASTPPASAFLKAWVYRPGEDTEEEEDEDVDSEDKEDDSEAALGEAESDPHPSHPDQRAHFRGWGYRPGKETEEEEAAEDWGEAEPCPFRVAIYVPGEKPPPPWAPPRLPLRLQRRLKRPETPTHDPDPETPLKARKVRFSEKVTVHFLAVWAGPAQAARQGPWEQLARDRSRFARRITQAQEELSPCLTPAARARAWARLRNPPLAPIPALTQTLPSSSVPSSPVQTTPLSQAVATPSRSSAAAAAALDLSGRRG

SEQ ID NO: 179415 - protein, 514 aa, Artificial Sequence
  derived and/or modified sequence
MKAEEEGVAEEEGVNKFSYPPSHRECCPAVEEEDDEEAVKKEAHRTSTSALSPGSKPSTWVSCPGEEENQATEDKRTERSKGARKTSVSPRSSGSDPRSWEYRSGEASEEKEEKAHKETGKGEAAPGPQSSAPAQRPQLKSWWCQPSDEEEGEVKALGAAEKDGEAECPPCIPPPSAFLKAWVYWPGEDTEEEEDEEEDEDSDSGSDEEEGEAEASSSTPATGVFLKSWVYQPGEDTEEEEDEDSDTGSAEDEREAETSASTPPASAFLKAWVYRPGEDTEEEEDEDVDSEDKEDDSEAALGEAESDPHPSHPDQRAHFRGWGYRPGKETEEEEAAEDWGEAEPCPFRVAIYVPGEKPPPPWAPPRLPLRLQRRLKRPETPTHDPDPETPLKARKVRFSEKVTVHFLAVWAGPAQAARQGPWEQLARDRSRFARRITQAQEELSPCLTPAARARAWARLRNPPLAPIPALTQTLPSSSVPSSPVQTTPLSQAVATPSRSSAAAAAALDLSGRRG

SEQ ID NO: 179416 - protein, 632 aa, Artificial Sequence
  derived and/or modified sequence
MPWLVEAVKGAALVEAGLEGEARTPLAIPHTPWGRRPEEEAEDSGGPGEDRETLGLKTSSSLPEAWGLLDDDDGMYGEREATSVPRGQGSQFADGQRAPLSPSLLIRTLQGSDKNPGEEKAEEEGVAEEEGVNKFSYPPSHRECCPAVEEEDDEEAVKKEAHRTSTSALSPGSKPSTWVSCPGEEENQATEDKRTERSKGARKTSVSPRSSGSDPRSWEYRSGEASEEKEEKAHKETGKGEAAPGPQSSAPAQRPQLKSWWCQPSDEEEGEVKALGAAEKDGEAECPPCIPPPSAFLKAWVYWPGEDTEEEEDEEEDEDSDSGSDEEEGEAEASSSTPATGVFLKSWVYQPGEDTEEEEDEDSDTGSAEDEREAETSASTPPASAFLKAWVYRPGEDTEEEEDEDVDSEDKEDDSEAALGEAESDPHPSHPDQRAHFRGWGYRPGKETEEEEAAEDWGEAEPCPFRVAIYVPGEKPPPPWAPPRLPLRLQRRLKRPETPTHDPDPETPLKARKVRFSEKVTVHFLAVWAGPAQAARQGPWEQLARDRSRFARRITQAQEELSPCLTPAARARAWARLRNPPLAPIPALTQTLPSSSVPSSPVQTTPLSQAVATPSRSSAAAAAALDLSGRRG

SEQ ID NO: 179417 - DNA, 2025 bp, Artificial Sequence
  derived and/or modified sequence
atggcccccggccaggccccccaccaggccaccccctggagagacgcccaccccttcttcctgctgagccccgtgatgggcctgctgagcagagcctggagcagactgagaggcctgggccccctggagccctggctggtggaggccgtgaagggcgccgccctggtggaggccggcctggagggcgaggccagaacccccctggccatcccccacaccccctggggcagaagacccgaggaggaggccgaggacagcggcggccccggcgaggacagagagaccctgggcctgaagaccagcagcagcctgcccgaggcctggggcctgctggacgacgacgacggcatgtacggcgagagagaggccaccagcgtgcccagaggccagggcagccagttcgccgacggccagagagcccccctgagccccagcctgctgatcagaaccctgcagggcagcgacaagaaccccggcgaggagaaggccgaggaggagggcgtggccgaggaggagggcgtgaacaagttcagctacccccccagccacagagagtgctgccccgccgtggaggaggaggacgacgaggaggccgtgaagaaggaggcccacagaaccagcaccagcgccctgagccccggcagcaagcccagcacctgggtgagctgccccggcgaggaggagaaccaggccaccgaggacaagagaaccgagagaagcaagggcgccagaaagaccagcgtgagccccagaagcagcggcagcgaccccagaagctgggagtacagaagcggcgaggccagcgaggagaaggaggagaaggcccacaaggagaccggcaagggcgaggccgcccccggcccccagagcagcgcccccgcccagagaccccagctgaagagctggtggtgccagcccagcgacgaggaggagggcgaggtgaaggccctgggcgccgccgagaaggacggcgaggccgagtgccccccctgcatccccccccccagcgccttcctgaaggcctgggtgtactggcccggcgaggacaccgaggaggaggaggacgaggaggaggacgaggacagcgacagcggcagcgacgaggaggagggcgaggccgaggccagcagcagcacccccgccaccggcgtgttcctgaagagctgggtgtaccagcccggcgaggacaccgaggaggaggaggacgaggacagcgacaccggcagcgccgaggacgagagagaggccgagaccagcgccagcaccccccccgccagcgccttcctgaaggcctgggtgtacagacccggcgaggacaccgaggaggaggaggacgaggacgtggacagcgaggacaaggaggacgacagcgaggccgccctgggcgaggccgagagcgacccccaccccagccaccccgaccagagagcccacttcagaggctggggctacagacccggcaaggagaccgaggaggaggaggccgccgaggactggggcgaggccgagccctgccccttcagagtggccatctacgtgcccggcgagaagcccccccccccctgggccccccccagactgcccctgagactgcagagaagactgaagagacccgagacccccacccacgaccccgaccccgagacccccctgaaggccagaaaggtgagattcagcgagaaggtgaccgtgcacttcctggccgtgtgggccggccccgcccaggccgccagacagggcccctgggagcagctggccagagacagaagcagattcgccagaagaatcacccaggcccaggaggagctgagcccctgcctgacccccgccgccagagccagagcctgggccagactgagaaacccccccctggcccccatccccgccctgacccagaccctgcccagcagcagcgtgcccagcagccccgtgcagaccacccccctgagccaggccgtggccacccccagcagaagcagcgccgccgccgccgccgccctggacctgagcggcagaagaggctag

SEQ ID NO: 179418 - DNA, 1545 bp, Artificial Sequence
  derived and/or modified sequence
atgaaggccgaggaggagggcgtggccgaggaggagggcgtgaacaagttcagctacccccccagccacagagagtgctgccccgccgtggaggaggaggacgacgaggaggccgtgaagaaggaggcccacagaaccagcaccagcgccctgagccccggcagcaagcccagcacctgggtgagctgccccggcgaggaggagaaccaggccaccgaggacaagagaaccgagagaagcaagggcgccagaaagaccagcgtgagccccagaagcagcggcagcgaccccagaagctgggagtacagaagcggcgaggccagcgaggagaaggaggagaaggcccacaaggagaccggcaagggcgaggccgcccccggcccccagagcagcgcccccgcccagagaccccagctgaagagctggtggtgccagcccagcgacgaggaggagggcgaggtgaaggccctgggcgccgccgagaaggacggcgaggccgagtgccccccctgcatccccccccccagcgccttcctgaaggcctgggtgtactggcccggcgaggacaccgaggaggaggaggacgaggaggaggacgaggacagcgacagcggcagcgacgaggaggagggcgaggccgaggccagcagcagcacccccgccaccggcgtgttcctgaagagctgggtgtaccagcccggcgaggacaccgaggaggaggaggacgaggacagcgacaccggcagcgccgaggacgagagagaggccgagaccagcgccagcaccccccccgccagcgccttcctgaaggcctgggtgtacagacccggcgaggacaccgaggaggaggaggacgaggacgtggacagcgaggacaaggaggacgacagcgaggccgccctgggcgaggccgagagcgacccccaccccagccaccccgaccagagagcccacttcagaggctggggctacagacccggcaaggagaccgaggaggaggaggccgccgaggactggggcgaggccgagccctgccccttcagagtggccatctacgtgcccggcgagaagcccccccccccctgggccccccccagactgcccctgagactgcagagaagactgaagagacccgagacccccacccacgaccccgaccccgagacccccctgaaggccagaaaggtgagattcagcgagaaggtgaccgtgcacttcctggccgtgtgggccggccccgcccaggccgccagacagggcccctgggagcagctggccagagacagaagcagattcgccagaagaatcacccaggcccaggaggagctgagcccctgcctgacccccgccgccagagccagagcctgggccagactgagaaacccccccctggcccccatccccgccctgacccagaccctgcccagcagcagcgtgcccagcagccccgtgcagaccacccccctgagccaggccgtggccacccccagcagaagcagcgccgccgccgccgccgccctggacctgagcggcagaagaggctag

SEQ ID NO: 179419 - DNA, 1899 bp, Artificial Sequence
  derived and/or modified sequence
atgccctggctggtggaggccgtgaagggcgccgccctggtggaggccggcctggagggcgaggccagaacccccctggccatcccccacaccccctggggcagaagacccgaggaggaggccgaggacagcggcggccccggcgaggacagagagaccctgggcctgaagaccagcagcagcctgcccgaggcctggggcctgctggacgacgacgacggcatgtacggcgagagagaggccaccagcgtgcccagaggccagggcagccagttcgccgacggccagagagcccccctgagccccagcctgctgatcagaaccctgcagggcagcgacaagaaccccggcgaggagaaggccgaggaggagggcgtggccgaggaggagggcgtgaacaagttcagctacccccccagccacagagagtgctgccccgccgtggaggaggaggacgacgaggaggccgtgaagaaggaggcccacagaaccagcaccagcgccctgagccccggcagcaagcccagcacctgggtgagctgccccggcgaggaggagaaccaggccaccgaggacaagagaaccgagagaagcaagggcgccagaaagaccagcgtgagccccagaagcagcggcagcgaccccagaagctgggagtacagaagcggcgaggccagcgaggagaaggaggagaaggcccacaaggagaccggcaagggcgaggccgcccccggcccccagagcagcgcccccgcccagagaccccagctgaagagctggtggtgccagcccagcgacgaggaggagggcgaggtgaaggccctgggcgccgccgagaaggacggcgaggccgagtgccccccctgcatccccccccccagcgccttcctgaaggcctgggtgtactggcccggcgaggacaccgaggaggaggaggacgaggaggaggacgaggacagcgacagcggcagcgacgaggaggagggcgaggccgaggccagcagcagcacccccgccaccggcgtgttcctgaagagctgggtgtaccagcccggcgaggacaccgaggaggaggaggacgaggacagcgacaccggcagcgccgaggacgagagagaggccgagaccagcgccagcaccccccccgccagcgccttcctgaaggcctgggtgtacagacccggcgaggacaccgaggaggaggaggacgaggacgtggacagcgaggacaaggaggacgacagcgaggccgccctgggcgaggccgagagcgacccccaccccagccaccccgaccagagagcccacttcagaggctggggctacagacccggcaaggagaccgaggaggaggaggccgccgaggactggggcgaggccgagccctgccccttcagagtggccatctacgtgcccggcgagaagcccccccccccctgggccccccccagactgcccctgagactgcagagaagactgaagagacccgagacccccacccacgaccccgaccccgagacccccctgaaggccagaaaggtgagattcagcgagaaggtgaccgtgcacttcctggccgtgtgggccggccccgcccaggccgccagacagggcccctgggagcagctggccagagacagaagcagattcgccagaagaatcacccaggcccaggaggagctgagcccctgcctgacccccgccgccagagccagagcctgggccagactgagaaacccccccctggcccccatccccgccctgacccagaccctgcccagcagcagcgtgcccagcagccccgtgcagaccacccccctgagccaggccgtggccacccccagcagaagcagcgccgccgccgccgccgccctggacctgagcggcagaagaggctag

SEQ ID NO: 179420 - DNA, 2025 bp, Artificial Sequence
  derived and/or modified sequence
atggctcccggccaggctcctcaccaagctacaccctggagagacgctcatcccttcttcttgctctccccggttatgggcctgctcagtcgggcttggtctaggttaagggggctggggcccctggagccgtggctggtggaagccgtgaaaggcgcagctctggtagaggcagggcttgaaggtgaagcacgtactcccctggctatcccgcacaccccctggggacgtcgacccgaagaggaagccgaggactcaggcggacccggagaggaccgcgaaaccctcgggctaaagacctcctcgtcactgcctgaagcctgggggctgctcgatgacgacgacggcatgtacggagaacgcgaggccacctccgtacctaggggtcagggctcccagtttgcagatggacagcgggcccccctaagcccatccctcctaatcagaacattacagggttcagacaagaaccccggtgaggagaaggccgaggaagagggcgttgcagaggaagagggtgttaataagttcagttatccgccgtcacatagggaatgctgccccgctgttgaggaggaggacgacgaagaggctgtgaaaaaggaggcacaccgcaccagtaccagtgccctgagccccggttcaaaacctagcacttgggtgagttgtccgggtgaagaggaaaatcaggcgactgaggataaaaggactgagcggtcaaagggcgcccggaagacatctgtgagcccgagatcttccggcagtgacccacgctcatgggagtaccgctctggggaagcaagcgaggagaaagaggagaaggcccacaaggagaccggcaaaggtgaggcggcacccggccctcagagttctgctccagcacagagaccacagctcaagtcttggtggtgccagccatctgatgaggaagaaggcgaggtgaaggccttaggagccgccgagaaggatggcgaggccgagtgccccccatgcattccgcccccttccgcattcttaaaggcatgggtttattggcccggggaagatactgaagaggaagaagacgaggaggaggatgaggactctgatagtggctctgacgaggaagagggggaagctgaggccagttcatcgacgccggctacaggcgtgttcctgaagtcatgggtgtatcagccaggcgaggacacagaagaggaggaggacgaagattcagatactggttccgccgaagacgaaagggaagctgagacctcagccagcacaccccccgccagcgctttcctcaaggcctgggtttacagacctggtgaagatacagaggaagaagaagatgaagacgtggattccgaagacaaggaagatgacagcgaagcagccctcggggaagccgagtccgatccccacccctcccatcccgaccagagagcccatttccgcgggtggggctatagaccagggaaggaaacagaggaagaagaagcagctgaggattggggagaggctgagccgtgtccatttcgggtcgcaatctacgttccgggggaaaaaccaccgcccccttgggcgcccccccgcttaccactacgtctccagcggcggttgaaacgccccgaaactcccacccatgacccggaccccgagacacccctgaaggcaaggaaggtgaggttctccgagaaggttacggttcacttcctggccgtgtgggctggtcctgctcaggctgcccggcaggggccttgggaacagctcgcacgcgatcggtctcgattcgctagaagaatcacccaggctcaagaagagctctcgccgtgcctgactcctgctgccagggctagggcatgggccagacttaggaaccccccactggctcctattccagctctgactcagactcttcctagtagttctgtgccgtctagtcctgtgcagacaacaccactgtctcaggcagttgctaccccaagtcggagttcagcagccgccgctgcagctctcgaccttagcggtagaaggggctag

SEQ ID NO: 179421 - DNA, 1545 bp, Artificial Sequence
  derived and/or modified sequence
atgaaggccgaggaagaaggagtggctgaagaggaaggagtaaataaatttagctatcccccgtcccacagggagtgctgccccgcagtggaggaggaggacgacgaggaagccgtcaaaaaggaagcccatcgtacctccaccagtgccctttcccctgggtccaaacctagcacctgggtgtcatgccctggagaggaggaaaaccaagccaccgaggataagcgcaccgagcgctctaagggggccaggaagacaagcgtgtctccaagatcctccggaagcgatccacggagctgggaatacagatcaggtgaggcctctgaagagaaagaggaaaaggctcacaaggagacagggaagggggaggctgcacccggaccgcagagttctgcccctgcccagagaccacagctgaagagctggtggtgtcagccatctgacgaggaagagggggaagtgaaagctcttggagctgccgaaaaggacggggaagctgagtgccccccctgcattcctccaccatccgcgttcctgaaagcgtgggtatactggcccggcgaagatactgaggaagaggaggacgaagaggaagatgaggattctgatagcggcagcgacgaggaagagggggaagctgaagctagttcatccactcccgccacaggcgtctttctcaaatcatgggtttaccagccgggagaagacacagaagaagaagaagacgaggactccgacaccggctcagccgaggacgagagagaggcagaaactagcgcatcaacaccgcccgcaagcgccttcctcaaggcgtgggtatataggccaggtgaggacactgaggaggaggaggacgaggatgtcgattctgaagacaaagaagatgattccgaagctgcactcggggaggccgaaagtgacccccaccctagccaccccgaccaaagagcccacttcagagggtggggctatcgaccaggcaaggaaaccgaagaggaggaagccgccgaggattggggcgaagctgagccatgtcccttcagggtggctatttacgtgcctggggagaaaccgccacctccctgggctcctccccgcctgcccttacggttgcagcgccgcctgaaacggcctgagactcccacacacgacccagatccggagactcccctcaaagctcgcaaagtgcgctttagcgagaaagtaaccgtacattttctagccgtgtgggccggaccagcacaggcagctaggcaggggccctgggagcagctcgcacgggatagaagcaggtttgccaggcggataacgcaggctcaggaggagctgtccccttgtctcactccagccgccagggctagagcttgggcacgccttagaaatccccccctggcccctattcccgctctcacgcaaaccttaccttcttcttctgtaccctccagtcctgttcagacaacccccctttcccaggccgtggcgaccccctcacgcagctccgcagccgccgctgctgctcttgatctttccgggcgaaggggatag

SEQ ID NO: 179422 - DNA, 1899 bp, Artificial Sequence
  derived and/or modified sequence
atgccgtggctagtggaggctgtcaaaggtgccgctttagtggaggcaggcctagagggggaggctcgaacccccctggctatcccccacacaccctggggaaggaggcctgaggaagaggcagaggattctggcgggccaggcgaagatcgcgaaactttaggactgaagacctcttccagcctgccagaagcgtggggattgctggacgatgacgatggtatgtacggcgagagagaggcgacctcagttccaaggggccaaggtagccagttcgccgacggacagagagcccctctgagtccctccctgctcatcaggacattgcaaggcagtgacaagaacccaggtgaggagaaagccgaagaagaaggagtagctgaggaagaaggagtcaacaaattcagttacccccctagccaccgggaatgctgtcctgccgtcgaagaggaagacgatgaggaagctgtcaagaaggaggcacaccgcacctcaactagcgctctgtcccctggcagtaaacccagtacttgggtctcctgtccaggagaagaggagaaccaggcaaccgaagataagagaaccgagaggagcaaaggggcaaggaaaactagtgtttcccccaggtcctcgggaagtgaccctaggtcatgggagtataggtcaggtgaggctagcgaagaaaaggaggaaaaggctcacaaggaaacaggcaagggagaggctgctcccggcccacagtctagtgcccctgctcagcgtccccagctcaaatcttggtggtgccagcctagtgacgaagaggagggagaagtgaaggctctgggtgcagccgagaaggacggcgaagccgagtgtccaccttgcataccccccccttcagccttcctgaaagcctgggtatactggcccggcgaggacactgaggaagaggaggatgaggaagaggatgaagattctgacagtggctcagatgaagaagagggtgaggccgaagctagttcatccacccctgcgactggggtattcctgaaatcatgggtctaccagccaggtgaagacactgaggaggaggaagatgaagattccgacacaggctcagctgaggacgaaagagaagccgaaacctccgcatcaaccccacccgctagtgctttcctgaaagcttgggtttacaggcctggtgaagatacggaagaggaagaagatgaggatgtagattctgaggacaaggaagatgatagtgaagcggcgctgggggaagcagaatccgacccacacccatcccaccccgaccagcgagctcattttcgcgggtggggatatcggccaggaaaagagactgaggaagaggaggccgccgaagactggggagaagcagagccttgtcctttcagagtagcgatctacgtcccgggggagaaaccaccaccaccttgggcgccacccagactccccctgaggctgcagcgacgcttgaagcgccctgagactcctacacatgacccagaccccgaaacccccctcaaggccagaaaggttagattcagcgagaaggttactgtgcactttttagctgtgtgggccggtccagctcaggctgccagacagggcccatgggaacaactcgcccgggaccggtcgagatttgcccgcagaattacgcaggcacaggaagaattgagtccctgcctcacaccagcagcacgtgctcgagcgtgggcaaggctcaggaatcccccgctggctccaatcccggcattaacgcaaacactgccatcatcatccgtcccctcatcccctgttcaaactaccccactctctcaggccgttgcaactccatcgaggtccagcgctgccgctgctgctgccctcgatctctctggtcgtagaggatag

SEQ ID NO: 179423 - DNA, 2025 bp, Artificial Sequence
  derived and/or modified sequence
atggcccctggccaggccccccaccaggccaccccctggagagatgcccaccccttcttcctgctgagccctgtgatgggcctgctgagccgggcctggagccggctgcggggcctgggccccctggagccctggctggtggaggccgtgaagggagctgccctggtggaggccggcctggagggggaggcccggacccccctggccatcccccacaccccctggggcagaagacctgaggaggaggccgaggacagcggcggccctggagaagatcgggagaccctgggcctgaagaccagcagcagcctgcctgaggcctggggcctgctggatgatgatgatggcatgtacggggagcgggaggccacctctgtgccccggggccagggcagccagtttgctgatggccagagggcccccctgagccccagcctgctgatccgcaccctgcagggcagtgacaagaaccctggagaggagaaggccgaggaggagggcgtggccgaggaggagggcgtgaacaagttctcctacccacccagccaccgggagtgctgcccagctgtggaggaggaggatgatgaggaggccgtgaagaaggaggcccacaggaccagcaccagcgccctgagccctggcagcaagcccagcacctgggtgtcctgccctggagaggaggagaaccaggccacagaggacaagaggacagagaggagcaaaggagccaggaagacctctgtgagccccaggagcagcggcagtgaccccaggtcctgggagtaccgcagcggggaggccagcgaggagaaggaggagaaggcccacaaggagactggaaaaggagaggccgcccctggcccccagagcagcgccccagcccagaggccccagctgaagtcctggtggtgccagcccagtgatgaggaggagggggaggtgaaggccctgggcgctgctgagaaggatggagaggctgaatgtcctccctgcatccccccacccagcgccttcctgaaggcctgggtgtactggccaggagaggacacagaggaggaggaggatgaggaggaggatgaggacagcgacagcggcagtgatgaggaggagggggaggccgaggccagcagcagcaccccagccaccggggtcttcctgaagtcctgggtgtaccagcctggagaggacacagaggaggaggaggatgaagattctgacaccggcagcgcagaagatgagcgggaggccgagaccagcgccagcaccccaccagccagcgccttcctgaaggcctgggtgtacagacctggagaggacacagaggaggaggaggatgaagatgtggacagcgaggacaaggaggatgattctgaggccgccctgggggaggccgagagtgacccccaccccagccacccagaccagagggcccacttccggggctggggctacagacctgggaaggagacagaggaggaggaggccgctgaggactggggcgaggccgagccctgccccttccgggtggccatctacgtgcctggagagaagcccccaccaccctgggccccaccccggctgcccctgcggctgcagaggcggctgaagaggcctgagacccccacccatgaccctgaccctgagacccccctgaaggccaggaaggtgcgcttcagcgagaaggtgacagtgcacttcctggccgtgtgggccggccctgcccaggccgcccggcagggcccctgggagcagctggcccgggacaggagcagatttgcccggcgcatcacccaggcccaggaggagctgagcccctgcctgaccccagctgcccgggcccgggcctgggcccggctgaggaacccccccctggcccccatcccagccctgacccagaccctgcccagcagctctgtgcccagcagccctgtgcagaccacccccctgagccaggccgtggccacccccagccgcagcagcgctgctgctgctgctgccctggacctgagcggccggcggggctag

SEQ ID NO: 179424 - DNA, 1545 bp, Artificial Sequence
  derived and/or modified sequence
atgaaggccgaggaggagggcgtggccgaggaggagggcgtgaacaagttctcctacccacccagccaccgggagtgctgcccagctgtggaggaggaggatgatgaggaggccgtgaagaaggaggcccacaggaccagcaccagcgccctgagccctggcagcaagcccagcacctgggtgtcctgccctggagaggaggagaaccaggccacagaggacaagaggacagagaggagcaaaggagccaggaagacctctgtgagccccaggagcagcggcagtgaccccaggtcctgggagtaccgcagcggggaggccagcgaggagaaggaggagaaggcccacaaggagactggaaaaggagaggccgcccctggcccccagagcagcgccccagcccagaggccccagctgaagtcctggtggtgccagcccagtgatgaggaggagggggaggtgaaggccctgggcgctgctgagaaggatggagaggctgaatgtcctccctgcatccccccacccagcgccttcctgaaggcctgggtgtactggccaggagaggacacagaggaggaggaggatgaggaggaggatgaggacagcgacagcggcagtgatgaggaggagggggaggccgaggccagcagcagcaccccagccaccggggtcttcctgaagtcctgggtgtaccagcctggagaggacacagaggaggaggaggatgaagattctgacaccggcagcgcagaagatgagcgggaggccgagaccagcgccagcaccccaccagccagcgccttcctgaaggcctgggtgtacagacctggagaggacacagaggaggaggaggatgaagatgtggacagcgaggacaaggaggatgattctgaggccgccctgggggaggccgagagtgacccccaccccagccacccagaccagagggcccacttccggggctggggctacagacctgggaaggagacagaggaggaggaggccgctgaggactggggcgaggccgagccctgccccttccgggtggccatctacgtgcctggagagaagcccccaccaccctgggccccaccccggctgcccctgcggctgcagaggcggctgaagaggcctgagacccccacccatgaccctgaccctgagacccccctgaaggccaggaaggtgcgcttcagcgagaaggtgacagtgcacttcctggccgtgtgggccggccctgcccaggccgcccggcagggcccctgggagcagctggcccgggacaggagcagatttgcccggcgcatcacccaggcccaggaggagctgagcccctgcctgaccccagctgcccgggcccgggcctgggcccggctgaggaacccccccctggcccccatcccagccctgacccagaccctgcccagcagctctgtgcccagcagccctgtgcagaccacccccctgagccaggccgtggccacccccagccgcagcagcgctgctgctgctgctgccctggacctgagcggccggcggggctag

SEQ ID NO: 179425 - DNA, 1899 bp, Artificial Sequence
  derived and/or modified sequence
atgccctggctggtggaggccgtgaagggagctgccctggtggaggccggcctggagggggaggcccggacccccctggccatcccccacaccccctggggcagaagacctgaggaggaggccgaggacagcggcggccctggagaagatcgggagaccctgggcctgaagaccagcagcagcctgcctgaggcctggggcctgctggatgatgatgatggcatgtacggggagcgggaggccacctctgtgccccggggccagggcagccagtttgctgatggccagagggcccccctgagccccagcctgctgatccgcaccctgcagggcagtgacaagaaccctggagaggagaaggccgaggaggagggcgtggccgaggaggagggcgtgaacaagttctcctacccacccagccaccgggagtgctgcccagctgtggaggaggaggatgatgaggaggccgtgaagaaggaggcccacaggaccagcaccagcgccctgagccctggcagcaagcccagcacctgggtgtcctgccctggagaggaggagaaccaggccacagaggacaagaggacagagaggagcaaaggagccaggaagacctctgtgagccccaggagcagcggcagtgaccccaggtcctgggagtaccgcagcggggaggccagcgaggagaaggaggagaaggcccacaaggagactggaaaaggagaggccgcccctggcccccagagcagcgccccagcccagaggccccagctgaagtcctggtggtgccagcccagtgatgaggaggagggggaggtgaaggccctgggcgctgctgagaaggatggagaggctgaatgtcctccctgcatccccccacccagcgccttcctgaaggcctgggtgtactggccaggagaggacacagaggaggaggaggatgaggaggaggatgaggacagcgacagcggcagtgatgaggaggagggggaggccgaggccagcagcagcaccccagccaccggggtcttcctgaagtcctgggtgtaccagcctggagaggacacagaggaggaggaggatgaagattctgacaccggcagcgcagaagatgagcgggaggccgagaccagcgccagcaccccaccagccagcgccttcctgaaggcctgggtgtacagacctggagaggacacagaggaggaggaggatgaagatgtggacagcgaggacaaggaggatgattctgaggccgccctgggggaggccgagagtgacccccaccccagccacccagaccagagggcccacttccggggctggggctacagacctgggaaggagacagaggaggaggaggccgctgaggactggggcgaggccgagccctgccccttccgggtggccatctacgtgcctggagagaagcccccaccaccctgggccccaccccggctgcccctgcggctgcagaggcggctgaagaggcctgagacccccacccatgaccctgaccctgagacccccctgaaggccaggaaggtgcgcttcagcgagaaggtgacagtgcacttcctggccgtgtgggccggccctgcccaggccgcccggcagggcccctgggagcagctggcccgggacaggagcagatttgcccggcgcatcacccaggcccaggaggagctgagcccctgcctgaccccagctgcccgggcccgggcctgggcccggctgaggaacccccccctggcccccatcccagccctgacccagaccctgcccagcagctctgtgcccagcagccctgtgcagaccacccccctgagccaggccgtggccacccccagccgcagcagcgctgctgctgctgctgccctggacctgagcggccggcggggctag

SEQ ID NO: 179426 - DNA, 2025 bp, Artificial Sequence
  derived and/or modified sequence
atggcccccggccaggccccccaccaggccaccccctggcgggacgcccacccgtttttcctgttgagcccggtcatgggtctgttatcccgtgcctggtcccggctgcggggactgggacccttggaaccgtggttagtggaggctgtcaagggtgcagccctggtcgaagccggcctggagggcgaagcgcgcacgccgctggctataccacataccccctggggtcgcaggcctgaagaggaggcggaggactcgggaggaccaggtgaggaccgagaaactctcgggctgaagacgagtagctctttacccgaagcgtggggcctcctggatgacgacgacggaatgtacggcgaacgagaagccacctccgtcccgcggggccagggtagccaatttgccgacggtcagcgggctccacttagtccaagtctactcatccgcaccctccaaggtagtgacaagaacccgggcgaagagaaagcagaggaagaaggggtggctgaggaagagggcgtgaataaattcagctaccctcctagccaccgcgagtgttgtccagcagtcgaggaggaggatgatgaggaagcggtgaagaaggaggctcatcgcacttcaacaagcgctctcagtccagggtcgaagcccagtacctgggtatcatgcccaggagaagaagagaaccaggccacagaggacaagcgtacagagaggagtaaaggggctagaaagactagcgtatcaccgaggtcatctggctctgacccaagatcatgggagtatagatccggagaagccagcgaagaaaaggaggagaaagcacacaaggagactggaaagggcgaggcagctccaggcccgcagtcttcagccccagcccagcggccccaactgaaatcctggtggtgtcagccgtcagatgaagaggagggcgaagtgaaagccctcggcgctgctgagaaggacggggaggccgagtgtcccccctgtataccccctcccagtgcattccttaaggcttgggtatactggcccggcgaggacaccgaggaagaggaggatgaggaggaggatgaagactctgactccggctcagatgaggaagagggggaggcggaagcatcaagctcaacgcctgccacaggagtcttcctgaagtcttgggtgtatcagcctggggaggatactgaggaagaagaagatgaggacagcgacaccgggtctgccgaagacgaaagagaagcggaaactagtgcatctacccccccggcatcagcgttcctcaaggcatgggtttacagacccggcgaggacaccgaggaggaagaggacgaagatgtggattcggaggacaaagaagatgattcagaggccgcacttggggaagctgagtctgatccccatcccagtcaccccgatcagagggcacatttcagaggttggggttatcgcccgggcaaagaaaccgaggaggaagaggccgccgaggactggggagaggccgagccttgtccctttcgggtcgcaatctatgttccaggagagaaaccacccccaccatgggcaccaccccggctgcctctgagactgcagcgccgtcttaaacgcccagagacaccgactcatgacccagaccctgagacacctcttaaggcccggaaagtaagattttccgagaaggtgaccgtgcatttcctggccgtttgggccggcccagctcaggccgcccggcaaggaccttgggaacaactcgccagggaccgcagcagatttgcccggcggatcactcaggcacaggaagaactttctccctgtctcacaccagcggctcgtgccagagcttgggcaagacttcgaaatcctcctctagccccaattccagctctgacacagacgctgccatcttcctctgtgccctcgagccccgtccagactacccccctctcccaggcagttgcaaccccttcacggagctccgcagcagctgccgctgctctcgaccttagcggacggcggggctag

SEQ ID NO: 179427 - DNA, 1545 bp, Artificial Sequence
  derived and/or modified sequence
atgaaggccgaggaggagggcgtggccgaggaggagggcgtgaacaaattttcatatcccccatcgcatagggagtgctgtcccgccgtggaagaggaggatgacgaggaggctgtgaaaaaagaagcacaccggacaagcactagtgccctaagtccgggatctaagccctccacctgggtaagctgtccaggggaggaagaaaatcaagccactgaagacaaacggaccgagcgctccaagggagccaggaagaccagcgtttcgcctagatccagcggctccgaccctaggtcctgggagtaccgctcaggggaggcctctgaggagaaagaggagaaagcccacaaggaaacggggaagggagaagccgctcccggtccacagagctcggcaccagcgcagaggcctcagctgaagtcctggtggtgccaaccatccgacgaagaggagggtgaggtgaaggcgctgggcgctgcagagaaagacggagaggccgaatgccctccttgtatccctcctccaagtgcgttcctgaaagcatgggtctactggcccggcgaagatacagaggaagaagaggacgaggaggaagatgaagattctgacagcggctccgacgaggaggagggtgaagccgaggcttcgagttccacacccgcaacgggagtttttctgaaatcatgggtgtatcagcctggcgaagatacggaagaagaggaggacgaggacagcgacacgggtagtgccgaagatgagagagaagcggaaaccagcgctagcactccacctgcttccgcttttctaaaggcttgggtctatcgtcccggggaggatacagaagaggaagaagatgaggatgtagattcggaggacaaagaggacgacagcgaggcagctttgggggaggccgagagcgatccccacccaagccaccccgatcaaagagcgcactttcgcggctggggttaccgaccaggcaaggagactgaggaagaagaagcggccgaggattggggagaagccgaaccctgccccttcagagtggcaatttacgtaccaggagaaaagccccctcccccatgggcccctcctagactaccattacgcctgcaacgccggctcaaacggcctgagacaccaactcatgatccagatcctgagacccctctaaaggctcgtaaggtgagattttccgagaaagtaacagtgcattttttggccgtctgggctggcccagcgcaggcagcccggcagggcccttgggaacagttagcccgagatagatccagatttgcaagacggattacgcaggcccaggaagaactgagcccctgtcttactcctgccgctagagctcgcgcctgggcgcggttacggaacccccctctcgcccccatccctgcactaacgcagacattaccctcttcatcagttccttcatctcccgtgcagaccacacccttgtcacaggccgtggccactccctccagatccagcgcagccgctgccgccgctctggatttatccgggaggagggggtag

SEQ ID NO: 179428 - DNA, 1899 bp, Artificial Sequence
  derived and/or modified sequence
atgccctggctggtggaggccgtgaagggcgccgccctggtggaggccggcctggaaggagaagcacgaacgccgctcgctatccctcataccccctggggtcgccgcccggaggaagaggcagaagactccggaggtcctggcgaagaccgcgagacattgggactgaaaacttcctcgagtctgcccgaggcatggggcctgctggacgacgatgacggaatgtacggcgaaagggaagccacgtccgtccctagaggccagggttcccagttcgctgacgggcagcgcgcccccttgagtcctagcctgctcatcagaactctccaaggttctgacaaaaatccgggcgaggaaaaagcggaagaagaaggggtggccgaagaagaaggggtcaataagttttcctatccgccatctcacagggaatgttgcccggcggtagaagaagaggatgacgaggaagcagtcaagaaagaagcgcacaggacctctacttccgccctgagcccgggaagcaaaccatcaacttgggtaagttgcccaggcgaggaggagaaccaagccaccgaggataagaggaccgagcgcagtaaaggcgcgcgtaaaacctcagtgtcaccccgctcctctgggagcgatccccgcagttgggagtatagatcaggagaagcaagcgaggagaaggaggaaaaggcccacaaagagactgggaagggcgaggccgcccccggacctcagtcgagcgctcccgcccagcgcccccaactcaaatcatggtggtgccagcccagtgacgaggaggagggcgaagtcaaagccctcggagcagcagaaaaagacggggaggccgagtgcccaccctgtatcccaccgccgtcagcgtttctcaaggcctgggtctattggcctggcgaagataccgaggaagaggaagatgaagaggaggacgaggatagtgattcgggtagcgacgaagaagagggcgaagccgaggcaagtagcagcacccctgcgaccggagtgttcctgaaatcttgggtctaccagcccggggaggatacagaagaggaggaagacgaggactctgatactggtagtgctgaagacgaaagggaagctgagacttccgcgagcacaccacccgcctcagcctttctgaaagcctgggtgtaccgtcctggcgaggataccgaagaggaagaagacgaagatgtggatagtgaggacaaggaagatgactctgaggccgccctgggtgaggccgagagcgatccacatccctcccatcctgaccagcgggctcactttcgggggtggggatatcgccccggaaaggaaacggaagaagaagaagccgcagaggactggggagaggccgagccctgcccttttcgcgtggcgatctatgtgcccggcgagaaacctccaccgccttgggcgccgccgagactgccattacgattacagaggaggttgaagcggccagaaaccccaactcacgacccagaccctgagactccactaaaagccagaaaagtgcgcttcagcgagaaggtgaccgtgcacttcctcgctgtatgggccggtccagcccaggctgcccggcagggaccatgggaacagttggccagagacagatcccgtttcgccaggagaataacacaggcacaggaggagctgtcgccctgcctgacccccgccgccagggccagggcttgggcacggttgcgcaatccccccctggctcccatcccagcattgacgcagacccttccctcctcaagtgtgccgtcctcgcccgtccagactacacccttatcacaggcagtggctactccatccagatcaagtgccgccgctgccgccgccctggacttgagcggtaggagagggtag

SEQ ID NO: 179429 - DNA, 2025 bp, Artificial Sequence
  derived and/or modified sequence
atggccccaggacaggcgccacatcaagcgacgccttggcgggacgcccacccattcttcttgctgtcaccagtgatgggcctgctaagcagagcttggagccggcttcggggtctcggcccacttgagccttggctggtggaggccgtgaaaggtgccgctttggtggaagctgggctggaaggcgaagccaggaccccccttgccatcccccataccccctggggtcggaggccggaagaggaggcagaggattccggaggcccaggagaagaccgggagaccctcggcctcaagactagttcatccctgcctgaggcgtggggcctgttggatgacgacgacggaatgtacggggagagggaagccacttcagttcctagaggtcaggggtcccagttcgctgacggacagagagctccactttcgccgagtctccttatcagaaccctacagggcagcgacaaaaaccctggggaggagaaagctgaggaggaaggtgttgcagaagaggagggtgtaaataagttctcttaccctcccagccatcgcgagtgttgcccagccgtggaggaggaggatgatgaagaggctgtgaagaaggaggcccaccggacgtcaactagcgcactctctcctgggtctaagccatctacctgggtgtcttgcccgggagaggaggagaatcaagctaccgaggataaacgcaccgagcggagtaagggtgcacgcaaaacaagtgtttctccacgtagttcaggatccgatcccaggagttgggaataccggagtggagaagcaagtgaagaaaaggaggagaaggctcacaaggaaaccggtaagggggaggctgcccctggaccacagagttcggcaccagcgcagcggccacaactcaaatcttggtggtgccagccatctgatgaggaggagggggaagtgaaagcactaggcgctgccgagaaagatggagaggcagaatgtcccccatgcatccctcctccctctgcttttctgaaagcttgggtttactggcccggagaagacacagaggaggaagaggacgaggaagaggatgaggattcggattccgggtctgacgaagaggagggagaagctgaagcatcctcatccacgccagccaccggtgtttttttaaagtcttgggtgtatcagccaggagaggatacagaagaggaggaagacgaggactctgataccggtagcgcggaagatgaacgggaagccgagactagcgccagcacaccccctgcatcagcattcctgaaggcttgggtttataggcctggcgaagatacagaggaggaggaagatgaagatgtcgatagcgaagataaagaggacgacagtgaagcagctctcggcgaagcagaatccgacccccacccatcacatccagatcaaagggcccatttccgcggttggggatacaggccaggcaaagaaactgaagaggaagaagctgctgaggattggggagaagcagaaccctgcccattccgcgtggccatttatgtgcctggagaaaaaccccctccaccttgggcacccccaagattgccccttagactacaaagacgcctgaaacggccagaaactcccacgcatgaccccgatcctgagacccctttaaaagccagaaaagtgcgcttctcggaaaaggttacggtccactttctggcggtgtgggcaggtcctgcccaggctgctaggcaggggccttgggaacaactggcgagagatcgaagtagatttgcacgacgtatcactcaagctcaagaagagctgtctccttgtctgacgcctgcggctagggccagggcatgggcaagattgcggaatccccctctggcccctattcccgcactgacacagacgctgccttcgtcctcggtgccatctagtcccgtgcagactacccccctctctcaggccgtagccactccttccaggtcctcagccgcagctgccgctgctctagacttgagcggaaggaggggatag

SEQ ID NO: 179430 - DNA, 1545 bp, Artificial Sequence
  derived and/or modified sequence
atgaaagccgaggaggaaggggtggcagaagaggaaggagttaataagttttcttaccctcccagccaccgtgagtgctgcccagcagtggaagaggaggatgacgaggaagcggttaaaaaggaagcgcacagaaccagtacatccgccctgagtcctggtagcaagccaagtacctgggtatcttgtccaggagaggaagaaaatcaggcaaccgaggacaaacggacagaaaggtcaaagggcgctaggaagactagtgtctccccaaggagttccggcagcgacccacgttcttgggaatatcgttcgggtgaagcttcagaggaaaaggaagagaaggcccataaggagaccggcaaaggcgaggcagccccaggaccgcagagttccgctcccgcacagcggcctcagctgaaaagctggtggtgccagccctcggacgaggaggaaggggaggtaaaagcccttggcgcagctgaaaaggatggggaggcagagtgtccaccttgcatccccccaccttcagcctttctaaaggcctgggtttattggcctggggaggataccgaggaagaagaagatgaggaagaggacgaagacagcgacagcggctccgacgaggaggagggcgaggcagaggcctcgtcaagcacacccgcaactggagtattcctgaagagttgggtatatcaacctggtgaggacaccgaagaggaggaagatgaagattcagacacaggttccgcagaagatgagagggaagccgaaacttcagcttccactcctccagcatctgcatttctgaaggcctgggtgtaccggcctggcgaggatacggaggaagaagaggacgaagatgtcgattccgaggacaaagaggacgattctgaagcggcactcggagaagccgagtctgacccccacccttcccatcctgatcagcgtgcgcacttcagagggtggggatataggcctggaaaggaaaccgaggaagaggaagctgccgaggactggggcgaggccgaaccctgtcctttccgggtggcaatctacgtgcctggggagaagcctcctcccccttgggcacccccaagactgcctctgaggttacaaaggcggctaaaaaggcccgaaactcctacgcacgaccctgatcccgaaactcctctcaaagccaggaaagtccgcttttctgaaaaagtgacagtgcactttctggcagtgtgggccggacccgcacaggcagcacgccagggtccctgggagcaactcgcacgggatcgcagccgcttcgctcggaggattacccaggcgcaggaagaacttagtccgtgcctgactccagccgctagggctcgggcttgggccaggcttagaaatcccccattggctcctatccctgctttaactcagacattgccttcaagcagcgtgccatcctcccctgtccagaccactccattgagccaggcagtggcaacaccctcgcgctcttcggccgctgctgctgccgctctcgacctctccgggagaaggggatag

SEQ ID NO: 179431 - DNA, 1899 bp, Artificial Sequence
  derived and/or modified sequence
atgccatggctcgtagaggctgtaaagggcgctgctctggtggaagccggattggagggcgaagcacggacgcctctggccatcccacataccccgtggggacgacggccagaagaggaggcggaggattccggtggacctggggaagacagagaaaccctgggccttaagaccagctcctcattaccagaggcctggggcttactggatgatgacgacggcatgtatggcgagcgggaggcaacgtccgtgcccagaggacagggtagccagtttgctgacggacagagggcaccgctgtcgccttcactgcttattcgcactcttcagggctccgataagaaccctggagaagagaaagccgaagaagaaggagtggcggaagaagagggagtaaataagttctcataccccccaagccaccgggagtgctgccctgcagtggaggaagaagacgacgaggaggcagtcaagaaagaagctcaccggacctcgacaagtgctttgtcccctggatccaaacctagtacttgggtgagctgccccggagaggaagagaatcaggcaaccgaggacaagcgtacagagcgaagcaaaggcgcaaggaaaactagcgttagccctcggagtagtggaagcgaccccaggagctgggagtaccggtcgggggaagcatcagaggaaaaagaggaaaaggcacacaaggagacggggaaaggcgaggccgctccagggcctcagtctagcgcgccagcgcagcgcccacagctgaaaagctggtggtgccagccctcggatgaagaggaaggagaggtcaaggctctaggggctgccgagaaagacggtgaagctgagtgccccccatgcatcccgccaccctccgccttcctgaaggcatgggtgtattggcctggtgaggacacagaagaggaggaagacgaagaggaggatgaagatagcgatagcggttctgatgaggaagaaggcgaagctgaggcttccagctcgacccctgccaccggcgtctttttgaagtcgtgggtgtatcagcccggtgaggacacagaggaggaggaagacgaagactcagacactggtagcgccgaagacgagcgcgaggccgagacttcagccagcacgcctccggcaagcgcatttctcaaagcctgggtttacagacctggcgaggacacagaagaggaagaagacgaagacgtagactctgaggataaagaagatgactcggaggccgctctgggggaggcggagagcgacccccatccatcgcacccagaccagcgggcacatttcaggggttggggttaccgccctggtaaagaaaccgaggaagaggaagccgcagaggactggggcgaagcagaaccgtgtccatttagagttgcaatttatgtgccgggtgagaagccaccaccaccatgggctcctccaagactcccactccgcctccaacgacggctgaaaaggcccgagaccccaacgcatgacccagaccccgagacaccgctgaaagctaggaaagtgaggtttagcgaaaaggttacagtacacttcctggctgtgtgggcaggacccgcacaagcggctagacaggggccatgggagcagctggcccgagatcggtcgcggttcgccaggcggatcacacaggctcaggaggagctgtccccgtgcctcacaccggcagcccgtgctcgggcatgggccaggcttcgtaatcctcccctcgcccctattcccgcactaacacaaacgttgccttcttcttctgtccctagtagccctgtgcaaacgacacccttgtcccaggccgtggccacaccgagccggtcctctgccgctgccgcagccgctctcgatctttccggtcgcagaggctag

SEQ ID NO: 179432 - DNA, 2382 bp, Artificial Sequence
  derived and/or modified sequence
ataaaagcctagtggccattgtgttcgttgctcttatcggttcccatcccagttgttgatcttatgcaagacgctgcacgaccccgcgcccgcttgtcgccacggcacttgaggcagccggagatactctgagttactcggagcccgacgcctgagggtgagatgaacgcgctggcctccctaaccgtccggacctgtgatcgcttctggcagaccgaaccggcgctcctgcccccggggtgacgcgcagctcccagccgcccagacacatggccccaggccaagcaccccatcaggctaccccgtggagggatgcccaccctttcttcctcctgtccccagtgatgggcctcctcagccgcgcctggagccgcctgaggggcctgggacctctagagccctggctggtggaagcagtaaaaggagcagctctggtagaagctggcctggagggagaagctaggactcctctggcaatcccccataccccttggggcagacgccctgaagaggaggctgaagacagtggaggccctggagaggacagagaaacactggggctgaaaaccagcagttcccttcctgaagcctggggacttttggatgatgatgatggcatgtatggtgagcgagaggcaaccagtgtccctagagggcagggaagtcaatttgcagatggccagcgtgctcccctgtctcccagccttctgataaggacactgcaaggttctgataagaacccaggggaggagaaagccgaggaagagggagttgctgaagaggagggagttaacaagttctcttatccaccatcacaccgggagtgttgtccagccgtggaggaggaggacgatgaagaagctgtaaagaaagaagctcacagaacctctacttctgccttgtctccaggatccaagcccagcacttgggtgtcttgcccaggggaggaagagaatcaagccacggaggataaaagaacagaaagaagtaaaggagccaggaagacctccgtgtccccccgatcttcaggctccgaccccaggtcctgggagtatcgttcaggagaggcgtccgaggagaaggaggaaaaggcacacaaagaaactgggaaaggagaagctgccccagggccgcaatcctcagccccagcccagaggccccagctcaagtcctggtggtgccaacccagtgatgaagaggagggtgaggtcaaggctttgggggcagctgagaaggatggagaagctgagtgtcctccctgcatccccccaccaagtgccttcctgaaggcctgggtgtattggccaggagaggacacagaggaagaggaagatgaggaagaagatgaggacagtgactctggatcagatgaggaagagggagaagctgaggcttcctcttccactcctgctacaggtgtcttcttgaagtcctgggtctatcagccaggagaggacacagaggaggaggaagatgaggacagtgatacaggatcagccgaggatgaaagagaagctgagacttctgcttccacaccccctgcaagtgctttcttgaaggcctgggtgtatcggccaggagaggacacggaggaggaggaagatgaggatgtggatagtgaggataaggaagatgattcagaagcagccttgggagaagctgagtcagacccacatccctcccacccggaccagagggcccacttcaggggctggggatatcgacctggaaaagagacagaggaagaggaagctgctgaggactggggagaagctgagccctgccccttccgagtggccatctatgtacctggagagaagccaccgcctccctgggctcctcctaggctgcccctccgactgcaaaggcggctcaagcgcccagaaacccctactcatgatccggaccctgagactcccctaaaggccagaaaggtgcgcttctccgagaaggtcactgtccatttcctggctgtctgggcagggccggcccaggccgcccgccagggcccctgggagcagcttgctcgggatcgcagccgcttcgcacgccgcatcacccaggcccaggaggagctgagcccctgcctcacccctgctgcccgggccagagcctgggcacgcctcaggaacccacctttagcccccatccctgccctcacccagaccttgccttcctcctctgtcccttcgtccccagtccagaccacgcccttgagccaagctgtggccacaccttcccgctcgtctgctgctgcagcggctgccctggacctcagtgggaggcgtggctgagaccaactggtttgcctataatttattaactatttattttttctaagtgtgggtttatataaggaataaagccttttgatttgtagcg

SEQ ID NO: 179433 - DNA, 1667 bp, Artificial Sequence
  derived and/or modified sequence
gctcttatcggttcccatcccagttgttgatcttatgaaagccgaggaagagggagttgctgaagaggagggagttaacaagttctcttatccaccatcacaccgggagtgttgtccagccgtggaggaggaggacgatgaagaagctgtaaagaaagaagctcacagaacctctacttctgccttgtctccaggatccaagcccagcacttgggtgtcttgcccaggggaggaagagaatcaagccacggaggataaaagaacagaaagaagtaaaggagccaggaagacctccgtgtccccccgatcttcaggctccgaccccaggtcctgggagtatcgttcaggagaggcgtccgaggagaaggaggaaaaggcacacaaagaaactgggaaaggagaagctgccccagggccgcaatcctcagccccagcccagaggccccagctcaagtcctggtggtgccaacccagtgatgaagaggagggtgaggtcaaggctttgggggcagctgagaaggatggagaagctgagtgtcctccctgcatccccccaccaagtgccttcctgaaggcctgggtgtattggccaggagaggacacagaggaagaggaagatgaggaagaagatgaggacagtgactctggatcagatgaggaagagggagaagctgaggcttcctcttccactcctgctacaggtgtcttcttgaagtcctgggtctatcagccaggagaggacacagaggaggaggaagatgaggacagtgatacaggatcagccgaggatgaaagagaagctgagacttctgcttccacaccccctgcaagtgctttcttgaaggcctgggtgtatcggccaggagaggacacggaggaggaggaagatgaggatgtggatagtgaggataaggaagatgattcagaagcagccttgggagaagctgagtcagacccacatccctcccacccggaccagagggcccacttcaggggctggggatatcgacctggaaaagagacagaggaagaggaagctgctgaggactggggagaagctgagccctgccccttccgagtggccatctatgtacctggagagaagccaccgcctccctgggctcctcctaggctgcccctccgactgcaaaggcggctcaagcgcccagaaacccctactcatgatccggaccctgagactcccctaaaggccagaaaggtgcgcttctccgagaaggtcactgtccatttcctggctgtctgggcagggccggcccaggccgcccgccagggcccctgggagcagcttgctcgggatcgcagccgcttcgcacgccgcatcacccaggcccaggaggagctgagcccctgcctcacccctgctgcccgggccagagcctgggcacgcctcaggaacccacctttagcccccatccctgccctcacccagaccttgccttcctcctctgtcccttcgtccccagtccagaccacgcccttgagccaagctgtggccacaccttcccgctcgtctgctgctgcagcggctgccctggacctcagtgggaggcgtggctgagaccaactggtttgcctataatttattaactatttattttttctaagtgtgggtttatataaggaataaagccttttgatttgtagcg

SEQ ID NO: 179434 - DNA, 2266 bp, Artificial Sequence
  derived and/or modified sequence
gctcttatcggttcccatcccagttgttgatcttatgcaagacgctgcacgaccccgcgcccgcttgtcgccacggcacttgaggcagccggagatactctgagttactcggagcccgacgcctgagggtgagatgaacgcgctggcctccctaaccgtccggacctgtgatcgcttctggcagaccgaaccggcgctcctgcccccggggtgacgcgcagctcccagccgcccagacacatggccccaggccaagcaccccatcaggctaccccgtggagggatgccctggctggtggaagcagtaaaaggagcagctctggtagaagctggcctggagggagaagctaggactcctctggcaatcccccataccccttggggcagacgccctgaagaggaggctgaagacagtggaggccctggagaggacagagaaacactggggctgaaaaccagcagttcccttcctgaagcctggggacttttggatgatgatgatggcatgtatggtgagcgagaggcaaccagtgtccctagagggcagggaagtcaatttgcagatggccagcgtgctcccctgtctcccagccttctgataaggacactgcaaggttctgataagaacccaggggaggagaaagccgaggaagagggagttgctgaagaggagggagttaacaagttctcttatccaccatcacaccgggagtgttgtccagccgtggaggaggaggacgatgaagaagctgtaaagaaagaagctcacagaacctctacttctgccttgtctccaggatccaagcccagcacttgggtgtcttgcccaggggaggaagagaatcaagccacggaggataaaagaacagaaagaagtaaaggagccaggaagacctccgtgtccccccgatcttcaggctccgaccccaggtcctgggagtatcgttcaggagaggcgtccgaggagaaggaggaaaaggcacacaaagaaactgggaaaggagaagctgccccagggccgcaatcctcagccccagcccagaggccccagctcaagtcctggtggtgccaacccagtgatgaagaggagggtgaggtcaaggctttgggggcagctgagaaggatggagaagctgagtgtcctccctgcatccccccaccaagtgccttcctgaaggcctgggtgtattggccaggagaggacacagaggaagaggaagatgaggaagaagatgaggacagtgactctggatcagatgaggaagagggagaagctgaggcttcctcttccactcctgctacaggtgtcttcttgaagtcctgggtctatcagccaggagaggacacagaggaggaggaagatgaggacagtgatacaggatcagccgaggatgaaagagaagctgagacttctgcttccacaccccctgcaagtgctttcttgaaggcctgggtgtatcggccaggagaggacacggaggaggaggaagatgaggatgtggatagtgaggataaggaagatgattcagaagcagccttgggagaagctgagtcagacccacatccctcccacccggaccagagggcccacttcaggggctggggatatcgacctggaaaagagacagaggaagaggaagctgctgaggactggggagaagctgagccctgccccttccgagtggccatctatgtacctggagagaagccaccgcctccctgggctcctcctaggctgcccctccgactgcaaaggcggctcaagcgcccagaaacccctactcatgatccggaccctgagactcccctaaaggccagaaaggtgcgcttctccgagaaggtcactgtccatttcctggctgtctgggcagggccggcccaggccgcccgccagggcccctgggagcagcttgctcgggatcgcagccgcttcgcacgccgcatcacccaggcccaggaggagctgagcccctgcctcacccctgctgcccgggccagagcctgggcacgcctcaggaacccacctttagcccccatccctgccctcacccagaccttgccttcctcctctgtcccttcgtccccagtccagaccacgcccttgagccaagctgtggccacaccttcccgctcgtctgctgctgcagcggctgccctggacctcagtgggaggcgtggctgagaccaactggtttgcctataatttattaactatttattttttctaagtgtgggtttatataaggaataaagccttttgatttgt

SEQ ID NO: 179435 - protein, 501 aa, Artificial Sequence
  derived and/or modified sequence
MVRKPVVSTISKGGYLQGNVNGRLPSLGNKEPPGQEKVQLKRKVTLLRGVSIIIGTIIGAGIFISPKGVLQNTGSVGMSLTIWTVCGVLSLFGALSYAELGTTIKKSGGHYTYILEVFGPLPAFVRVWVELLIIRPAATAVISLAFGRYILEPFFIQCEIPELAIKLITAVGITVVMVLNSMSVSWSARIQIFLTFCKLTAILIIIVPGVMQLIKGQTQNFKDAFSGRDSSITRLPLAFYYGMYAYAGWFYLNFVTEEVENPEKTIPLAICISMAIVTIGYVLTNVAYFTTINAEELLLSNAVAVTFSERLLGNFSLAVPIFVALSCFGSMNGGVFAVSRLFYVASREGHLPEILSMIHVRKHTPLPAVIVLHPLTMIMLFSGDLDSLLNFLSFARWLFIGLAVAGLIYLRYKCPDMHRPFKVPLFIPALFSFTCLFMVALSLYSDPFSTGIGFVITLTGVPAYYLFIIWDKKPRWFRIMSEKITRTLQIILEVVPEEDKL

SEQ ID NO: 179436 - DNA, 1506 bp, Artificial Sequence
  derived and/or modified sequence
atggtgagaaagcccgtggtgagcaccatcagcaagggcggctacctgcagggcaacgtgaacggcagactgcccagcctgggcaacaaggagccccccggccaggagaaggtgcagctgaagagaaaggtgaccctgctgagaggcgtgagcatcatcatcggcaccatcatcggcgccggcatcttcatcagccccaagggcgtgctgcagaacaccggcagcgtgggcatgagcctgaccatctggaccgtgtgcggcgtgctgagcctgttcggcgccctgagctacgccgagctgggcaccaccatcaagaagagcggcggccactacacctacatcctggaggtgttcggccccctgcccgccttcgtgagagtgtgggtggagctgctgatcatcagacccgccgccaccgccgtgatcagcctggccttcggcagatacatcctggagcccttcttcatccagtgcgagatccccgagctggccatcaagctgatcaccgccgtgggcatcaccgtggtgatggtgctgaacagcatgagcgtgagctggagcgccagaatccagatcttcctgaccttctgcaagctgaccgccatcctgatcatcatcgtgcccggcgtgatgcagctgatcaagggccagacccagaacttcaaggacgccttcagcggcagagacagcagcatcaccagactgcccctggccttctactacggcatgtacgcctacgccggctggttctacctgaacttcgtgaccgaggaggtggagaaccccgagaagaccatccccctggccatctgcatcagcatggccatcgtgaccatcggctacgtgctgaccaacgtggcctacttcaccaccatcaacgccgaggagctgctgctgagcaacgccgtggccgtgaccttcagcgagagactgctgggcaacttcagcctggccgtgcccatcttcgtggccctgagctgcttcggcagcatgaacggcggcgtgttcgccgtgagcagactgttctacgtggccagcagagagggccacctgcccgagatcctgagcatgatccacgtgagaaagcacacccccctgcccgccgtgatcgtgctgcaccccctgaccatgatcatgctgttcagcggcgacctggacagcctgctgaacttcctgagcttcgccagatggctgttcatcggcctggccgtggccggcctgatctacctgagatacaagtgccccgacatgcacagacccttcaaggtgcccctgttcatccccgccctgttcagcttcacctgcctgttcatggtggccctgagcctgtacagcgaccccttcagcaccggcatcggcttcgtgatcaccctgaccggcgtgcccgcctactacctgttcatcatctgggacaagaagcccagatggttcagaatcatgagcgagaagatcaccagaaccctgcagatcatcctggaggtggtgcccgaggaggacaagctgtag

SEQ ID NO: 179437 - DNA, 1506 bp, Artificial Sequence
  derived and/or modified sequence
atggtcaggaaacccgtcgtcagtactatttccaagggcggatatctgcaaggcaatgtgaatggacgattgcccagccttgggaacaaagaaccccccggccaggagaaggtacagcttaaacggaaggtcacacttctgagaggggtctcaataatcattggcaccataataggcgccgggatatttatcagccctaaaggggtgctacagaacaccggctctgtcggaatgagcctcaccatttggaccgtgtgcggagtgctgtccctattcggcgcattgtcttacgctgaattaggcacgaccattaaaaagagcggtggacactatacgtacattttagaggtcttcggacccctacctgctttcgtgcgggtttgggtggagttgcttatcattaggccagctgcgacagccgtgatttcactcgcattcggaaggtacattctggaaccctttttcatccagtgtgaaatacccgaactcgcaatcaagctgattaccgctgtgggaatcacagttgtgatggtgcttaacagcatgtccgtttcttggtccgcaaggattcaaatcttcctgacattttgcaaactgacggccatccttattatcatcgtgccgggcgttatgcagctcatcaagggtcagacacaaaatttcaaggatgctttttctgggcgagattcaagcattacgcggcttcccttggccttttattacggaatgtacgcctacgctggctggttctacctcaacttcgttactgaggaagtggagaaccccgagaaaacaatccccctggccatctgtatttctatggccatcgtcaccatcggatacgttctgactaacgtcgcatattttactacaattaatgctgaggagctcctcctcagcaatgctgtcgccgtcactttttccgaacggttactcggcaatttctccctcgcagtccctatttttgtggccctgtcctgtttcggaagtatgaacgggggtgtgttcgccgtctctaggttgttctacgtagcctctcgggaggggcacctgcctgagattctcagtatgattcatgtgagaaagcatactccactccctgccgtgatagtactgcacccccttacaatgattatgctgttcagcggggacctagatagtctgctgaacttcctgtcctttgcccgttggctctttataggcctcgcagtggccgggctgatctacctgcggtataaatgccccgatatgcatcgcccttttaaagtccccttgtttatccccgcgctgtttagttttacctgcctgttcatggttgccctctcgctttattccgatccattttcaacgggcatcggctttgtgatcactctgacaggtgtgcccgcctattacctgtttatcatatgggataaaaagcccaggtggtttcggattatgtccgagaagatcaccagaacccttcagatcattttggaggtggttcctgaggaggataagctgtag

SEQ ID NO: 179438 - DNA, 1506 bp, Artificial Sequence
  derived and/or modified sequence
atggtgaggaagcctgtggtgtccaccatcagcaagggcggctacctgcagggcaatgtgaatggccgcctgcccagcctgggcaacaaggagcccccaggccaggagaaggtgcagctgaagaggaaggtgaccctgctgcggggcgtgtccatcatcatcggcaccatcatcggggccggcatcttcatcagccccaagggcgtgctgcagaacacaggctctgtgggcatgagcctgaccatctggacagtgtgtggggtgctgagcctgtttggagccctgtcctatgcagagctgggcaccaccatcaagaagagcggcggccactacacctacatcctggaggtgtttggccccctgcctgcctttgtgcgggtgtgggtggagctgctgatcatccggcctgctgccacagctgtgatcagcctggccttcggccgctacatcctggagcccttcttcatccagtgtgagatccctgagctggccatcaagctgatcacagctgtgggcatcaccgtggtgatggtgctgaacagcatgtctgtgtcctggagcgcccgcatccagatcttcctgaccttctgcaagctgacagccatcctgatcatcatcgtgcctggggtgatgcagctgatcaagggccagacccagaacttcaaggatgccttcagcggccgggacagcagcatcacccggctgcccctggccttctactacggcatgtatgcctatgccggctggttctacctgaactttgtgacagaggaggtggagaaccctgagaagaccatccccctggccatctgcatctccatggccatcgtgaccatcggctacgtgctgaccaacgtggcctacttcaccaccatcaatgctgaggagctgctgctgagcaatgctgtggccgtgaccttcagcgagcggctgctgggcaacttcagcctggccgtgcccatctttgtggccctgagctgcttcggctccatgaatggaggagtgtttgctgtgagccgcctcttctacgtggccagccgggagggccacctgcctgagatcctgtccatgattcatgtgaggaagcacacccccctgcctgctgtgattgtgctgcaccccctgaccatgatcatgctgttcagcggggacctggacagcctgctgaacttcctgagctttgcccgctggctgttcatcggcctggccgtggccggcctcatctacctgcgctacaagtgcccagacatgcaccggcccttcaaggtgcccctcttcatcccagccctcttctccttcacctgcctcttcatggtggccctgagcctgtacagcgaccccttcagcacaggcatcggcttcgtcatcaccctgactggagtgcctgcctactacctgttcatcatctgggacaagaagccccgctggttccgcatcatgtctgagaagatcaccaggaccctgcagatcatcctggaggtggtgcctgaggaggacaagctgtag

SEQ ID NO: 179439 - DNA, 1506 bp, Artificial Sequence
  derived and/or modified sequence
atggtgcggaagcccgtggtgagcaccatcagcaagggcggctacctccagggcaatgttaacggtcgactgccctcactcggcaacaaagagcctcccgggcaggaaaaagtccagctaaaacggaaagtcaccttgctgcgaggtgtgtccatcatcatcgggaccatcataggcgcaggaatttttatttcacccaaaggcgtcctgcagaacaccggctccgttggcatgagcctcacgatctggacagtttgcggcgtgctcagcttgttcggtgctctgagttatgcggagctggggacaaccattaaaaagtcaggaggacattacacatatatcttggaggtgttcggtcctctgcctgctttcgttcgagtgtgggtggaactgttgattataagacctgcggccacagccgtgattagtctggcatttggccggtatattcttgagcccttttttatccagtgtgaaatccccgagcttgcaatcaagttaatcaccgccgtaggaatcaccgtggtgatggtgcttaacagcatgagtgtttcatggagtgccaggatccagatctttttgactttctgcaaactgacagccatcttgatcataattgtccccggcgtcatgcagctgattaagggacaaacccagaatttcaaagatgcgttttccggtagagattcctcgatcaccagactgcccctggctttctactatggaatgtacgcatacgcaggatggttctatctcaacttcgttactgaggaagtcgagaaccctgagaaaaccatccctctggcaatatgtatcagtatggccatcgttacgataggatatgtattgacaaatgtggcctactttacaaccatcaacgccgaagagttgctgctttccaatgcagtggcagtgaccttttcggaaaggctcttgggcaacttctccctcgcagtgcccatctttgtggctctcagctgtttcggcagtatgaacgggggagtttttgctgtctcgcgtctgttctatgtggcgtcccgagaggggcacctgcccgaaatcctgtcaatgatccacgtcagaaagcatacacccttgcccgcagtcattgtgctgcaccccctgacaatgataatgcttttctccggcgatctagacagcctgctgaatttcttgtcatttgctaggtggttattcattggcctcgctgttgcaggactcatctacctccggtacaagtgccccgacatgcatcggccattcaaggtgcctttattcatacccgcgctcttttctttcacctgtttgtttatggtcgcactgagcttatactcagatccattttctacaggaatcggattcgtgattaccctgaccggggttcctgcttactacctgtttataatttgggacaagaaacctcgttggtttcgaattatgtctgaaaagattaccagaacactacagatcattctggaagtagttcctgaagaggacaagctctag

SEQ ID NO: 179440 - DNA, 1506 bp, Artificial Sequence
  derived and/or modified sequence
atggtgcgcaagcccgtggtgagcacaataagtaaaggaggatacctgcagggaaatgtgaacggcagactgccttcacttggtaataaggaacctcctggacaggagaaggtgcaactcaaaagaaaagttacattactgcgcggagttagtatcatcattggcacaatcataggtgcagggatcttcataagccctaagggcgtgctgcagaatactggttcagtcgggatgtcacttacaatctggactgtgtgcggcgtgttgtccttatttggggctctttcctacgcagagcttggaacaacaattaagaaatccggaggccattacacatatatcctcgaggtgttcggtccacttcctgcctttgtgcgggtgtgggttgagctcttaatcataagacccgcagcaactgcagtcatctcactcgccttcggaaggtacatccttgaaccttttttcattcaatgtgagattcctgaactggcgatcaagctgattaccgcagtgggaataaccgttgtgatggtgctcaattcaatgagcgtgtcttggtctgcccgtattcagatcttcctgaccttctgcaagctgacagctatcttgatcatcatcgtgcctggggttatgcagttgataaagggccaaacccagaacttcaaggacgccttctccggcagagattcaagtattactaggctgccgttggccttttactatggtatgtacgcatatgccggatggttctatctcaatttcgtgaccgaggaggtggaaaatccggaaaagactattcccctggcaatctgcatcagcatggcaatcgtcaccattggctatgtgctgacgaatgttgcctactttactacaattaacgcagaggagcttctgctgtcaaacgctgttgctgtcaccttctccgagcgactcctgggcaattttagcctggctgtgcctatttttgtggccttaagttgtttcggctccatgaacggtggcgtcttcgctgtatctcggctgttctacgtagcctcccgggagggccatttaccagaaatattgtctatgattcacgttaggaagcacacgccccttccagcagtcattgtattgcatccgctcacaatgatcatgttgttctctggtgacttagactcccttttgaacttcctgtcttttgcgagatggctgttcatcgggctggctgtggccggtctcatttacctgcggtataagtgtcctgacatgcaccgcccatttaaagtccccttattcataccggcactgtttagcttcacctgccttttcatggtggccctctcactgtacagcgacccattcagcactgggattggctttgtcatcacgctgacaggcgtgccagcttactacctcttcatcatttgggacaagaagccacgttggtttaggattatgagcgagaagatcacacgtacgttacagatcatcctggaggtcgttcccgaggaggacaaactgtag

SEQ ID NO: 179441 - DNA, 9645 bp, Artificial Sequence
  derived and/or modified sequence
ggtttgtaatgatagggcggcagcagcagcagcagcagcagtggtggaacgaggaggtggagaattgagagcacgatgcatacacaggtgtttctgagtagtaattagatcgctgtgaaggaaaaagcacacctttgagttttcacctgtgaacactatagcgctgagagagacagtctgaaagcagaggaagacatcgatcagtaacaccaagagacaccaaagttgaaagttttgttttctttccctctgttttatttttcccccgtgtgtccctactatggtcagaaagcctgttgtgtccaccatctccaaaggaggttacctgcagggaaatgttaacgggaggctgccttccctgggcaacaaggagccacctgggcaggagaaagtgcagctgaagaggaaagtcactttactgaggggagtctccattatcattggcaccatcattggagcaggaatcttcatctctcctaagggcgtgctccagaacacgggcagcgtgggcatgtctctgaccatctggacggtgtgtggggtcctgtcactatttggagctttgtcttatgctgaattgggaacaactataaagaaatctggaggtcattacacatatattttggaagtctttggtccattaccagcttttgtacgagtctgggtggaactcctcataatacgccctgcagctactgctgtgatatccctggcatttggacgctacattctggaaccattttttattcaatgtgaaatccctgaacttgcgatcaagctcattacagctgtgggcataactgtagtgatggtcctaaatagcatgagtgtcagctggagcgcccggatccagattttcttaaccttttgcaagctcacagcaattctgataattatagtccctggagttatgcagctaattaaaggtcaaacgcagaactttaaagacgccttttcaggaagagattcaagtattacgcggttgccactggctttttattatggaatgtatgcatatgctggctggttttacctcaactttgttactgaagaagtagaaaaccctgaaaaaaccattccccttgcaatatgtatatccatggccattgtcaccattggctatgtgctgacaaatgtggcctactttacgaccattaatgctgaggagctgctgctttcaaatgcagtggcagtgaccttttctgagcggctactgggaaatttctcattagcagttccgatctttgttgccctctcctgctttggctccatgaacggtggtgtgtttgctgtctccaggttattctatgttgcgtctcgagagggtcaccttccagaaatcctctccatgattcatgtccgcaagcacactcctctaccagctgttattgttttgcaccctttgacaatgataatgctcttctctggagacctcgacagtcttttgaatttcctcagttttgccaggtggctttttattgggctggcagttgctgggctgatttatcttcgatacaaatgcccagatatgcatcgtcctttcaaggtgccactgttcatcccagctttgttttccttcacatgcctcttcatggttgccctttccctctattcggacccatttagtacagggattggcttcgtcatcactctgactggagtccctgcgtattatctctttattatatgggacaagaaacccaggtggtttagaataatgtcggagaaaataaccagaacattacaaataatactggaagttgtaccagaagaagataagttatgaactaatggacttgagatcttggcaatctgcccaaggggagacacaaaatagggatttttacttcattttctgaaagtctagagaattacaactttggtgataaacaaaaggagtcagttatttttattcatatattttagcatattcgaactaatttctaagaaatttagttataactctatgtagttatagaaagtgaatatgcagttattctatgagtcgcacaattcttgagtctctgatacctacctattggggttaggagaaaagactagacaattactatgtggtcattctctacaacatatgttagcacggcaaagaaccttcaaattgaagactgagatttttctgtatatatgggttttgtaaagatggttttacacactatagatgtctatactgtgaaaagtgttttcaattctgaaaaaaagcatacatcatgattatggcaaagaggagagaaagaaatttattttacattgacattgcattgcttccccttagataccaatttagataacaaacactcatgctttaatggattatacccagagcactttgaacaaaggtcagtggggattgttgaatacattaaagaagagtttctaggggctactgtttatgagacacatccaggagttatgtttaagtaaaaatccttgagaatttattatgtcagatgttttttcattcattatcaggaagttttagttatctgtcatttttttttttcacatcagtttgatcaggaaagtgtataacacatcttagagcaagagttagtttggtattaaatcctcattagaacaaccacctgtttcactaataacttacccctgatgagtctatctaaacatatgcattttaagccttcaaattacattatcaacatgagagaaatcaccaacaaagaagatgttcaaaataatagtcccatatctgtaatcatatctacatgcaatgttagtaattctgaagttttttaaatttatggctatttttacacgatgatgaattttgacagtttgtgcattttctttatacattttatattcttctgttaaaatatctcttcagatgaaactgtccagattaattaggaaaaggcatatattaacataaaaattgcaaaagaaatgtcgctgtaaataagatttacaactgatgtttctagaaaatttccacttctatatctaggctttgtcagtaatttccacaccttaattatcattcaacttgcaaaagagacaactgataagaagaaaattgaaatgagaatctgtggataagtgtttgtgttcagaagatgttgttttgccagtattagaaaatactgtgagccgggcatggtggcttacatctgtaatcccagcactttgggaggctgagggggtggatcacctgaggtcgggagttctagaccagcctgaccaacatggagaaaccccatctctactaaaaatacaaaattagctgggcatggtggcacatgctggtaatctcagctattgaggaggctgaggcaggagaattgcttgaacccgggaggcggaggttgcagtgagccaagattgcaccactgtactccagcctgggtgacaaagtcagactccatctccaaaaaaaaaagattatatatatatatatatgtgtgtgtatgtgtgtgtgtgtgtgtgtgtgtatatatatatatatatatatacacacacacacacacactttttatatatatatatatatatatatagtggaacttacaaatgagagtaatataatgatgaaattttgaactgttatttataaacatctaaggtaaaatggttagtcatggccagagtatgtttcatcctttaatttttgtccatttgaaaataaggatttttgaaagaattataccaattaaaattattaaaggcaaacatagaattcataaaaaattgtccaaagtagaaatgatgacctataatttggagcatttccaattcagtaatttcaattttgctcttgaaaacatttaatatatatccaagactgacatttctttagctgaacctaacgtttgggtctctgagtgaatttataataactccttccttccttagcatagggttttcaaaatttgatttataattcctatttccagtaaatattgttcatttgtccacatctctccctatgatatgttgctggaggtaagaatttctttcatattcctattttttttttccccatagactaggctcatagaatttaaacaagcaaattttcctgagctttttcttgccaaatgaaagaagactggtaaattctcatagagaggtttgtgtagttcttggctcttcctggggttaatgtgcttatattcacagtggcaaattggtctcagactttaatttatttatttttgatttgaatttctctttaaaagtatcaatttaaaaggtaactagaattattctttctcattttcaaaagtgatttttgcattattaaatttccctgccattgtaatgccatttcacgcagaaaaaaagtcagccagtaattaagaaaaaaagtgatggagattaagtagtattttggcttatttttaggactcatcatgagaagacacagttcctttaatcaggaaattaatatccataattttcactcaaaattgcagtatgtaaagcagattctcaaaaactctcctgaacacttatttatatatatgtttttatataagtaaaatttttctcatatttttatacgatatgcacacacacacatacatgcacatactacttactacatgttctgtacttgtactttgtaccatgcatattcaaatgtttatatacataagtttattataacataaacagtaaaagtaatgaatactgtttaaaataactaatatagtattttttaatttttgtggggatggattctcaaatacttgtgattttaaaagattctaaagctaaaacacaacttgattttaaaaagaatgattctccttacacaattataaatatttgcagtaaatattttccttataatactgttttgaccccatttaaaaagtattagattatattcctttgatccaatgaaaactgaaccttataaatggttagctgaaagtagaccttattcttgtccttctttagaagagtaaagatttgtcctagggaagatggctgacttcggttcccaacatgcgtatgcatttagactgtagctcctcagccctgtggacacaaaatttggacagcttattaggttacgttagcaatgcatgacggtttctccaacactaagatattcacgttgaaacagatttcctgttcgtcttatgtgtctggtaaaattgtttccccaattacaatttgacatatcaatagagggttaacaagagtataattacataacagaattcctcatgaactgtaatcagtctacaggaaaatcattattttatcttgatttgcagatgaatatactgctaagaaagggagcaactctgacctttgttaaagttgatcttttgtaattgaggtataaggtatgaaaagataaaaaaccgaaggccagagaatcaggaaatgaaagatagtatggactgaaggtaacaatattttaatgttatgcaatatagtcagagaaatattaaaaattagttgtttgctgtgcataggtggatctcgcaggaagctaatgaaacctaagcttcagtgcctctcacttagacatgttccattcgaggtcctgaacctaactttgtattaggaattctgtactaattttgttgaagaagaccagcaaagttgtgtacacttctacccccacaaaatctgcattgtccatgtgagtaaagtaaaataattcctgttatttttttctgttagaaataagtatggaggatatgtttttaaaaatttatgagttaattgaaatatccatatataacaagtgactttctcacaatatatatgatgtgatatatagggagatagtttcactttcatcatattttatacgttgattctgaactatagaaaaataataaatgggattttaattatagctcttagttgggaaagaaatatagagagatgtgggatttgaatgcccatgaaagacattttattttacttgaatatattcttgcttcactttaccctccataatatgttgtacattagtgctgatcaagtttacagagttacattttgctttcctaaccattcagtcaggaattaaaatatggcattgtataacaactgggaagaagctcatagtggatataaattagagtagataatgggtcaccttgatagcctctgtttacattacttgtatatgggcaaaataattattacctatacgtgtatttaagcttaattttcatataaacagtatttttaatctatgttaaaatagataatatctaaaagtgtgatctctaggtagtccttagtttattagtactgtacttcaaaaagatttttaaataggtccggcacggtggctcatgcctgtaatcccagcactttgggaggctgaggcgggcgaatcacctgaggtcaggagttcgagatcagcctggccaacatggtgaaaccctgtctcaactaaaaatataaaaattagccgggcgtggtggcaggcgcctgtaatcccagctactcgggaggctgaggcaggagaatcacttgaacccaaggggcagaagctgcagttagccaagatcgcatcattgcactccagcctaggggacaagagcgcgagacttcatctcaaaaaaaaaaaaaaaaaaaaaaaaagatttttaaataatagctaaaggtatgctctctaggtcatccttagtttattagtactgtacttaaaaattattttttaatagtcaattttgggagataattatttctttccttatattttccaattagttggtgtctaaaaataaatgttttgtctaattttagatcaggtatacattcacaaaagcataaatcatagtctcacaggaaattcaccaattttccatatgtcgtgagataactgtcctttctacaacctcataacaatgaatttatataattacctagattttcttagtgtgaatctacccattagttttattttcttggtagttatttttttccctcctctctgttactattggccttaaaatacacagaggacggttacagtgtcctaatagctgttacatgtgtgtgtttcagcgtacttgaatcaagtgtacatttatagtaccaataaccgcctttacagctttacagttaacaattctctcacaaaactgtagagcattaggcatctgagagccatagagggccaactttgttccagagtgaacatgctttttttcctcaacatatacactactgattttttttaaaagtatgactttcaagtgaattaatgtattggttaggagaactgcttgctaagtccttattacctcttgttaaagcctcagaaggccgtgctgaaagccagaggggaaaaaaagagtaatgcacaggtatctcttttgcagtggtgactgtattttgagtaccttgtgtgacagggtattattacagcatcttgtgggaaaacctattaggcctttgcatgttaaagctgtataatttgttgggttgtgagtggtctgacttaaatgtgtattataaaatttagacatcaaattttcctactaactaactttattagatgcatacttggaagcacagtcatatcacactgggaggcaatgcaatgtggttacctggtcctaggtttgaactgtcttatttcaaaagatttctgaattaatttttccctagaatttctccttcattccaaagtacaaacatactttgaagaatgaaacagattgttcccatgaatgtatgctcatactcgactagaaacgatctatgttaaatgactgtgtatatgaattatttcaagtactaccccaaataactttcttattgctctgaaagaagaaaagcaatgtaaatcactatgattattgcacaaacaaccagaattctccaacaattttaagtaatctgatcctcttcttggagaaaattgttacctaatagtttttccttatgaatgttattactactggtataaatcaaatttctataaatttcctacttaagtcttaagaactgggttcttcctttgatgttattcatgttcagaaaggaaacaacactttactcttttaggacaattcctagaatctatagtagtatcaggatatattttgctttaaaatatattttggttattttgaatacagacattggctccaaattttcatctttgcacaatagtatgacttttcactagaacttctcaacatttgggaactttgcaaatatgagcatcatatgtgttaaggctgtatcatttaatgctatgagatacattgttttctccctatgccaaacaggtgaacaaacgtagttgttttttactgatactaaatgttggctacctgtgattttatagtatgcacatgtcagaaaaaggcaagacaaatggcctcttgtactgaatacttcggcaaacttattgggtcttcattttctgacagacaggatttgactcaatatttgtagagcttgcgtagaatggattacatggtagtgatgcactggtagaaatggtttttagttattgactcagaattcatctcaggatgaatcttttatgtctttttattgtaagcatatctgaatttactttataaagatggttttagaaagctttgtctaaaaatttggcctaggaatggtaacttcattttcagttgccaaggggtagaaaaataatatgtgtgttgttatgtttatgttaacatattattaggtactatctatgaatgtatttaaatatttttcatattctgtgacaagcatttataatttgcaacaagtggagtccatttagcccagtgggaaagtcttggaactcaggttacccttgaaggatatgctggcagccatctctttgatctgtgcttaaactgtaatttatagaccagctaaatccctaacttggatctggaatgcattagttatgaccttgtaccattcccagaatttcaggggcatcgtgggtttggtctagtgattgaaaacacaagaacagagagatccagctgaaaaagagtgatcctcaatatcctaactaactggtcctcaactcaagcagagtttcttcactctggcactgtgatcatgaaacttagtagaggggattgtgtgtattttatacaaatttaatacaatgtcttacattgataaaattcttaaagagcaaaactgcattttatttctgcatccacattccaatcatattagaactaagatatttatctatgaagatataaatggtgcagagagactttcatctgtggattgcgttgtttcttagggttcctagcactgatgcctgcacaagcatgtgatatgtgaaataaaatggattcttctatagctaaatgagttccctctggggagagttctggtactgcaatcacaatgccagatggtgtttatgggctatttgtgtaagtaagtggtaagatgctatgaagtaagtgtgtttgttttcatcttatggaaactcttgatgcatgtgcttttgtatggaataaattttggtgcaatatgatgtcattcaactttgcattgaattgaattttggttgtatttatatgtattatacctgtcacgcttctagttgcttcaaccattttataaccatttttgtacatattttacttgaaaatattttaaatggaaatttaaataaacatttgatagtttacataa

SEQ ID NO: 179442 - protein, 88 aa, Artificial Sequence
  derived and/or modified sequence
MNMSKQPVSNVRAIQANINIPMGAFRPGAGQPPRRKECTPEVEEGVPPTSDEEKKPIPGAKKLPGPAVNLSEIQNIKSELKYVPKAEQ

SEQ ID NO: 179443 - DNA, 267 bp, Artificial Sequence
  derived and/or modified sequence
atgaacatgagtaaacagcctgtgtccaacgtgagagccatccaggcaaacatcaacataccaatgggcgcctttagacccggagccggtcagcctcctcgccgcaaggagtgtaccccggaagtggaggaaggggtaccgcccacatccgatgaagaaaaaaagccgattcccggcgccaagaagctcccaggacctgcagttaacttgtctgaaattcaaaacatcaaatccgagctgaagtacgtgcctaaagcagaacagtag

SEQ ID NO: 179444 - DNA, 267 bp, Artificial Sequence
  derived and/or modified sequence
atgaacatgagcaagcagcctgtgtccaatgtgcgggccatccaggccaacatcaacatccccatgggcgccttccggcctggagctggccagccccccaggaggaaagaatgtaccccagaggtggaggagggcgtgccccccaccagtgatgaggagaagaagcccatccctggggccaagaagctgcccggccctgctgtgaacctgtctgagatccagaacatcaagtctgagctgaagtatgtgcccaaggccgagcagtag

SEQ ID NO: 179445 - DNA, 267 bp, Artificial Sequence
  derived and/or modified sequence
atgaacatgagcaagcagcccgtgagcaacgtgcgggccatccaggcaaacatcaacatcccaatgggtgcctttagaccaggcgccggccaaccccctcgacgcaaggaatgtacccctgaagtagaagaaggggtgcctcctaccagtgatgaagagaagaagccgattcctggtgccaagaaactgccaggacctgccgtcaatctctctgaaatccagaacatcaagagtgaactgaaatacgtaccgaaagcagagcagtag

SEQ ID NO: 179446 - DNA, 267 bp, Artificial Sequence
  derived and/or modified sequence
atgaacatgtctaagcagccagtgtctaatgtccgagcgatccaggccaatatcaacatccctatgggcgcttttcggccaggagcaggccagcctcctagacggaaagagtgtacaccagaagtggaggagggagttcccccaacatcagacgaggagaagaaaccaatccccggtgctaagaagctgcccggtccagcagtgaacctcagtgagatacagaatattaagagcgaactgaagtatgttcccaaggccgagcagtag

SEQ ID NO: 179447 - DNA, 938 bp, Artificial Sequence
  derived and/or modified sequence
aacacttagccttaacggtttaagttcccctccagccccgagccaggagcagttctcaataccgggagaggcacagagctatttcagccacatgaaaagcatcggaattgagatcgcagctcagaggacaccgggcgccccttccaccttccaaggagctttgtattcttgcatctggctgcctgggacttcccttaggcagtaaacaaatacataaagcagggataagactgcatgaatatgtcgaaacagccagtttccaatgttagagccatccaggcaaatatcaatattccaatgggagcctttcggccaggagcaggtcaaccccccagaagaaaagaatgtactcctgaagtggaggagggtgttcctcccacctcggatgaggagaagaagccaattccaggagcgaagaaacttccaggacctgcagtcaatctatcggaaatccagaatattaaaagtgaactaaaatatgtccccaaagctgaacagtagtaggaagaaaaaaggattgatgtgaagaaataaagaggcagaagatggattcaatagctcactaaaattttatatatttgtatgatgattgtgaacctcctgaatgcctgagactctagcagaaatggcctgtttgtacatttatatctcttccttctagttggctgtatttcttactttatcttcatttttggcacctcacagaacaaattagcccataaattcaacacctggagggtgtggttttgaggagggatatgattttatggagaatgatatggcaatgtgcctaacgattttgatgaaaagtttcccaagctacttcctacagtattttggtcaatatttggaatgcgttttagttcttcaccttttaaattatgtcactaaactttgtatgagttcaaataaatatttgactaaatgtaaaatgtgaa

SEQ ID NO: 179448 - DNA, 267 bp, Artificial Sequence
  derived and/or modified sequence
atgaacatgagcaagcagcccgtgagcaacgtgagagccatccaggccaacatcaacatccccatgggcgccttcagacccggcgccggccagccccccagaagaaaggagtgcacccccgaggtggaggagggcgtgccccccaccagcgacgaggagaagaagcccatccccggcgccaagaagctgcccggccccgccgtgaacctgagcgagatccagaacatcaagagcgagctgaagtacgtgcccaaggccgagcagtag

SEQ ID NO: 179449 - protein, 442 aa, Artificial Sequence
  derived and/or modified sequence
MASVVLPSGSQCAAAAAAAAPPGLRLRLLLLLFSAAALIPTGDGQNLFTKDVTVIEGEVATISCQVNKSDDSVIQLLNPNRQTIYFRDFRPLKDSRFQLLNFSSSELKVSLTNVSISDEGRYFCQLYTDPPQESYTTITVLVPPRNLMIDIQKDTAVEGEEIEVNCTAMASKPATTIRWFKGNTELKGKSEVEEWSDMYTVTSQLMLKVHKEDDGVPVICQVEHPAVTGNLQTQRYLEVQYKPQVHIQMTYPLQGLTREGDALELTCEAIGKPQPVMVTWVRVDDEMPQHAVLSGPNLFINNLNKTDNGTYRCEASNIVGKAHSDYMLYVYDPPTTIPPPTTTTTTTTTTTTTILTIITDSRAGEEGSIRAVDHAVIGGVVAVVVFAMLCLLIILGRYFARHKGTYFTHEAKGADDAADADTAIINAEGGQNNSEEKKEYFI

SEQ ID NO: 179450 - DNA, 1329 bp, Artificial Sequence
  derived and/or modified sequence
atggcaagcgtcgtgttaccgtccggctcccagtgcgccgccgccgccgcggcagcagctccaccggggctgcggctcagattattgctcctcctgtttagcgctgcagcgctaatcccaaccggagacggacagaatctgttcactaaagacgttaccgtcatcgaaggtgaggtagccaccataagctgccaggtcaacaagtctgacgatagcgttattcaactcctgaaccccaaccgccagacaatttactttcgggactttcgcccactgaaggactctcgattccagctcttgaacttttcatcgtcagagttgaaagtgagcttaaccaatgtcagcattagcgacgaaggccggtacttctgccagttgtatactgatcccccccaagaatcctacaccacaatcactgtgttggtgcccccgcggaaccttatgatagatatccagaaagacacagccgtggaaggggaagagatcgaagtgaactgtaccgccatggcatccaagcccgccacaacaatccggtggtttaaggggaacacagagctgaaagggaagagcgaggtggaagaatggagtgacatgtacacagtgacttcccagcttatgctgaaggtgcataaggaagacgatggggtccccgttatttgccaagtagaacaccccgccgtgaccggcaatttacagacgcagaggtatctggaggtacagtataagcctcaggtgcatatccaaatgacctaccctctgcaaggccttacacgagagggcgatgctctagagctaacttgcgaggcaatcggcaaaccacagcccgtgatggtaacgtgggttcgggtggatgacgaaatgccccaacacgcagttctctctggccctaatctgtttatcaacaatttaaacaagactgacaatgggacttaccgttgcgaggctagtaacatcgtgggtaaagctcattcagactatatgctgtatgtgtatgaccccccaacgacgattccccctcctaccaccactacaacgactaccaccactacaactactacaatactgacaataatcacggattcgagggccggagaggagggctcaatcagagccgtcgatcacgctgtgatcggtggggtcgtggcagttgtcgttttcgcgatgctgtgtctcctcatcatcctcggaagatattttgcacgccacaagggcacatattttactcatgaagcgaagggggcagacgacgcagcggacgcggacactgcaattattaatgccgagggagggcagaataactcggaggaaaagaaggaatattttatttag

SEQ ID NO: 179451 - DNA, 1329 bp, Artificial Sequence
  derived and/or modified sequence
atggcctctgtggtgctgcccagcggcagccagtgtgccgctgctgctgctgctgctgcccctcctggcctgcggctgcggctgctgctgctgctcttctctgctgctgccctgatccccactggagatggccagaacctcttcaccaaggatgtgacagtgattgaaggagaggtggccaccatcagctgccaggtgaacaagagtgatgacagcgtcatccagctgctgaaccccaaccggcagaccatctacttccgggacttccggcccctgaaggacagccgcttccagctgctgaacttcagcagcagcgagctgaaggtgtccctgaccaacgtgtccatcagtgatgagggccgctacttctgccagctgtacacagaccccccccaggagagctacaccaccatcaccgtgctggtgcccccaagaaacctgatgattgacatccagaaggacacagctgtggagggggaggagattgaggtgaactgcacagccatggccagcaagccagccaccaccatccgctggttcaagggcaacacagagctgaagggcaagtctgaggtggaggagtggagcgacatgtacacagtgaccagccagctgatgctgaaggtgcacaaggaggatgatggagtgcctgtgatctgccaggtggagcaccctgctgtgacaggcaacctgcagacccagcgctacctggaggtgcagtacaagccccaggtgcacatccagatgacctaccccctgcagggcctgacccgggagggagatgccctggagctgacctgtgaggccatcggcaagccccagcctgtgatggtgacctgggtgcgggtggatgatgagatgccccagcacgctgtgctgagcggccccaacctcttcatcaacaacctgaacaagacagacaatggcacctaccgctgtgaggccagcaacatcgtgggcaaggcccacagcgactacatgctgtatgtgtatgacccccccaccaccatccccccacccaccaccaccaccaccaccaccaccaccaccaccaccaccatcctgaccatcatcacagacagcagagctggggaggagggcagcatccgggctgtggaccatgctgtgattggaggagtggtggccgtggtggtgtttgccatgctgtgcctgctgatcatcctgggccgctactttgcccggcacaagggcacctacttcacccatgaggccaagggagcagatgatgctgctgatgctgacacagccatcatcaatgctgagggcggccagaacaacagcgaggagaagaaggagtacttcatctag

SEQ ID NO: 179452 - DNA, 1329 bp, Artificial Sequence
  derived and/or modified sequence
atggccagcgtggtgctgcccagcggcagccagtgcgccgccgccgccgcagcagccgcacctccaggtttaagactgcgtctgctattactgttattcagcgctgctgctctcatccctacaggggatggccagaatttgttcactaaagacgttactgtgatcgagggggaggtcgccactatcagctgtcaagtgaataagagtgacgacagtgtcattcaactgctcaacccaaatcggcagaccatttacttcagggacttcagacccctcaaagattcacgattccagctcctcaatttctcctccagcgagctgaaggtctctcttaccaacgtgagcataagcgatgaggggcgctacttttgccagttatacacagatccacctcaggagtcctacaccaccatcactgtcctcgttccgccaagaaacctcatgatcgacatccagaaagataccgcagtggaaggagaggaaatagaagttaactgtacagccatggcaagtaaacccgctacaacaattaggtggttcaagggaaataccgagttgaaaggtaagtcggaggtcgaagaatggagtgatatgtacaccgtgacatctcagctgatgctcaaggtacataaagaggacgacggggtaccggtcatttgtcaggtggaacaccctgcagtcacgggcaacctgcagacccaacggtatctggaggtccagtacaagccacaggtgcatatccagatgacctaccccctacaagggctgactcgggagggagacgctctggaactgacatgtgaggcaatagggaagccacagccagtgatggttacctgggtacgtgtcgatgacgagatgccacagcatgccgttctgtctgggcccaatctgtttatcaacaacctgaataagactgataatggaacctatagatgcgaggcctcaaatattgtcgggaaggcacattccgactatatgttgtatgtgtacgacccgcccactaccatcccgcctccaactacaacaacaacaactacgacaaccactaccacaacaatactgactatcataaccgatagcagagcaggtgaggagggttccatccgggctgtggatcacgcggtgatcgggggggtggtcgctgtggttgtgttcgcaatgctctgcctgctcataatattggggcgctattttgcgagacacaaaggaacatattttacacatgaagccaaaggggcagatgacgcggctgacgcagacacagccatcatcaatgcagagggcgggcaaaacaacagtgaagaaaaaaaagaatatttcatctag

SEQ ID NO: 179453 - DNA, 1329 bp, Artificial Sequence
  derived and/or modified sequence
atggccagcgtggtgcttcccagcggaagccagtgtgccgctgcagctgctgctgccgctccccctggattgaggctgcggctgttgctcctgctctttagcgccgctgcactgattcctaccggagacggccaaaatctgttcactaaagacgttaccgtgatcgagggggaggttgcaactatctcttgccaggtgaacaaaagtgacgactctgtgatacaactcctgaacccaaatcgacagaccatatatttccgcgacttccgtccactgaaagatagccgctttcagttattaaacttttcctcttccgaacttaaagtctcgctcactaacgtctccatcagtgatgaaggccgatatttctgccagctgtacaccgacccaccacaagaaagttatacgactattaccgttttggtccctccgaggaatcttatgattgatatacagaaggacacagccgtggagggagaagaaatcgaggtaaactgcactgccatggcatctaagccggctacgaccatccgatggttcaagggtaataccgagctgaaaggtaagtccgaagtggaggagtggagtgacatgtataccgtcacatcccagttgatgttaaaggtgcacaaggaggacgacggtgtgccagtgatctgtcaggtggagcatcctgccgttaccgggaatttacagacccagcggtacctggaggtacaatacaaaccgcaggttcacatccagatgacctaccctttgcagggactgacgagggagggcgatgcactcgaactaacctgcgaggcaattggaaagccacagcctgtgatggtgacgtgggtacgtgtcgatgacgaaatgcctcagcatgctgtcctgagcggaccaaacctgtttattaacaatctcaacaaaacggataacggcacgtaccgttgtgaagcttccaacatcgttggtaaagcacatagcgattacatgttgtacgtttacgaccctccgacaacgattcctcctcctactaccacaaccacaaccaccacaaccacaaccaccacaatcctgacaattatcacagacagtcgggcaggcgaggaagggagcatcagggctgtcgaccatgccgtcattggcggtgtggtggccgtcgtcgttttcgccatgctgtgtctgcttataatactgggcaggtacttcgctcgccacaagggaacttatttcacgcatgaagcaaaaggtgctgacgacgctgcagacgctgataccgccattataaatgccgagggtgggcaaaacaatagcgaggagaagaaggagtattttatctag

SEQ ID NO: 179454 - DNA, 3517 bp, Artificial Sequence
  derived and/or modified sequence
agtctgaggcaggtgcccgacatggcgagtgtagtgctgccgagcggatcccagtgtgcggcggcagcggcggcggcggcgcctcccgggctccggctccggcttctgctgttgctcttctccgccgcggcactgatccccacaggtgatgggcagaatctgtttacgaaagacgtgacagtgatcgagggagaggttgcgaccatcagttgccaagtcaataagagtgacgactctgtgattcagctactgaatcccaacaggcagaccatttatttcagggacttcaggcctttgaaggacagcaggtttcagttgctgaatttttctagcagtgaactcaaagtatcattgacaaacgtctcaatttctgatgaaggaagatacttttgccagctctataccgatcccccacaggaaagttacaccaccatcacagtcctggtcccaccacgtaatctgatgatcgatatccagaaagacactgcggtggaaggtgaggagattgaagtcaactgcactgctatggccagcaagccagccacgactatcaggtggttcaaagggaacacagagctaaaaggcaaatcggaggtggaagagtggtcagacatgtacactgtgaccagtcagctgatgctgaaggtgcacaaggaggacgatggggtcccagtgatctgccaggtggagcaccctgcggtcactggaaacctgcagacccagcggtatctagaagtacagtataagcctcaagtgcacattcagatgacttatcctctacaaggcttaacccgggaaggggacgcgcttgagttaacatgtgaagccatcgggaagccccagcctgtgatggtaacttgggtgagagtcgatgatgaaatgcctcaacacgccgtactgtctgggcccaacctgttcatcaataacctaaacaaaacagataatggtacataccgctgtgaagcttcaaacatagtggggaaagctcactcggattatatgctgtatgtatacgatccccccacaactatccctcctcccacaacaaccaccaccaccaccaccaccaccaccaccaccatccttaccatcatcacagattcccgagcaggtgaagaaggctcgatcagggcagtggatcatgccgtgatcggtggcgtcgtggcggtggtggtgttcgccatgctgtgcttgctcatcattctggggcgctattttgccagacataaaggtacatacttcactcatgaagccaaaggagccgatgacgcagcagacgcagacacagctataatcaatgcagaaggaggacagaacaactccgaagaaaagaaagagtacttcatctagatcagcctttttgtttcaatgaggtgtccaactggccctatttagatgataaagagacagtgatattggaacttgcgagaaattcgtgtgtttttttatgaatgggtggaaaggtgtgagactgggaaggcttgggatttgctgtgtaaaaaaaaaaaaaatgttctttggaaagtacactctgctgtttgacacctcttttttcgtttgtttgtttgtttaatttttatttcttcctaccaagtcaaacttggatacttggatttagtttcagtagattgcagaaaattctgtgccttgttttttgtttgtttgttgcgttcctttcttttccccctttgtgcacatttatttcctccctctaccccaatttcggattttttccaaaatctcccattttggaatttgcctgctgggattccttagactcttttccttcccttttctgttctagttttttacttttgtttatttttatggtaactgctttctgttccaaattcagtttcataaaaggagaaccagcacagcttagatttcatagttcagaatttagtgtatccataatgcattcttctctgttgtcgtaaagatttgggtgaacaaacaatgaaaactctttgctgctgcccatgtttcaaatacttagagcagtgaagactagaaaattagactgtgattcagaaaatgttctgtttgctgtggaactacattactgtacagggttatctgcaagtgaggtgtgtcacaatgagattgaatttcactgtctttaattctgtatctgtagacggctcagtatagataccctacgctgtccagaaaggtttggggcagaaaggactcctcctttttccatgccctaaacagacctgacaggtgaggtctgttccttttatataagtggacaaattttgagttgccacaggaggggaagtagggaggggggaaatacagttctgctctggttgtttctgttccaaatgattccatccacctttcccaatcggccttacttctcactaatttgtaggaaaaagcaagttcgtctgttgtgcgaatgactgaatgggacagagttgatttttttttttttttcctttgtgcttagttaggaaggcagtaggatgtggcctgcatgtactgtatattacagatatttgtcatgctgggatttccaactcgaatctgtgtgaaactttcattccttcagatttggcttgacaaaggcaggaggtacaaaagaagggctggtattgttctcacactggtctgctgtcgctctcagttctcgataggtcagagcagaggtggaaaaacagcatgtacggattttcagttacttaatcaaaactcaaatgtgagtgtttttatctttttacctttcatacactagccttggcctctttcctcagccttaagaaccatctgccaaaaattactgatcctcgcatgatggcagccatagtgcatagctactaaaatcagtgaccttgaacatatcttagatggggagcctcgggaaaaggtagaggagtcacgttaccatttacatgttttaaagaaagaagtgtggggattttcactgaaacgtctaggaaatctagaagtagtcctgaaggacagaaactaaactcttaccatatgtttggtaagactccagactccagctaacagtccctatggaaagatggcatcaaaaaagatagatctatatatatatataaatatatattctattacattttcagtgagtaattttggattttgcaaggtgcatttttactattgttacattatgtggaaaacttatgctgatttatttaagggggaaaaagtgtcaactctttgttatttgaaaacatgtttatttttcttgtctttattttaacctttgatagaaccattgcaatatgggggccttttgggaacggactggtatgtaaaagaaaatccattatcgagcagcattttatttacccctcccctatccctaggcacttaaccaagacaaaaagccacaatgaacatccctttttcaatgaattttataatctgcagctctattccgagcccttagcacccattccgaccatagtataatcatatcaaagggtgagaatcatttagcatgttgttgaaaggttttttttcagttgttcttttt

SEQ ID NO: 179455 - DNA, 1329 bp, Artificial Sequence
  derived and/or modified sequence
atggccagcgtggtgctgcccagcggcagccagtgcgccgccgccgccgccgccgccgccccccccggcctgagactgagactgctgctgctgctgttcagcgccgccgccctgatccccaccggcgacggccagaacctgttcaccaaggacgtgaccgtgatcgagggcgaggtggccaccatcagctgccaggtgaacaagagcgacgacagcgtgatccagctgctgaaccccaacagacagaccatctacttcagagacttcagacccctgaaggacagcagattccagctgctgaacttcagcagcagcgagctgaaggtgagcctgaccaacgtgagcatcagcgacgagggcagatacttctgccagctgtacaccgaccccccccaggagagctacaccaccatcaccgtgctggtgccccccagaaacctgatgatcgacatccagaaggacaccgccgtggagggcgaggagatcgaggtgaactgcaccgccatggccagcaagcccgccaccaccatcagatggttcaagggcaacaccgagctgaagggcaagagcgaggtggaggagtggagcgacatgtacaccgtgaccagccagctgatgctgaaggtgcacaaggaggacgacggcgtgcccgtgatctgccaggtggagcaccccgccgtgaccggcaacctgcagacccagagatacctggaggtgcagtacaagccccaggtgcacatccagatgacctaccccctgcagggcctgaccagagagggcgacgccctggagctgacctgcgaggccatcggcaagccccagcccgtgatggtgacctgggtgagagtggacgacgagatgccccagcacgccgtgctgagcggccccaacctgttcatcaacaacctgaacaagaccgacaacggcacctacagatgcgaggccagcaacatcgtgggcaaggcccacagcgactacatgctgtacgtgtacgacccccccaccaccatccccccccccaccaccaccaccaccaccaccaccaccaccaccaccaccatcctgaccatcatcaccgacagcagagccggcgaggagggcagcatcagagccgtggaccacgccgtgatcggcggcgtggtggccgtggtggtgttcgccatgctgtgcctgctgatcatcctgggcagatacttcgccagacacaagggcacctacttcacccacgaggccaagggcgccgacgacgccgccgacgccgacaccgccatcatcaacgccgagggcggccagaacaacagcgaggagaagaaggagtacttcatctag

SEQ ID NO: 179456 - protein, 344 aa, Artificial Sequence
  derived and/or modified sequence
MRRPRQGGGGAGGSAAARARAGGLGGGSVPARARGAPAAARAAWLRDLCARMARPPRQHPGVWASLLLLLLTGPAACAASPADDGAGPGGRGPRGRARGDTGADEAVPRHDSSYGTFAGEFYDLRYLSEEGYPFPTAPPVDPFAKIKVDDCGKTKGCFRYGKPGCNAETCDYFLSYRMIGADVEFELSADTDGWVAVGFSSDKKMGGDDVMACVHDDNGRVRIQHFYNVGQWAKEIQRNPARDEEGVFENNRVTCRFKRPVNVPRDETIVDLHLSWYYLFAWGPAIQGSITRHDIDSPPASERVVSIYKYEDIFMPSAAYQTFSSPFCLLLIVALTFYLLMGTP

SEQ ID NO: 179457 - DNA, 1035 bp, Artificial Sequence
  derived and/or modified sequence
atgcgcagaccaagacagggcggtgggggcgctggggggagtgccgccgctagagctcgagcggggggattaggaggcggaagcgttccagcgagagcccggggagcgcccgctgcagcaagggcagcctggcttagagatctgtgtgcacgcatggcaagaccacctagacaacatcctggagtttgggcatctctgttgctcctactgctaaccggccctgccgcgtgtgcagccagtcccgcggacgatggtgccggtcctggggggcggggaccacgaggtcgggctagaggagatactggggcagacgaggcagtcccaaggcacgacagttcttatggtacgttcgccggtgagttttatgacctacgctacctctctgaagagggctatccgtttccaaccgccccaccagtggacccgttcgccaaaatcaaagtggatgactgtgggaagacgaaaggctgctttaggtacggcaagcccggctgtaatgccgagacttgtgattatttcctgtcataccggatgataggcgccgatgttgagttcgaactgtctgcagacacagacgggtgggtggccgtgggtttttcatccgataaaaagatggggggggacgatgtgatggcttgtgtccatgatgacaacgggcgggtgcgaattcagcatttctataacgtcggccagtgggccaaagaaatacaacggaaccccgccagagacgaagaaggcgtctttgaaaataatagggttacttgtagatttaaacggcccgtgaatgtgccaagagatgagactatcgtcgacctgcatctcagctggtattacttgtttgcctggggtcccgcaatacagggttctatcacgcgccatgacatagacagcccaccggccagcgagcgtgtcgtgtccatctacaagtatgaggatatttttatgcccagtgccgcctaccagactttctcaagtcccttttgcttgctcctgatcgtcgccctgactttttatttactgatgggcactccatag

SEQ ID NO: 179458 - DNA, 1035 bp, Artificial Sequence
  derived and/or modified sequence
atgaggcggccccggcagggcggcggcggggccggcggcagcgctgctgcccgggcccgggccggcggcctgggcggcggctctgtgcctgcccgggcccggggggccccagctgctgcccgggccgcctggctgcgggacctgtgtgccaggatggcccggcccccccggcagcaccctggggtgtgggccagcctgctgctgctgctgctgaccggccctgctgcctgtgccgccagccctgcagatgatggagctggccctgggggccggggcccccggggccgggcccggggggacacaggagcagatgaggccgtgcccaggcatgacagcagctatggcacctttgctggggagttctatgacctgcgctacctgtctgaggagggctaccccttccccacagcccctcctgtggacccctttgccaagatcaaggtggatgactgtgggaagaccaagggctgcttccgctatggcaagccaggctgcaatgctgagacctgtgactacttcctgagctacaggatgattggagcagatgtggagtttgagctgtctgctgacacagatggctgggtggccgtgggcttcagcagtgacaagaagatgggaggagatgatgtgatggcctgtgtgcatgatgacaatggccgggtgcgcatccagcacttctacaacgtgggccagtgggccaaggagatccagaggaacccagccagagatgaggagggcgtgtttgagaacaacagagtgacctgccgcttcaagaggcctgtgaatgtgcccagagatgagaccatcgtggacctgcacctgtcctggtactacctgtttgcctggggccctgccatccagggcagcatcaccaggcatgacatcgacagccccccagccagcgagcgggtggtgtccatctacaagtatgaggacatcttcatgcccagcgctgcctaccagaccttcagcagccccttctgcctgctgctgattgtggccctgaccttctacctgctgatgggcaccccctag

SEQ ID NO: 179459 - DNA, 1035 bp, Artificial Sequence
  derived and/or modified sequence
atgcggcggccccggcagggcggcggcggcgccggcggcagcgccgccgcacgagctagggcgggcggacttggcggcggtagcgttcccgcgagggcccgcggggcacccgctgctgccagggccgcctggctcagagacttatgtgctcgcatggccagacctccccgtcagcaccccggcgtgtgggcctccctgttactgctgctgttgacaggacccgctgcgtgcgcagccagcccagccgacgacggagccgggccgggaggtcgcgggccccgcggccgggcgcgcggtgataccggtgcagatgaagccgtcccccgacacgactcttcatatggcaccttcgcaggcgagttctacgatttgagatacctgtcagaagagggctatcccttccccaccgcccctccagtggatccctttgcaaaaatcaaggtggatgactgtggtaaaactaaaggctgttttaggtacggaaagccaggatgcaacgctgagacatgcgactactttctatcctatcggatgataggagcggacgtcgaatttgaactgagcgcagacactgacggctgggttgccgtcggctttagctctgacaagaagatgggcggtgacgatgtcatggcatgcgtgcatgatgacaatgggcgggtacggattcagcatttctataacgtcggtcagtgggctaaagagattcagcggaaccccgctcgcgacgaggagggcgtgttcgaaaataacagagtgacatgtcggtttaaacggccggtgaacgtgcctcgggacgagaccatcgttgaccttcacctttcttggtattacctcttcgcctgggggccagcaattcagggcagcataacccgccacgacatcgactctccgcctgcgtccgaacgcgtcgtgtctatttacaagtacgaggacatcttcatgccatccgctgcttaccagacattcagtagcccattttgtctgctactgattgttgctcttacattttatttgctgatgggcacaccctag

SEQ ID NO: 179460 - DNA, 1035 bp, Artificial Sequence
  derived and/or modified sequence
atgagacgacccaggcagggaggcggtggggctggaggctccgccgcagcacgcgctcgcgcagggggtctggggggaggctctgtgcctgcgagggccagaggcgctccagctgctgctagggctgcatggctccgcgatctgtgcgcgagaatggcgcgtcctcccaggcagcacccaggggtatgggctagcctactcctgctgctactgacaggcccagccgcatgcgccgcatcacccgcagatgatggagccggtcctggtggacgcggacctcgaggacgtgcacgtggggacaccggagccgacgaagccgtacccaggcatgattcatcgtacggcaccttcgccggagagttttacgatctgcgttatttgagcgaggaggggtacccctttcccacagctccgcctgtagatccattcgccaagattaaagtcgacgactgcgggaagacaaaaggttgtttccgctatggaaagcccggatgtaatgctgagacgtgcgactactttctctcatatcgtatgattggcgctgatgtggaattcgagctatctgcggacactgatggttgggtggccgtgggttttagctccgacaaaaaaatggggggagatgatgtaatggcttgcgtgcacgacgacaatggtagagtgcgaattcagcatttctacaacgttgggcaatgggcaaaggaaatacagcgaaatcccgctcgtgacgaggagggcgtatttgaaaataatcgagtgacgtgtcggttcaagcggcctgtcaacgtgcccagggacgaaacaatcgtggatctgcacttgtcgtggtactatctcttcgcctgggggccagccattcagggctccataacacgacacgatattgattcacccccagcgtcagaacgggtggtctccatatacaagtacgaggatatctttatgcctagcgccgcttaccagaccttctcttctcctttctgtctgctcctgattgttgcgttgacattctaccttttgatgggaaccccgtag

SEQ ID NO: 179461 - DNA, 1603 bp, Artificial Sequence
  derived and/or modified sequence
atgcgcagaccgaggcagggaggcgggggtgcgggaggctccgcggctgcgcgggcgcgtgctggtggcctcggcggaggctcagtcccggcccgcgcccgcggcgcccccgctgcggcccgagcggcctggctgcgggatctgtgcgcacggatggcgcggccgccccggcagcacccgggggtctgggcgtcgctgctcctgctgctactgacggggcccgccgcctgcgcagccagccccgcggacgacggtgcgggcccggggggccggggaccccggggacgcgcgcggggggacacgggcgccgacgaggcggtgccgcgccacgactcctcctacggcaccttcgcgggggagttctacgacctgcgctacctgtcggaggagggttaccccttccctactgctcctcctgtggatccatttgccaaaatcaaagtggacgactgtggaaaaactaagggatgctttagatatggcaaaccaggctgtaatgcagagacctgtgactatttcctcagctaccggatgataggggctgatgtagaatttgagctgagtgcagacacagatggttgggtagcagttggattctcttcagacaagaaaatgggtggtgatgatgtcatggcctgcgtccatgatgacaatggcagggtccgcatacagcacttctataatgtaggccagtgggcaaaggagattcagagaaaccctgccagagatgaagaaggagtttttgagaacaatcgcgtcacctgcagatttaaacgccctgtgaatgttcccagagatgaaacaattgttgatctgcatttgagttggtattatctgtttgcttggggtccagccattcagggctctatcactcgacatgatatagactcaccgccggcttcagagcgtgttgtcagtatttacaagtatgaagacatttttatgccatcagctgcctatcaaaccttctcatctccattttgtttgcttctgattgttgctctgaccttctacctattgatgggaaccccctaaccacagctgcagggccaacagattacatggattgggaagtctttagtataaatatattttttaaagaatatccagtataattttagcttcaattatttaagaaaaaaaacctcatataatttcagctttttggaagaaagaacaagcttcttttgtagtcaaagaagattgtttaataatgaccctatacttttggaacatacttacaccttttctaagcactttcacatatgttttcttatttaacttcacaacatctctgagttggattgatgaaaattgtgattgccatcttcctgaatgggatttgagacccaaaaagactgcctttttatgatccacataccatataactttggctagaaatgacaaatagaaaggcagagaaggaactaagtatagaaatcatgtctcaaaacagtctttactatgagtgctatagcacagagagttattttgaatattactagggagaactttactgaatgtcataagttcacagtcagccttttgggcagaagaaatttcaaatttccgtaaagcagaagtgcttttggatatttacaca

SEQ ID NO: 179462 - DNA, 1035 bp, Artificial Sequence
  derived and/or modified sequence
atgagaagacccagacagggcggcggcggcgccggcggcagcgccgccgccagagccagagccggcggcctgggcggcggcagcgtgcccgccagagccagaggcgcccccgccgccgccagagccgcctggctgagagacctgtgcgccagaatggccagaccccccagacagcaccccggcgtgtgggccagcctgctgctgctgctgctgaccggccccgccgcctgcgccgccagccccgccgacgacggcgccggccccggcggcagaggccccagaggcagagccagaggcgacaccggcgccgacgaggccgtgcccagacacgacagcagctacggcaccttcgccggcgagttctacgacctgagatacctgagcgaggagggctaccccttccccaccgccccccccgtggaccccttcgccaagatcaaggtggacgactgcggcaagaccaagggctgcttcagatacggcaagcccggctgcaacgccgagacctgcgactacttcctgagctacagaatgatcggcgccgacgtggagttcgagctgagcgccgacaccgacggctgggtggccgtgggcttcagcagcgacaagaagatgggcggcgacgacgtgatggcctgcgtgcacgacgacaacggcagagtgagaatccagcacttctacaacgtgggccagtgggccaaggagatccagagaaaccccgccagagacgaggagggcgtgttcgagaacaacagagtgacctgcagattcaagagacccgtgaacgtgcccagagacgagaccatcgtggacctgcacctgagctggtactacctgttcgcctggggccccgccatccagggcagcatcaccagacacgacatcgacagcccccccgccagcgagagagtggtgagcatctacaagtacgaggacatcttcatgcccagcgccgcctaccagaccttcagcagccccttctgcctgctgctgatcgtggccctgaccttctacctgctgatgggcaccccctag

SEQ ID NO: 179463 - protein, 187 aa, Artificial Sequence
  derived and/or modified sequence
MSEMAELSELYEESSDLQMDVMPGEGDLPQMEVGSGSRELSLRPSRSGAQQLEEEGPMEEEEAQPMAAPEGKRSLANGPNAGEQPGQVAGADFESEDEGEEFDDWEDDYDYPEEEQLSGAGYRVSAALEEADKMFLRTREPALDGGFQMHYEKTPFDQLAFIEELFSLMVVNRLTEELGCDEIIDRE

SEQ ID NO: 179464 - DNA, 564 bp, Artificial Sequence
  derived and/or modified sequence
atgtctgagatggctgagctctcggagctttatgaggaatcttctgacctgcagatggacgtgatgcctggcgaaggagacctgcctcagatggaggtcggttccggaagccgcgaactttcactcaggccatctcgtagtggagctcagcaactcgaagaggagggaccaatggaggaggaggaggcccagcctatggctgcaccagaaggtaaaaggtccctcgcaaatggcccgaacgccggagaacagcctggccaggtggccggggccgatttcgagagcgaagacgaaggcgaggaatttgatgattgggaagatgactatgactatcctgaggaggaacagctgtccggtgcaggctaccgagttagcgcagctttggaggaggccgataaaatgtttctcaggaccagggagcctgctctcgatggggggtttcagatgcactacgagaagacacccttcgatcagttggcttttatcgaggaactcttcagtctgatggttgttaatagactgactgaagagctgggctgcgatgagatcattgacagggaatag

SEQ ID NO: 179465 - DNA, 564 bp, Artificial Sequence
  derived and/or modified sequence
atgtctgagatggccgagctgtctgagctgtatgaggagagcagtgacctgcagatggatgtgatgcctggagagggggacctgccccagatggaggtgggcagcggcagccgggagctgagcctgcggcccagccgcagcggggcccagcagctggaggaggagggccccatggaggaggaggaggcccagcccatggccgcccctgagggcaagaggagcctggccaacggccccaatgctggggagcagcccggccaggtggccggggctgactttgaaagtgaagatgaaggagaggagtttgatgactgggaggatgattatgactacccagaggaggagcagctgagcggggccggctacagagtgtctgctgccctggaggaggccgacaagatgttcctgcggacccgggagcccgccctggatggcggcttccagatgcactatgagaagaccccatttgaccagctggccttcatcgaggagctgttcagcctgatggtggtgaaccggctgacagaggagctgggctgtgatgagatcatcgaccgggagtag

SEQ ID NO: 179466 - DNA, 564 bp, Artificial Sequence
  derived and/or modified sequence
atgagcgagatggccgagctgagcgagctgtacgaggagagcagcgacctgcaaatggatgttatgcctggcgaaggcgatctcccacagatggaggtgggatcaggtagtagagaattgtccttgcgaccttctcgcagcggagctcagcagttggaggaggaggggccaatggaggaagaagaagcccagcctatggctgccccagagggtaagcggtcgctggctaacggcccgaacgccggcgagcaacctggacaggtagcaggagctgacttcgagagcgaagatgaaggcgaagagtttgatgactgggaggacgactacgactatccagaagaggaacagctcagcggagctgggtacagggtaagcgccgccctcgaggaagctgacaaaatgtttcttcgtaccagagagcctgcattggatggcggtttccagatgcactacgagaagacaccattcgaccagctggcctttatcgaagaactgtttagcctcatggtcgttaaccgtttaaccgaggaactgggctgcgatgaaatcatcgaccgcgagtag

SEQ ID NO: 179467 - DNA, 564 bp, Artificial Sequence
  derived and/or modified sequence
atgagcgaaatggccgagctgtccgaattatacgaggagtctagcgacctgcaaatggacgtgatgcccggagagggagacttgccacagatggaagtgggctccgggagccgagaattatcactccggccaagcagatccggagcccagcagctggaggaagaagggcctatggaagaagaggaggcgcagccaatggcagccccagaggggaaacggtcgctagctaacggcccaaacgcaggtgaacaaccagggcaggtggcgggagcagactttgaaagtgaagacgaaggagaagagtttgatgactgggaagacgattatgattaccctgaagaagaacagctgtccggggctggttatagagtgtccgcggcactcgaggaggccgacaaaatgttcttgcgtactcgcgaacctgccctcgacggagggtttcagatgcattacgaaaagactccctttgatcagctcgcgttcatcgaggaactgtttagtctgatggttgttaaccgcctgaccgaggagctcggctgtgatgagataattgatcgggagtag

SEQ ID NO: 179468 - DNA, 564 bp, Artificial Sequence
  derived and/or modified sequence
atgagcgagatggccgagctgagcgagctgtacgaggagagcagcgacctgcagatggacgtgatgcccggcgagggcgacctgccccagatggaggtgggcagcggcagcagagagctgagcctgagacccagcagaagcggcgcccagcagctggaggaggagggccccatggaggaggaggaggcccagcccatggccgcccccgagggcaagagaagcctggccaacggccccaacgccggcgagcagcccggccaggtggccggcgccgacttcgagagcgaggacgagggcgaggagttcgacgactgggaggacgactacgactaccccgaggaggagcagctgagcggcgccggctacagagtgagcgccgccctggaggaggccgacaagatgttcctgagaaccagagagcccgccctggacggcggcttccagatgcactacgagaagacccccttcgaccagctggccttcatcgaggagctgttcagcctgatggtggtgaacagactgaccgaggagctgggctgcgacgagatcatcgacagagagtag

SEQ ID NO: 179469 - DNA, 2298 bp, Artificial Sequence
  derived and/or modified sequence
agcagcagtagggttaagtaacacagaaactgttacgctcttgcatgcagggtccctagatacgaagttcgaatcgatggaaacgtagctcaaaaggcgacgccaacaccccggagaaaacactgagctactccaaccacagtggcgcgccaagtaggaggcggtacctgaggaccacgcctgcgcgcggggttacgcaagcgcgcagcctttgcgcacgcgcacgaacgcacggccgcgcagcatctgtcttgctggaagctttttcctagaggttgagcggtttgcacaatgtcggaaatggctgagttgtccgagctgtatgaagagagcagtgacctgcagatggatgtgatgcctggcgagggtgaccttccgcagatggaggtaggcagcgggagccgggagctatccctgcgtccctcccgcagcggggcccaacagctcgaggaggaaggcccaatggaggaggaggaggcccagccaatggcggcgccagaggggaaacggagccttgctaacgggcccaacgctggggagcagccaggccaggtggcgggcgcagacttcgagagcgaggacgagggcgaggaatttgatgactgggaggacgactacgactatcccgaagaggagcagctcagtggtgccggctacagagtatcagccgctcttgaagaagccgacaagatgtttctgagaacaagagaaccagccctggatggcgggtttcagatgcattatgagaagaccccgtttgatcagttagcttttatcgaagagcttttttcactgatggttgtcaatcgtctgaccgaagaactcggctgtgatgagattattgatagagagtagttagatgctgttaaaagaggaggaaactacttgaggagggacccaactttccgctatcttttgggttcattccaaatagttttgtgccattgaaaaacttgaccttcaaaaaaatttgtttttcagaatagaacacaataggacagtgactgcacagttgtgaaaaaggaagagaatcattaaagaaaaagaaaaaagattttaagaccgttgaaatcaattatcaagaacgtcctaaaacacctatggctttgactttgttattgatccagattattttccttgcattggggaaaatatctttcatatttgtttgctgtaaagatggttttgcaagaataagtcatgaccaagacaaactgccaatacaaaagcccactgatactaattatataatgagaaaaaaatgtatccaactaggacacatatcttttgagttatttggactgaaagcttaagaaaacttggaaaattctattttgtgatctagtcaagccacagttatcaaaggctacattttcagtgtaagataaatggatgagtaaactcaaatatgtatcacgtgtgctttgtatcttaagatgtgtttccaagagcatctgaaattttgtttgtacatgtatcttgatcatttataaagccactgtgatctataaatcaagaaaatccattgtcataaccatttttaaaagtcaaaaattaagacatccttaattaaaaagtttcaaatctagacactaaatgtgtgtgaatgtacaaagaaaacaaaccattgcttatgctgttatatactagagaaattttgttttgcttgctgttttaacttgacagatgaaggactttagttgaacttcatattgtaagaactgttaataaaagttgtcaagtaaaaagcgctatatctaaaaagactttatgaacagttattctatcaacttttaaaggttttaaacctgcccagaaattaccttggtatctgaagtttccctctgtctcctcctctaattaagcttgttatttgtcatgcaccagcattggagataataaaatttcttgttctgtgtattttgtttggctaatagtattgcatacatactttctctgtatactactttctattgtatgtgttaaccagtattaagggaaaatgatccagcttcagctatctaattcacaaattaatttctggaaattaaactttgtaaattaagtttttgcctataagaatttgctggtctgggaaaacctgccctatcaatgagtatgttgccgtggttaccttactaagatgctgaagttctaggagagtaatgattacatcagaaggctaggttcagcaaaataagtgtatcagcaggttttatcatgatcagtaaaaatgttccaaatgcttctgctccattatagcagtaaagaacgaatatccaatgcaacaggacaatt

SEQ ID NO: 179470 - protein, 384 aa, Artificial Sequence
  derived and/or modified sequence
MDAALLLNVEGVKKTILHGGTGELPNFITGSRVIFHFRTMKCDEERTVIDDSRQVGQPMHIIIGNMFKLEVWEILLTSMRVHEVAEFWCDTIHTGVYPILSRSLRQMAQGKDPTEWHVHTCGLANMFAYHTLGYEDLDELQKEPQPLVFVIELLQVDAPSDYQRETWNLSNHEKMKAVPVLHGEGNRLFKLGRYEEASSKYQEAIICLRNLQTKEKPWEVQWLKLEKMINTLILNYCQCLLKKEEYYEVLEHTSDILRHHPGIVKAYYVRARAHAEVWNEAEAKADLQKVLELEPSMQKAVRRELRLLENRMAEKQEEERLRCRNMLSQGATQPPAEPPTEPPAQSSTEPPAEPPTAPSAELSAGPPAEPATEPPPSPGHSLQH

SEQ ID NO: 179471 - protein, 326 aa, Artificial Sequence
  derived and/or modified sequence
MDAALLLNVEGVKKTILHGGTGELPNFITGSRVIFHFRTMKCDEERTVIDDSRQVGQPMHIIIGNMFKLEVWEILLTSMRVHEVAEFWCDTIHTGVYPILSRSLRQMAQGKDPTEWHVHTCGLANMFAYHTLGYEDLDELQKEPQPLVFVIELLQVDAPSDYQRETWNLSNHEKMKAVPVLHGEGNRLFKLGRYEEASSKYQEAIICLRNLQTKEKPWEVQWLKLEKMINTLILNYCQCLLKKEEYYEVLEHTSDILRHHPGIVKAYYVRARAHAEVWNEAEAKADLQKVLELEPSMQKAVRRELRLLENAWRRSRRRSGCAAGTC

SEQ ID NO: 179472 - DNA, 1155 bp, Artificial Sequence
  derived and/or modified sequence
atggatgcagctctcttactgaacgtcgagggcgttaaaaagaccatcttgcatgggggaacaggcgagctgcccaatttcattactggatcccgggtgatttttcacttccgcaccatgaaatgcgacgaggagcgtactgtgattgacgactcccggcaagtgggccagccaatgcacattatcatcggtaacatgtttaagctcgaagtgtgggagatcctgctgacttcaatgcgcgtacatgaggtggctgagttctggtgtgacaccattcacacaggggtgtatcccatactgtcacggtccctgaggcaaatggcacagggtaaggaccccaccgagtggcacgtgcacacatgtgggcttgcaaatatgttcgcctaccatacccttgggtatgaagatcttgatgagctgcagaaagagcctcaacccctggttttcgttatagagctactccaagtcgacgcaccttctgactatcaaagagagacgtggaacttgtccaaccacgagaaaatgaaggctgtacccgttctccatggggagggcaatcggttgttcaagctggggagatatgaagaggcttcctctaaataccaggaagcaattatttgcctgaggaacctgcagacaaaggaaaagccttgggaggttcagtggcttaaacttgaaaagatgatcaataccctgatactcaactattgccagtgcctgctgaagaaggaagagtattacgaggtcttagagcatacctccgatattctgcggcatcatcctggaattgttaaggcctactacgtgcgcgcccgagcacatgctgaggtgtggaatgaggcagaggctaaggcagacctccagaaggtcctggagctcgagcctagtatgcaaaaggccgtcaggcgggagttacggcttctcgaaaatcgaatggccgagaagcaggaggaggagcgcctgcgctgtagaaatatgctgtcccagggcgccacccagccacctgcagaaccacccacagaaccaccggctcagtcgtcgactgagccacccgccgagccccccaccgcccctagcgccgaattgagcgcagggcccccagcagagcccgccaccgaacctccgccctctcctggtcatagtctccagcattag

SEQ ID NO: 179473 - DNA, 981 bp, Artificial Sequence
  derived and/or modified sequence
atggatgcagctctgctgctgaacgtggagggagttaaaaaaactatcctccatggagggacaggtgaacttccaaactttataactggcagccgcgtgatctttcatttccgcacaatgaaatgcgacgaagagagaaccgtcattgacgacagcagacaggtgggtcagcccatgcacatcatcatcggaaacatgttcaaactggaagtgtgggagattttgctgacctctatgagagtgcatgaagtagccgagttctggtgtgataccattcacacaggcgtttacccaatcctgtctcgctcccttaggcagatggcccagggaaaagaccctacagaatggcatgtacacacctgcggcctcgctaatatgttcgcctaccatacactaggttacgaggacctcgacgagcttcagaaggagcctcagccactcgtcttcgttatagagttgctccaggtagatgctccttccgactaccagcgcgaaacatggaatcttagtaaccatgaaaaaatgaaggcagtccctgtcctccacggtgaaggtaatcgcctgtttaagttagggcggtacgaggaggcttccagtaaataccaggaggctatcatttgtctgcggaaccttcagaccaaagaaaagccatgggaagtccagtggctaaagttggagaagatgatcaacacgctgatcctgaattactgtcagtgtctgctgaagaaagaggaatattatgaagtcctggagcatacctcagacatcctgaggcaccatcctggtattgtcaaggcctactatgttagagcccgtgcccatgctgaagtttggaacgaagctgaggctaaggcggaccttcaaaaggtgcttgagcttgaacccagcatgcagaaggctgtgagacgagaacttagactgttggaaaacgcctggcgccgctctcggagacgcagcggctgtgccgccggtacctgctag

SEQ ID NO: 179474 - DNA, 1155 bp, Artificial Sequence
  derived and/or modified sequence
atggatgctgccctgctgctgaatgtggagggcgtgaagaagaccatcctgcacggcggcactggagagctgcccaacttcatcaccggcagcagggtcatcttccacttccgcaccatgaagtgtgatgaggagaggacagtgattgatgacagccggcaggtgggccagcccatgcacatcatcatcggcaacatgttcaagctggaggtgtgggagatcctgctgacctccatgagggtgcatgaggtggccgagttctggtgtgacaccatccacactggagtgtaccccatcctgagccgcagcctgcggcagatggcccagggcaaggaccccacagagtggcacgtgcacacctgtggcctggccaacatgtttgcctaccacaccctgggctatgaggacctggatgagctgcagaaggagccccagcccctggtgtttgtgattgagctgctgcaggtggatgcccccagcgactaccagcgggagacctggaacctgagcaaccacgagaagatgaaggctgtgcctgtgctgcacggggagggcaacagactcttcaagctgggccgctatgaggaggccagcagcaagtaccaggaggccatcatctgcctgaggaacctgcagaccaaggagaagccctgggaggtgcagtggctgaagctggagaagatgatcaacaccctcatcctgaactactgccagtgcctgctgaagaaggaggagtactatgaggtgctggagcacaccagtgacatcctgcggcaccaccctggcatcgtgaaggcctactacgtgcgggcccgggcccatgctgaggtgtggaatgaagctgaggccaaggctgacctgcagaaggtgctggagctggagcccagcatgcagaaggctgtgcggcgggagctgcggctgctggagaacaggatggccgagaagcaggaggaggagcggctgcgctgcaggaacatgctgagccagggcgccacccagcccccagctgagcccccaacagagcccccagcccagagcagcacagagcccccagctgagcccccaacagcccccagcgctgagctgtctgctggccccccagctgagcccgccacagagcccccacccagccctggccacagcctgcagcactag

SEQ ID NO: 179475 - DNA, 981 bp, Artificial Sequence
  derived and/or modified sequence
atggatgctgccctgctgctgaatgtggagggcgtgaagaagaccatcctgcacggcggcactggagagctgcccaacttcatcaccggcagcagggtcatcttccacttccgcaccatgaagtgtgatgaggagaggacagtgattgatgacagccggcaggtgggccagcccatgcacatcatcatcggcaacatgttcaagctggaggtgtgggagatcctgctgacctccatgagggtgcatgaggtggccgagttctggtgtgacaccatccacactggagtgtaccccatcctgagccgcagcctgcggcagatggcccagggcaaggaccccacagagtggcacgtgcacacctgtggcctggccaacatgtttgcctaccacaccctgggctatgaggacctggatgagctgcagaaggagccccagcccctggtgtttgtgattgagctgctgcaggtggatgcccccagcgactaccagcgggagacctggaacctgagcaaccacgagaagatgaaggctgtgcctgtgctgcacggggagggcaacagactcttcaagctgggccgctatgaggaggccagcagcaagtaccaggaggccatcatctgcctgaggaacctgcagaccaaggagaagccctgggaggtgcagtggctgaagctggagaagatgatcaacaccctcatcctgaactactgccagtgcctgctgaagaaggaggagtactatgaggtgctggagcacaccagtgacatcctgcggcaccaccctggcatcgtgaaggcctactacgtgcgggcccgggcccatgctgaggtgtggaatgaagctgaggccaaggctgacctgcagaaggtgctggagctggagcccagcatgcagaaggctgtgcggcgggagctgcggctgctggagaatgcctggaggaggagcagaagaagaagtggctgtgccgccggcacctgctag

SEQ ID NO: 179476 - DNA, 1155 bp, Artificial Sequence
  derived and/or modified sequence
atggacgccgccctgctgctgaacgtggagggcgtgaagaagaccatcctccacggaggtaccggcgaattaccaaatttcatcacaggatccagggtgatctttcactttaggactatgaagtgcgatgaggagcgcaccgtcattgacgacagtcggcaggttggtcaacctatgcacatcattattggaaacatgtttaaactggaagtctgggagatattattgacttccatgagagtgcacgaagtagctgagttctggtgcgacaccatacacactggggtgtatccaattctgtcaagatccctacgacaaatggctcaaggcaaagaccccacagaatggcatgtacacacatgcgggttagccaacatgtttgcgtaccataccctgggctatgaagacttagacgagctgcagaaagaaccacagcccctggtgtttgtgatagagctgctccaagtggacgccccctcggattaccagagggaaacttggaacctcagcaatcatgaaaaaatgaaagctgtgcctgtcctgcatggcgaaggtaaccgcctgtttaaactaggcaggtacgaagaggcatcatctaaataccaagaggctatcatttgcctcaggaacttgcaaacgaaggaaaagccctgggaagtgcagtggcttaaactggagaagatgatcaatactttgatcctgaattattgccagtgtctactgaagaaagaagaatactatgaggtcctggagcacaccagtgacatcctacgtcatcacccggggatagtgaaggcatactatgttcgagccagagcgcacgccgaggtttggaacgaggcggaggccaaagccgacctccagaaagtgctcgaattggagcccagcatgcaaaaagccgtgcggagagaactcaggctgcttgaaaaccggatggccgaaaagcaagaagaggaaaggctcagatgtcgcaacatgctctcccagggcgccacccagcctcctgctgagcccccaaccgaaccacccgcacagagcagcacagaaccccctgcagagcctcctactgctccttcagccgagctgagcgctggtccacccgccgagcctgcgaccgagccccctcctagtcctgggcatagcttgcaacactag

SEQ ID NO: 179477 - DNA, 981 bp, Artificial Sequence
  derived and/or modified sequence
atggacgccgccctgctgctgaacgtggagggcgtgaagaagaccatactgcacggtggcaccggagagcttcccaatttcattacaggctcacgggttattttccattttaggaccatgaagtgcgacgaagagcggacagttattgatgattcccggcaagtgggacagcccatgcatatcatcatcgggaacatgtttaaattagaggtttgggagatcctgctgacaagcatgcgtgtccatgaggtggcagaattctggtgtgacactattcacaccggcgtctacccgatcctgagtaggtccctgcgtcaaatggcacaagggaaagaccctactgaatggcatgtccatacttgcggattagctaacatgtttgcttaccataccttgggatacgaggatctggatgaacttcagaaagagcctcagccgctcgtgttcgtcatagagctactccaggtggatgcgcctagtgactaccaacgggagacctggaatttgagcaaccatgaaaaaatgaaggcagtgcccgtgctccatggcgaaggaaacaggctgtttaagctgggaaggtatgaagaggctagcagcaagtaccaggaggcaattatctgcttgaggaacctccaaacgaaggagaagccatgggaggtgcagtggctaaaattggaaaaaatgattaacaccttgatcctcaactactgtcaatgtctcctaaaaaaggaagaatattatgaagtgctggagcacacctccgacattctgagacaccatccgggcatcgtcaaggcctattacgtgcgggccagggcacacgccgaggtgtggaatgaggccgaggccaaggcagacctgcaaaaagtgctcgagctcgaaccgagcatgcagaaggctgtcaggcgtgagctgaggctccttgaaaatgcctggaggagatcacgtcgtagatccggctgtgcggccggtacctgctag

SEQ ID NO: 179478 - DNA, 1155 bp, Artificial Sequence
  derived and/or modified sequence
atggacgccgcactgcttctgaacgttgaaggagtcaagaagaccattctccacgggggtacaggagagttaccgaacttcatcactggcagccgggtgattttccatttcaggaccatgaaatgcgacgaagagcgcacggtaatcgacgactcccggcaagtgggccagcccatgcacatcattataggtaatatgttcaagctcgaggtttgggagatcctcctgacaagcatgagagttcatgaggttgcagagttttggtgtgataccatccacaccggcgtatatcctatactcagccgctctttaaggcagatggcgcaaggcaaggatccaactgaatggcatgtgcatacatgtggcctggctaacatgttcgcctaccatactctgggctatgaagacttggatgaactgcaaaaggagccccagccactcgtgttcgtgatcgagctgcttcaggtcgatgcaccttcagattaccagagggagacttggaacttgagcaaccacgaaaagatgaaggctgtgcctgtcttacacggcgagggaaacaggttattcaagttaggaagatatgaagaggcctctagcaagtaccaggaagccataatctgcctgcgcaacctgcagacgaaggaaaagccttgggaggtgcaatggctaaagttggagaaaatgatcaatacactgatactgaactattgtcaatgtttactaaagaaggaggaatactacgaagtgctcgagcacacatccgacatattacgtcaccatcccggaattgtgaaagcctactacgtgagggcgagggcccatgccgaggtatggaacgaagctgaggccaaagccgatctgcagaaagtcctggaactcgagccctctatgcagaaggcggtccggagggagttacgcctgttggagaacaggatggcagagaagcaagaagaggagaggctgcgctgccggaatatgctaagtcagggagccacccaaccacccgcagagccccctaccgagccccctgcccaatcatccacagagccgccagctgaacctcccacagcaccttctgctgagctatctgccggacctccagctgaacctgccacggagccaccccctagccctgggcactctttgcagcattag

SEQ ID NO: 179479 - DNA, 981 bp, Artificial Sequence
  derived and/or modified sequence
atggacgcagctttgctgttgaacgtggaaggggtcaagaaaaccatccttcacggaggtaccggcgaactgcccaattttattacaggcagccgtgttatatttcactttcgaaccatgaagtgcgatgaggagcgtactgtcattgacgattccagacaagtgggccaaccaatgcatatcataatagggaacatgtttaagttggaggtttgggaaatactccttacgtcaatgagagtccacgaggttgccgagttttggtgcgataccattcacaccggtgtataccccattctgtcccggagtctgcgccagatggcacagggtaaagacccaactgagtggcatgtgcacacctgtggtcttgccaacatgtttgcttaccacactctcggctacgaagatctcgatgagctgcaaaaggaaccccagcccctggtgttcgtgatcgaattactccaggtggacgctccatccgattatcagagagagacatggaatctgagcaaccatgagaagatgaaagcagtgcccgtcctgcacggagaggggaatcgcttgtttaagctggggcgatatgaggaagcttcaagcaaataccaggaggcaataatttgtctgcgcaacttacaaacaaaggaaaaaccctgggaggtgcagtggcttaagctggagaagatgattaacactttgatcctgaattattgccagtgtcttcttaagaaggaggagtattacgaggtgctggagcacaccagtgatatcctgcgccaccatccgggtattgtgaaagcctattatgtaagggcaagagcacacgctgaagtatggaatgaagccgaggctaaggctgatctccaaaaggtcttggagctggaaccttcgatgcagaaggccgtgaggcgggaacttcgtttactggagaatgcttggcgacgttctcgccgtcgctcaggctgcgcagccggtacatgttag

SEQ ID NO: 179480 - DNA, 2939 bp, Artificial Sequence
  derived and/or modified sequence
gtcttccccggaggtgagattatctccgcctgtgctggacacctccctttctcctgcagccatggatgccgctctgctcctgaacgtggaaggggtcaagaaaaccattctgcacgggggcacgggcgagctcccaaacttcatcaccggatcccgagtgatctttcatttccgcaccatgaaatgtgatgaggagcggacagtcattgacgacagtcggcaggtgggccagcccatgcacatcatcatcggaaacatgttcaagctcgaggtctgggagatcctgcttacctccatgcgggtgcacgaggtggccgagttctggtgcgacaccatccacacgggggtctaccccatcctatcccggagcctgaggcagatggcccagggcaaggaccccacagagtggcacgtgcacacgtgcgggctggccaacatgttcgcctaccacacgctgggctacgaggacctggacgagctgcagaaggagcctcagcctctggtctttgtgatcgagctgctgcaggttgatgccccgagtgattaccagagggagacctggaacctgagcaatcatgagaagatgaaggcggtgcccgtcctccacggagagggaaatcggctcttcaagctgggccgctacgaggaggcctcttccaagtaccaggaggccatcatctgcctaaggaacctgcagaccaaggagaagccatgggaggtgcagtggctgaagctggagaagatgatcaatactctgatcctcaactactgccagtgcctgctgaagaaggaggagtactatgaggtgctggagcacaccagtgatattctccggcaccacccaggcatcgtgaaggcctactacgtgcgtgcccgggctcacgcagaggtgtggaatgaggccgaggccaaggcggacctccagaaagtgctggagctggagccgtccatgcagaaggcggtgcgcagggagctgaggctgctggagaaccgcatggcggagaagcaggaggaggagcggctgcgctgccggaacatgctgagccagggtgccacgcagcctcccgcagagccacccacagagccacccgcacagtcatccacagagccacctgcagagccacccacagcaccatctgcagagctgtccgcagggccccctgcagagccagccacagagccacccccgtccccagggcactcgctgcagcactgagccccctgaggcccacagccacccaggcagggagcaagtggcctggtcacttctggttcgattgaccaggatcgtggtgtcactttttaaaatttaaaattaatttttgaaatcaaagtcagacacacccatggtaaaaaaaaaaaaaaaaacaatcccaagggtacagaagagcttatgaataaaagtagttttctcctctacccctctcattccttccgtgccatggttttaattgaccctgtttttaattcttctggtagttttctctatttccaagtaatctgtttaaatcagtttctagattttaccccatgtcaatgacaaatgaggatttgatgctctgatcctttctcatgcctgatacccctccctgtctccccattttggatagttacatttgggggtcatctcggtgatttttgtaactttacgcaggacacttagagctctctagaatcccactgactttagtgggtcttgatgtagggtgggcaagccccgacactggagcttagcctgagagggttcttggcctcccccaggaaagatttcaaaggcaagcgccagtggtagggtagaagaaaacagctgtggtcgggcacggtggctcacgcctataatcccagcactttgggaggccgaggcgggtggatcacctgaggtcaggagttccagaccagcctggccaacatggtgaaacctcatctctactaaaaatacaaaaaaactagctgggcgtggtggcgggcgcctataatcccagctacttgggaggctgaggcaggagaattgattgaacctgggaggcggaggttgcagtgagccaagatcacgtcattgcactccagcctggtcaacaagagtaaaacttcatctcaaaaaacaaaacaaaacaaaaacaacaacaaaaaacaaaagaaaaacaaacaaaaccaaaaccaaaacagctgtattgaagctgcagtgttgcagctctgtgactgccctgcagagcagggctaccccataggcagcgagcagcagctcagggcagttctgcagtcagatttatacccacttttaattacatgtagattaaggagctgcatatacaaagatttctagggaaggagtagtaacttctgggtcctggggtctttgccacggaacagggcagtatgccagggtgttgccacggcaatggtaaactgacatggcaccctgggggtcatgccttagggaaagccgcttccactcgcccctgttttagctcatcttcaagttagtctggtgtccaagctccaccgcctgcctcagtctggtgacctccttctgtgtctgatgagcatggcagcgttgggaccttccccttccaactctctccctcctcttcgtcctccctaaaggacgggtacgaggaggggctatcacgccagcgacatcctctagcaccacccaggtgtgtggggtggggcaggggggcgacgaagtatccagcccagggccacgtagtcaactgccaagggcttcctgggcttctcttctgccccagagcttgtctccacccagcaggggttcccccagcgctaactgtatccctaaagttctgatgtactttacttttccatcttccttgttgttaacatctaccttctgctctgtaagcaaaactaaatcttctgtgctttgtccataggttgattctacaatctgaaaatcaataaacagcatttgcatgatt

SEQ ID NO: 179481 - DNA, 1237 bp, Artificial Sequence
  derived and/or modified sequence
tttctcctgcagccatggatgccgctctgctcctgaacgtggaaggggtcaagaaaaccattctgcacgggggcacgggcgagctcccaaacttcatcaccggatcccgagtgatctttcatttccgcaccatgaaatgtgatgaggagcggacagtcattgacgacagtcggcaggtgggccagcccatgcacatcatcatcggaaacatgttcaagctcgaggtctgggagatcctgcttacctccatgcgggtgcacgaggtggccgagttctggtgcgacaccatccacacgggggtctaccccatcctatcccggagcctgaggcagatggcccagggcaaggaccccacagagtggcacgtgcacacgtgcgggctggccaacatgttcgcctaccacacgctgggctacgaggacctggacgagctgcagaaggagcctcagcctctggtctttgtgatcgagctgctgcaggttgatgccccgagtgattaccagagggagacctggaacctgagcaatcatgagaagatgaaggcggtgcccgtcctccacggagagggaaatcggctcttcaagctgggccgctacgaggaggcctcttccaagtaccaggaggccatcatctgcctaaggaacctgcagaccaaggagaagccatgggaggtgcagtggctgaagctggagaagatgatcaatactctgatcctcaactactgccagtgcctgctgaagaaggaggagtactatgaggtgctggagcacaccagtgatattctccggcaccacccaggcatcgtgaaggcctactacgtgcgtgcccgggctcacgcagaggtgtggaatgaggccgaggccaaggcggacctccagaaagtgctggagctggagccgtccatgcagaaggcggtgcgcagggagctgaggctgctggagaacgcatggcggagaagcaggaggaggagcggctgcgctgccggaacatgctgagccagggtgccacgcagcctcccgcagagccacccacagagccacccgcacagtcatccacagagccacctgcagagccacccacagcaccatctgcagagctgtccgcagggccccctgcagagccagccacagagccacccccgtccccagggcactcgctgcagcactgagccccctgaggcccacagccacccaggcagggagcaagtggcctggtcacttctggttcgattgaccag

SEQ ID NO: 179482 - DNA, 1155 bp, Artificial Sequence
  derived and/or modified sequence
atggacgccgccctgctgctgaacgtggagggcgtgaagaagaccatcctgcacggcggcaccggcgagctgcccaacttcatcaccggcagcagagtgatcttccacttcagaaccatgaagtgcgacgaggagagaaccgtgatcgacgacagcagacaggtgggccagcccatgcacatcatcatcggcaacatgttcaagctggaggtgtgggagatcctgctgaccagcatgagagtgcacgaggtggccgagttctggtgcgacaccatccacaccggcgtgtaccccatcctgagcagaagcctgagacagatggcccagggcaaggaccccaccgagtggcacgtgcacacctgcggcctggccaacatgttcgcctaccacaccctgggctacgaggacctggacgagctgcagaaggagccccagcccctggtgttcgtgatcgagctgctgcaggtggacgcccccagcgactaccagagagagacctggaacctgagcaaccacgagaagatgaaggccgtgcccgtgctgcacggcgagggcaacagactgttcaagctgggcagatacgaggaggccagcagcaagtaccaggaggccatcatctgcctgagaaacctgcagaccaaggagaagccctgggaggtgcagtggctgaagctggagaagatgatcaacaccctgatcctgaactactgccagtgcctgctgaagaaggaggagtactacgaggtgctggagcacaccagcgacatcctgagacaccaccccggcatcgtgaaggcctactacgtgagagccagagcccacgccgaggtgtggaacgaggccgaggccaaggccgacctgcagaaggtgctggagctggagcccagcatgcagaaggccgtgagaagagagctgagactgctggagaacagaatggccgagaagcaggaggaggagagactgagatgcagaaacatgctgagccagggcgccacccagccccccgccgagccccccaccgagccccccgcccagagcagcaccgagccccccgccgagccccccaccgcccccagcgccgagctgagcgccggcccccccgccgagcccgccaccgagcccccccccagccccggccacagcctgcagcactag

SEQ ID NO: 179483 - DNA, 981 bp, Artificial Sequence
  derived and/or modified sequence
atggacgccgccctgctgctgaacgtggagggcgtgaagaagaccatcctgcacggcggcaccggcgagctgcccaacttcatcaccggcagcagagtgatcttccacttcagaaccatgaagtgcgacgaggagagaaccgtgatcgacgacagcagacaggtgggccagcccatgcacatcatcatcggcaacatgttcaagctggaggtgtgggagatcctgctgaccagcatgagagtgcacgaggtggccgagttctggtgcgacaccatccacaccggcgtgtaccccatcctgagcagaagcctgagacagatggcccagggcaaggaccccaccgagtggcacgtgcacacctgcggcctggccaacatgttcgcctaccacaccctgggctacgaggacctggacgagctgcagaaggagccccagcccctggtgttcgtgatcgagctgctgcaggtggacgcccccagcgactaccagagagagacctggaacctgagcaaccacgagaagatgaaggccgtgcccgtgctgcacggcgagggcaacagactgttcaagctgggcagatacgaggaggccagcagcaagtaccaggaggccatcatctgcctgagaaacctgcagaccaaggagaagccctgggaggtgcagtggctgaagctggagaagatgatcaacaccctgatcctgaactactgccagtgcctgctgaagaaggaggagtactacgaggtgctggagcacaccagcgacatcctgagacaccaccccggcatcgtgaaggcctactacgtgagagccagagcccacgccgaggtgtggaacgaggccgaggccaaggccgacctgcagaaggtgctggagctggagcccagcatgcagaaggccgtgagaagagagctgagactgctggagaacgcctggagaagaagcagaagaagaagcggctgcgccgccggcacctgctag

SEQ ID NO: 179484 - protein, 866 aa, Artificial Sequence
  derived and/or modified sequence
MGAARSPPSAVPGPLLGLLLLLLGVLAPGGASLRLLDHRALVCSQPGLNCTVKNSTCLDDSWIHPRNLTPSSPKDLQIQLHFAHTQQGDLFPVAHIEWTLQTDASILYLEGAELSVLQLNTNERLCVRFEFLSKLRHHHRRWRFTFSHFVVDPDQEYEVTVHHLPKPIPDGDPNHQSKNFLVPDCEHARMKVTTPCMSSGSLWDPNITVETLEAHQLRVSFTLWNESTHYQILLTSFPHMENHSCFEHMHHIPAPRPEEFHQRSNVTLTLRNLKGCCRHQVQIQPFFSSCLNDCLRHSATVSCPEMPDTPEPIPDYMPLWVYWFITGISILLVGSVILLIVCMTWRLAGPGSEKYSDDTKYTDGLPAADLIPPPLKPRKVWIIYSADHPLYVDVVLKFAQFLLTACGTEVALDLLEEQAISEAGVMTWVGRQKQEMVESNSKIIVLCSRGTRAKWQALLGRGAPVRLRCDHGKPVGDLFTAAMNMILPDFKRPACFGTYVVCYFSEVSCDGDVPDLFGAAPRYPLMDRFEEVYFRIQDLEMFQPGRMHRVGELSGDNYLRSPGGRQLRAALDRFRDWQVRCPDWFECENLYSADDQDAPSLDEEVFEEPLLPPGTGIVKRAPLVREPGSQACLAIDPLVGEEGGAAVAKLEPHLQPRGQPAPQPLHTLVLAAEEGALVAAVEPGPLADGAAVRLALAGEGEACPLLGSPGAGRNSVLFLPVDPEDSPLGSSTPMASPDLLPEDVREHLEGLMLSLFEQSLSCQAQGGCSRPAMVLTDPHTPYEEEQRQSVQSDQGYISRSSPQPPEGLTEMEEEEEEEQDPGKPALPLSPEDLESLRSLQRQLLFRQLQKNSGWDTMGSESEGPSA

SEQ ID NO: 179485 - DNA, 2601 bp, Artificial Sequence
  derived and/or modified sequence
atgggggctgcccggtctcctcccagcgccgtcccaggccccttactgggtctgctactgctcctgctgggagtacttgcccctggaggagcttctcttcgtctcctcgaccatagagcgttagtttgcagtcaaccagggctgaattgtacagtgaagaatagtacgtgcctggacgatagttggatacaccctaggaatcttacgccaagtagccccaaggatttgcagatacagctgcattttgcccacacccagcagggtgatctctttcctgtcgctcacatcgagtggaccctccaaactgatgcaagcatcctctatttggaaggcgccgagctgagcgtgctccagttaaatacaaacgaacgcctctgcgtgcgattcgagtttctctcgaaactacggcatcatcacaggaggtggcgctttacttttagtcattttgtggttgaccctgaccaggagtacgaggtgacagttcatcacctgccaaagcctatccccgatggagacccaaaccaccagtccaaaaacttcctggtccctgactgtgagcatgcccgcatgaaagtgaccaccccttgtatgtcctcaggttccctttgggacccgaacattactgtggaaacccttgaggctcaccaactgcgggtttctttcaccctgtggaacgaatctacccactatcagatcctgcttaccagctttcctcacatggagaatcacagctgcttcgagcacatgcaccacattccagccccaaggcccgaggagttccatcagcgctccaacgtcacattgacgctgaggaacttgaaaggctgctgtagacatcaagtccagattcagccatttttttctagctgcttgaacgactgtctgcgccatagtgccaccgtttcttgccccgagatgcccgacacgcccgaacctattccagactacatgcccctatgggtttattggttcatcaccggtatttcgatcctgcttgtgggcagtgtcattctgctgattgtttgcatgacctggcgacttgccgggcccgggagtgagaaatattccgatgacacaaagtatactgatggcctgcccgcagccgacctcattcctcctcccttaaagccccgaaaagtctggattatctatagtgcagatcaccccctatatgtagatgtagtgttgaaattcgcccaattcttgctaaccgcctgtgggaccgaagtggccttggatctgctcgaggaacaagccatttccgaagccggtgtgatgacatgggtagggcgacagaaacaggaaatggtcgaaagtaattcaaagattatcgtgctttgcagtcggggtaccagggcaaaatggcaggcccttttgggtaggggagcccccgtgcgtctgaggtgtgatcacgggaaaccggtgggggacttgtttacagcagctatgaatatgattctgcccgacttcaagaggccagcctgctttggaacctatgtggtctgttatttcagcgaagtgagctgcgatggcgatgtgcctgatctgttcggcgcggcccccaggtaccctctaatggataggtttgaagaagtctatttcaggatacaggatctggaaatgttccagccagggcgaatgcatagagtgggcgaactgtcaggggataattaccttaggagtcctggaggaaggcagctgcgtgccgccctggatcggtttcgtgattggcaggtgaggtgtccagactggttcgaatgtgaaaatctctactctgccgacgaccaggatgccccttctcttgacgaggaagtctttgaggagcctctgttgcccccgggtacaggaattgtgaaacgcgcgccgctggttagagagcctggaagccaagcatgtctagcgattgaccctctggtgggcgaagagggcggagccgccgtggccaagctagaaccacacctgcagcccagaggacaacctgcacctcaaccgctgcacaccttagtgctggccgcagaggaaggggctctcgtagctgccgtcgagccaggaccactggcagacggtgccgcagtcagattagctctggcaggggaaggggaggcatgtcctcttctgggaagtcctggagcaggtcgcaattcggtgcttttcttgcccgtagaccccgaggattcaccccttgggagttctactcctatggccagccctgatttactaccagaggatgtgagggaacacctggagggcctgatgctctccctgtttgagcagagtctgtcatgtcaggctcaaggcggctgttctagacccgcaatggttctgacagatccccatacaccatatgaggaggaacaaagacagtctgttcagagtgatcaggggtatatctcccgaagctcgccgcagccccctgagggtctcacagaaatggaggaagaggaggaggaagagcaggaccctgggaagcccgcactccctctgtctcctgaggatctggagtctttgcgcagcctgcagcgccagctgctcttccgccagctccaaaaaaactcaggatgggataccatgggaagtgaaagtgaaggaccttcagcgtag

SEQ ID NO: 179486 - DNA, 8607 bp, Artificial Sequence
  derived and/or modified sequence
ctgggcccgggctggaagccggaagcgagcaaagtggagccgactcgaactccaccgcggaaaagaaagcctcagaacgttcgttcgctgcgtccccagccggggccgagccctccgcgacgccagccgggccatgggggccgcacgcagcccgccgtccgctgtcccggggcccctgctggggctgctcctgctgctcctgggcgtgctggccccgggtggcgcctccctgcgactcctggaccaccgggcgctggtctgctcccagccggggctaaactgcacggtcaagaatagtacctgcctggatgacagctggattcaccctcgaaacctgaccccctcctccccaaaggacctgcagatccagctgcactttgcccacacccaacaaggagacctgttccccgtggctcacatcgaatggacactgcagacagacgccagcatcctgtacctcgagggtgcagagttatctgtcctgcagctgaacaccaatgaacgtttgtgcgtcaggtttgagtttctgtccaaactgaggcatcaccacaggcggtggcgttttaccttcagccactttgtggttgaccctgaccaggaatatgaggtgaccgttcaccacctgcccaagcccatccctgatggggacccaaaccaccagtccaagaatttccttgtgcctgactgtgagcacgccaggatgaaggtaaccacgccatgcatgagctcaggcagcctgtgggaccccaacatcaccgtggagaccctggaggcccaccagctgcgtgtgagcttcaccctgtggaacgaatctacccattaccagatcctgctgaccagttttccgcacatggagaaccacagttgctttgagcacatgcaccacatacctgcgcccagaccagaagagttccaccagcgatccaacgtcacactcactctacgcaaccttaaagggtgctgtcgccaccaagtgcagatccagcccttcttcagcagctgcctcaatgactgcctcagacactccgcgactgtttcctgcccagaaatgccagacactccagaaccaattccggactacatgcccctgtgggtgtactggttcatcacgggcatctccatcctgctggtgggctccgtcatcctgctcatcgtctgcatgacctggaggctagctgggcctggaagtgaaaaatacagtgatgacaccaaatacaccgatggcctgcctgcggctgacctgatccccccaccgctgaagcccaggaaggtctggatcatctactcagccgaccaccccctctacgtggacgtggtcctgaaattcgcccagttcctgctcaccgcctgcggcacggaagtggccctggacctgctggaagagcaggccatctcggaggcaggagtcatgacctgggtgggccgtcagaagcaggagatggtggagagcaactctaagatcatcgtcctgtgctcccgcggcacgcgcgccaagtggcaggcgctcctgggccggggggcgcctgtgcggctgcgctgcgaccacggaaagcccgtgggggacctgttcactgcagccatgaacatgatcctcccggacttcaagaggccagcctgcttcggcacctacgtagtctgctacttcagcgaggtcagctgtgacggcgacgtccccgacctgttcggcgcggcgccgcggtacccgctcatggacaggttcgaggaggtgtacttccgcatccaggacctggagatgttccagccgggccgcatgcaccgcgtaggggagctgtcgggggacaactacctgcggagcccgggcggcaggcagctccgcgccgccctggacaggttccgggactggcaggtccgctgtcccgactggttcgaatgtgagaacctctactcagcagatgaccaggatgccccgtccctggacgaagaggtgtttgaggagccactgctgcctccgggaaccggcatcgtgaagcgggcgcccctggtgcgcgagcctggctcccaggcctgcctggccatagacccgctggtcggggaggaaggaggagcagcagtggcaaagctggaacctcacctgcagccccggggtcagccagcgccgcagcccctccacaccctggtgctcgccgcagaggagggggccctggtggccgcggtggagcctgggcccctggctgacggtgccgcagtccggctggcactggcgggggagggcgaggcctgcccgctgctgggcagcccgggcgctgggcgaaatagcgtcctcttcctccccgtggaccccgaggactcgccccttggcagcagcacccccatggcgtctcctgacctccttccagaggacgtgagggagcacctcgaaggcttgatgctctcgctcttcgagcagagtctgagctgccaggcccaggggggctgcagtagacccgccatggtcctcacagacccacacacgccctacgaggaggagcagcggcagtcagtgcagtctgaccagggctacatctccaggagctccccgcagccccccgagggactcacggaaatggaggaagaggaggaagaggagcaggacccagggaagccggccctgccactctctcccgaggacctggagagcctgaggagcctccagcggcagctgcttttccgccagctgcagaagaactcgggctgggacacgatggggtcagagtcagaggggcccagtgcatgagggcggctccccagggaccgcccagatcccagctttgagagaggagtgtgtgtgcacgtattcatctgtgtgtacatgtctgcatgtgtatatgttcgtgtgtgaaatgtaggctttaaaatgtaaatgtctggattttaatcccaggcatccctcctaacttttctttgtgcagcggtctggttatcgtctatccccaggggaatccacacagcccgctcccaggagctaatggtagagcgtccttgaggctccattattcgttcattcagcatttattgtgcacctactatgtggcgggcatttgggataccaagataaattgcatgcggcatggccccagccatgaaggaacttaaccgctagtgccgaggacacgttaaacgaacaggatgggccgggcacggtggctcacgcctgtaatcccagcacactgggaggccgaggcaggtggatcactctgaggtcaggagtttgagccagcctggccaacatggtgaaaccccatctccactaaaaatagaaaaattagccgggcatggtgacacatgcctgtagtcctagctacttgggaggctgaggcaggagaattgcttgaatctgggaggcagaggttgcagtgagccgagattgtgccattgcactgcagcctggatgacagagcgagactctatctcaaaaaaaaaaaaaaaaaaagatggtcacgcgggatgtaaacgctgaatgggccaggtgcagtggctcatgcttgtaatcccagcactttgggaaggcgaggcaggtggattgcttgagctcaggagttcaagaccagcctgggcgacatagtgagacctcatctctacctaaatttttttttagtcagtcatggtggcacatgcctgtagtcccagctactcgggaggctgatgccagatgatcacttgagcccaggaggtagaggctgcagtgagctataatggtaccattgcaatccagcctgggcagcagagtgagaccctgtctcaaaaaaaataaaaaagtagaaagatggagtggaagcctgcccagggttgtgagcatgcacgggaaaggcacccaggtcaggggggatccccgaggagatgcctgagctgaaggattgtggttggggaaagcgtagtcccagcaaggaagcagtttgtgggtaagtgctgggaggtgagtggagtgagcttgtcagggagctgctggtggagcctggaggggaaggagggaggcagtgagagagatcggggtggggggtggggggatgtcgccagagctcaggggtggggacagccttgtgcgcatcagtcctgaggcctggggcacctttcgtctgatgagcctctgcatggagagaggctgagggctaaacacagctggatgtcacctgagttcatttataggaagagagaaatgtcgaggtgaaacgtaaaagcatctggcaggaaggtgagtctgaagccctgcacccgcgttccgactatcagtggggagctgttagcacgtaggattcttcagagcagctgggctggagctcccctgagctcaggaagccccagggtgcaagggcaaggaaatgaggggtggtgggtcagtgaagatctgggcagaccttgtgtggggaaggggtgctgctgtgacttcagggtctgaggtccaaagacagcatttgaaaagaggctctgaagccagtgtttgaagaatttgttcctgaagtacctcctgggggtaggctagaggcttctggcttcagggtcctgaagaacacattgaggtgccgtctgacactggaatagggtgcccttcattcctatgcctgagtccttaactatatttccaacctccagtgaggaggagaagattcggaaatgtgacaggagagcaaacaggacagtttgcatgtgtgtgtgcgcacacatacatgtgcgtgaaagattatcaataaaagtgcataaatttgttgatctggtaagagtttctagcaggaaggtcgagccacttactgtaggtcaagaagttgctagttgcggagttttttcttgcagttagactttacctagtggtagcagggccaccaaagctctgtgtcccagatggtgtatggcccataatccacccaacagcagcaaaggaccaggcaaaggagaacaggagcagaagcctcccagccactagccttttgggctcagtctctccaataatcctggagaggggcttcgttgggtctggacacctaccatgcattctgtgacctttccctagcttccaataaataactgtttgacgcccagagtacaggataccacaatgcactcttcctgcgtagagcacatgttcccatctgctcccattcctcaggaaccttgaattctagctctgctggcctttgagcccatgccagtaaatgtcctgatgggcattgcctactatctccagggcagctgcctttgtcctcctaacagctttattggagtacagttcacttaccatacaatccacaattgaccctgcacaatttgatgccggtttagtatagtcacagttcagcagccatcagcacagtcagtcttagagtttactacccccaaaagaaatccagccccccttagtcaccaccccaacctccccatccctaggcacccctaggctactttgatctctgtagacttgcctcttctggacatgacatagagaaaggagtcataaattctccaaggtgtctgtttcttctttaatgtcattccctgtttctcctcacattccctccccatttcctgggcccagtctcacactggtccttgcttaccctaaatgctattaattccatcactctgagtatggtgtttgctgtccgctgaatgccaagagcttcaagagtgtgtgtaaataaagccacacctttatttttgtattattctgaaccatggctaataaattgtttcaccaagaaatgtctctctaagaacaggtgccctccacgctgtgcccctcccacctcttcagctcgtctcctgagtgtgcagaggtggttccggttgggaaagaagcagcggagcatctaaccatgcctgtgtccaggccgattatgcacgcagccaccaacaagctcccaactcccgcgtagagtttcatgactttttcctgcctactatcttgatcctagttttttttttgttttttttttttttaaggaataattactttgattcaaaaccagtttctcttttctgcataggaaggtccttgaaggtgtttagggtctaaaaagggtggtgttcggtctctgaaacatccattcagcagtttgagctgggatctctgaatgcaagggtatgatggatatacttctttcttgcttttgttgtgttttggttttttgtttgtttttaagtcagggtctctctgtcaccaggctgtattacagtggtgcaatcatggctcactgcagcctcgacctcccaggctcaagccatctttccacctcagcctgccagtggctagaactacaggcgtgcaccactgtgcccggctaatttgtgtgtatatattttgtagaaatggggtttcaccatgttgtccaggctggtcacgaactcctgggctcaagccatctgcccgcctcatcctcccaaagtgctgggattataggcctgagcccaccgtgcctggcctttcctgtttatctttgaaaattaaatagggcataagagagaagaagatgtacttacaatgcagtgggtggttttaactctatagcctttgggctctgtggttggtgctccccttcctaaataaatgaggtgtatgcagggccctcttctgccttagcgccctgccagctgggactccagcaaggcccggggcacctgaggacagagtgagatggagggccgctgctccagcagccgggcctgcatcccacaagtcaactgtgtcggacagaggatccttacaaagaagaggcagcagggttgggggctggccagctgctcgtccgccctaggtagcttgctcatctgtaaagtgggtggggcaggagttcccacctcatggggtcctggcaagcctgcagtatccccgagtggcaccagcctgcttctggggcagagcagtttgtgccccctgaggtaccactgatcctctttccctgctattaggtattgctctcttcctccggtgtttgccttttcagattatagaagtaatatgtgttcccatatttggcgtctctcaggagctcaggaagtacttggctgagtgaacatgtccattgtggaaaaatggcaacaatatggattccatgggtatattttatagaagaatatgaagaaaagcagctacccctaaacccattgcacaagctgttcatgttaattctgtacccgacgctttccccacggggcctcccctcactctgaaatggcatccaggtccatcttgccctccacctctgcatggctctccatgccccatcgcctctcccagatcctagcactgggtccacactctcgccctgtccatttaggttgatgaaagcaggcagtcacccgggtgggccagtcttgcctgtgggaggaacatgcagtctcctgtctcatggtttgaagtgtgccaggaagcctggcccagcccacctccccctggagtccttcccaggaggaataaccccttaggtcattgactataagatgagttcgctcactggatccttcctctctgatgagacaggaagaaggtacacagtgaccaggtaggaggaggagagggagtagaaaggagggatgcgggtggctggtccctgcatttgcctgcttccctgcacgggtgtcccactggccgcctctgctcaccagtgtcatgggattctctcagaagatgaaaacagcccctgcttttttgctagaatggctgagctttcatggaaaggaagctggacccaagcaacagccgactaccgaaggttgcctggagcagtgcagatgtgggaggaagaagggccttggtgcacactggcttttcttcctgactgcaatgtggcattgtgccagctacctcctctttctcggcctcaggaaaatggagagaaagcagccctgaaggtggctgtgacgagggaaggggcagagggcctgacagtcaaccacgcgctatattttcctgttcttccttagggcaagaactgcatggccagactcaggcaaggcctaggtgtgggctgggcattgcctacacgtgaagagatcactccgcgtccctactgcacctgtcacaaagtgccttctgatatgcctggcaaaccaaaatcggtgagcgccagcttgcttccctagaagacatttctaaatattcataacatgcttgctcaaatcaatcaccttattttacatccgctccagggagaaatgaagacatggtcctacgttgttctgtaattattttctatgtaaattttgttccttgttacaattatatatgtcttaggggaaaggaccatttcacatgtgtcacctcatgtgattctcaccacagccctgtgattgctcctgttttataaataatgacatagttccagttgatggccaaagccacagctaacgagaggcagagagagctcaggctcccaggagcttccactctcagaccttgcctcccgggctgccctgagtgaaacgcctgcttagcatttggcacagccagaagcagcaagctagggtcacaacacagagaggggctgtgtaatactggctgcctctgtgctaagaaaaaaaaaaaatcactgtgtgtttgtttattttggtgcaggcccagtgttcttgcttagacttaatactacccttcatgttaaaataaaaccaaacaaaaaccca

SEQ ID NO: 179487 - DNA, 2601 bp, Artificial Sequence
  derived and/or modified sequence
atgggcgccgcccggagccccccatctgctgtgcccggccccctgctgggcctgctgctgctgctgctgggcgtgctggcccctgggggcgccagcctgcggctgctggaccaccgggccctggtgtgcagccagcccggcctgaactgcaccgtgaagaacagcacctgcctggatgacagctggatccaccccaggaacctgacccccagcagccccaaggacctgcagatccagctgcactttgcccacacccagcagggcgacctcttccctgtggcccacatcgagtggaccctgcagacagatgccagcatcctgtacctggagggcgctgagctgtctgtgctgcagctgaacaccaatgaaaggctgtgtgtgcgctttgagttcctgagcaagctgcggcaccaccaccggcgctggaggttcaccttcagccactttgtggtggaccctgaccaggagtatgaggtgacagtgcaccacctgcccaagcccatcccagatggagaccccaaccaccagagcaagaacttcctggtgcctgactgtgaacatgccaggatgaaggtgaccaccccctgcatgagcagcggcagcctgtgggaccccaacatcaccgtggagaccctggaggcccaccagctgcgggtgtccttcaccctgtggaatgaaagcacccactaccagatcctgctgaccagcttcccccacatggagaaccacagctgctttgagcacatgcaccacatcccagcccccaggcctgaggagttccaccagaggagcaatgtgaccctgaccctgaggaacctgaagggctgctgccgccaccaggtgcagatccagcccttcttcagcagctgcctgaatgactgcctgcggcacagcgccaccgtgtcctgcccagagatgccagacaccccagagcccatcccagactacatgcccctgtgggtgtactggttcatcaccggcatcagcatcctgctggtgggcagcgtcatcctgctgattgtgtgcatgacctggaggctggccggccctggcagcgagaagtacagtgatgacaccaagtacacagatggcctgcctgctgctgacctgatccccccacccctgaagcccaggaaggtgtggatcatctacagcgctgaccaccccctgtatgtggatgtggtgctgaagtttgcccagttcctgctgacagcctgtggcacagaggtggccctggacctgctggaggagcaggccatcagcgaggccggcgtgatgacctgggtgggccggcagaagcaggagatggtggagagcaacagcaagatcatcgtgctgtgcagccggggcacccgggccaagtggcaggccctgctgggccgcggggcccctgtgcggctgcgctgtgaccacggcaagcctgtgggggacctcttcaccgctgccatgaacatgatcctgcctgacttcaagaggcctgcctgcttcggcacctacgtggtgtgctacttcagcgaggtgtcctgtgatggagatgtgcctgacctgtttggagctgccccccgctaccccctgatggacagatttgaggaggtgtacttccgcatccaggacctggagatgttccagcccggccgcatgcaccgggtgggggagctgagcggggacaactacctgcggagccctgggggccggcagctgcgggccgccctggaccgcttccgggactggcaggtgcgctgcccagactggtttgaatgtgagaacctgtacagcgcagatgaccaggatgcccccagcctggatgaggaggtgtttgaggagcccctgctgcccccaggcactggaattgtgaagagggcccccctggtgcgggagcccggcagccaggcctgcctggccatcgaccccctggtgggggaggagggcggcgctgctgtggccaagctggagccccacctgcagccccggggccagcctgccccccagcccctgcacaccctggtgctggccgctgaggagggcgccctggtggccgctgtggagcccggccccctggctgatggagctgctgtgcggctggccctggccggggagggggaggcctgccccctgctgggcagccctggagctggaagaaattctgtgctcttcctgcctgtggaccctgaggacagccccctgggcagcagcacccccatggccagcccagacctgctgcctgaagatgtgcgggagcacctggagggcctgatgctgagcctgtttgagcagagcctgagctgccaggcccagggcggctgcagcaggcctgccatggtgctgacagacccccacaccccctatgaggaggagcagaggcagagcgtgcagagcgaccagggctacatcagccgcagcagcccccagcccccagagggcctgacagagatggaggaggaggaggaggaggagcaggaccccgggaagccagccctgcccctgagccctgaggacctggagagcctgcggagcctgcagaggcagctgctcttccggcagctgcagaagaacagcggctgggacaccatgggcagcgagagcgagggccccagcgcctag

SEQ ID NO: 179488 - DNA, 2601 bp, Artificial Sequence
  derived and/or modified sequence
atgggcgccgcccggagcccccccagcgccgtgcccggccccctgcttggcctgctcttgttactcttaggggttcttgctccaggaggcgcaagcttgaggttgctggatcatagggccctggtgtgcagccagcctggcctcaattgcaccgtgaagaacagtacctgtttggatgatagctggatccacccaagaaatcttacccccagcagcccaaaggacctccaaatccagctacattttgcacatactcagcaaggagatctgtttcctgtcgctcatatcgagtggaccctgcagaccgacgcttccattctgtacctcgagggggctgagctatccgtgctgcagctcaacaccaatgaacggctgtgcgtcaggttcgagtttctctcaaaactgcgccatcatcaccggcggtggcgtttcacctttagccactttgtggtagatccagatcaggaatatgaggtaacagtgcatcatttgcccaaacccattccagacggcgaccctaatcaccaaagcaagaacttcttagtgccagactgcgagcatgcccgaatgaaggtaaccactccttgtatgagctctggatctctttgggatcccaatataacagtggagactctcgaggcacaccagctgcgtgtgtcctttactctgtggaacgaatcaacacactaccagattcttcttacgagtttcccacatatggagaaccactcttgtttcgaacacatgcatcatatcccagcacctagaccagaggaatttcaccagaggagcaatgtcacgctgacactgcgcaacctcaagggatgctgtcgccatcaggtgcaaatccagcctttttttagctcttgtctgaacgattgtttgcggcacagcgcgaccgtctcctgccctgaaatgcccgatacacctgagcctattccagattatatgccactgtgggtctactggttcatcaccggcatcagcatcctgctcgttggctctgtgatattgctgatagtctgcatgacatggagactcgcaggaccgggctctgaaaaatattcagacgacacaaagtataccgatggcctccccgccgccgacttgatacctcctcctctcaagcctagaaaggtatggatcatctactctgctgatcatccattgtatgtggacgttgtgctgaaatttgctcagtttttgttgacagcttgtggcactgaagtcgcactggatctgcttgaggaacaggccatctccgaagcgggcgtaatgacatgggtgggcaggcaaaagcaggaaatggtcgaaagcaattcaaagatcatcgtgctgtgctctcgcggcacgcgcgctaagtggcaggccctgctgggtcgaggcgcccctgtcagactccggtgtgatcatggcaagcccgtgggcgacttgtttacagctgcaatgaatatgattctaccagacttcaaacgacccgcatgtttcggaacctacgtggtgtgctacttctctgaagtctcttgcgacggggacgtgcccgatctgtttggggcagctcctcgatatcctctgatggacagatttgaagaggtgtactttagaatccaggacttggagatgtttcaaccggggcgcatgcatagagtcggagagctcagcggcgacaactatctcagatcacctggagggaggcaacttcgtgctgcattggaccggttccgcgattggcaggttaggtgtcctgattggtttgagtgcgagaacctctactcagcagacgatcaggacgctccatccctagatgaagaggttttcgaggaacctctgctgcctccagggactggaattgtcaagagagccccgctggtgagagagcctggctcccaagcctgcctcgcaatcgacccgctggttggcgaggaagggggagccgctgttgcaaagctggagcctcacttacagccccggggccagcctgcacctcaacctctgcatacgctggtgttggcggccgaggagggagccctggtcgccgcagtcgagcccggaccactggcggacggcgcagccgtccgattggccctggccggggagggggaggcatgccctttactgggaagtcccggggccggcagaaactctgtgctgttcctcccagtagacccggaggattccccccttggcagttcgacgccgatggcaagcccagatctgctacctgaggacgtgcgggagcatctggaaggactgatgctgtcactattcgagcagtccttatcctgccaggcacagggcgggtgcagtcgccctgccatggtacttacagatccacatacaccctacgaggaggagcaacggcaaagcgtgcaaagcgaccagggctatatctcaagaagtagcccccagccccctgagggcctgaccgaaatggaagaggaggaggaagaagagcaggatcccggaaaacctgccttgcccctctcccccgaagatttggagtctcttagatcactccagcgtcagttgctttttcgccagttacagaagaatagcggttgggacactatgggatctgagtctgagggcccatccgcttag

SEQ ID NO: 179489 - DNA, 2601 bp, Artificial Sequence
  derived and/or modified sequence
atgggtgcggcacggtctcctccctccgctgtcccgggtcctttgctcggtctcctgctccttctgctcggggtgctggctccaggcggagcttctttgagactgttggaccacagagcccttgtgtgctcccagcctggcctgaattgtaccgttaagaattcaacctgcctggacgactcttggattcacccacggaacctgacacctagttctcccaaggatctccagattcaactgcacttcgcacacacacagcagggcgacttgttccccgtagcgcatatcgagtggacactgcagaccgatgcctctatcctctacctcgaaggtgccgagctttcagtcctgcagctaaatactaacgagaggctgtgcgtgagatttgaattccttagtaaattacgacatcatcacaggaggtggcggtttacttttagtcatttcgtggttgatcccgatcaggaatacgaagtgaccgtgcaccatctaccaaaaccaattcccgacggcgatcccaatcaccagagtaaaaatttcctggtgccagactgtgagcacgcacgcatgaaagtgaccaccccatgtatgtcttctggctcactgtgggatcccaacatcaccgtggagaccctggaagctcatcagctgagggtaagtttcaccttgtggaatgaatctactcactaccaaatcctgcttacgagcttccctcacatggagaaccactcatgcttcgagcatatgcatcatatccctgctccacgcccagaagaatttcatcaacgatccaacgtcaccctgaccttgagaaacctgaaaggctgttgtcggcaccaggtgcaaatccagcccttcttctccagctgcctgaacgactgcctgaggcattccgcaaccgtgtcctgcccagagatgccagacaccccagagcctatcccagattacatgcccctttgggtttactggtttattacaggaataagtattctactagtcggcagcgtcatattgctgatcgtgtgcatgacctggcggttagccggtccaggttcggaaaagtattctgacgacactaaatacacggacgggctcccagccgctgatctcattcctcctcccctgaagccacgtaaagtctggatcatctactccgccgatcaccccctgtacgtggacgtggttctgaaatttgcacagtttctactgacagcctgtggaacagaggtcgctttagacttattagaggagcaggcaatttccgaggcaggggttatgacatgggtcgggagacaaaagcaggagatggtggaatccaattccaaaatcatcgtcctgtgttcccgcggaaccagggcaaaatggcaagccttgctggggaggggtgcacccgttagacttagatgcgaccatggaaagcctgtgggagatctttttactgccgcaatgaacatgattttgcccgattttaaacggccagcctgctttggtacctacgtggtgtgctactttagcgaggttagttgtgacggagatgtgcctgatttgtttggcgctgcccctaggtatccactgatggaccgctttgaagaggtgtatttcaggattcaggacctcgagatgtttcaaccaggcaggatgcatagggtgggcgaactaagcggggataattacctaagatcccctggagggcgtcaacttcgcgctgcactcgacaggttcagggactggcaggtgcgatgtcccgattggttcgagtgcgagaatctgtactccgctgatgaccaggacgccccttctctggacgaggaggtattcgaagagccacttctgcctccaggcactggcattgtgaagagagcaccccttgttagagagcccggatcccaagcctgccttgctattgaccctctggtaggggaagaggggggtgcagcggtagcaaaattagagccacacttgcagccccgaggacagccagcaccgcagccattgcacaccctggtccttgcggcagaggaaggagccctcgtggccgcagtggagccagggcctctggccgacggtgcagctgttcgtttggctcttgccggagagggtgaggcgtgccccttactgggcagccctggcgctggcagaaattctgtactattccttcccgttgaccctgaagattctccacttggtagttccacacccatggcttcccccgatctcctccccgaggacgtccgcgaacacctagagggtttgatgctgtctctttttgagcaatctctgagctgccaggcgcagggaggctgctctcggcctgcgatggttttaacggacccgcacaccccatatgaagaggaacagagacaatcggtgcagagcgatcagggctacatttcacgtagtagtccccagccaccagaagggctgactgagatggaggaggaggaggaagaggagcaggaccccggaaagcctgcccttcctctgtctcccgaggacttggagtcactccgctccctgcagcgccaactgctttttaggcagctgcagaagaattctggctgggacactatggggtcagagtccgaaggaccttccgcctag

SEQ ID NO: 179490 - DNA, 2601 bp, Artificial Sequence
  derived and/or modified sequence
atgggcgccgccagaagcccccccagcgccgtgcccggccccctgctgggcctgctgctgctgctgctgggcgtgctggcccccggcggcgccagcctgagactgctggaccacagagccctggtgtgcagccagcccggcctgaactgcaccgtgaagaacagcacctgcctggacgacagctggatccaccccagaaacctgacccccagcagccccaaggacctgcagatccagctgcacttcgcccacacccagcagggcgacctgttccccgtggcccacatcgagtggaccctgcagaccgacgccagcatcctgtacctggagggcgccgagctgagcgtgctgcagctgaacaccaacgagagactgtgcgtgagattcgagttcctgagcaagctgagacaccaccacagaagatggagattcaccttcagccacttcgtggtggaccccgaccaggagtacgaggtgaccgtgcaccacctgcccaagcccatccccgacggcgaccccaaccaccagagcaagaacttcctggtgcccgactgcgagcacgccagaatgaaggtgaccaccccctgcatgagcagcggcagcctgtgggaccccaacatcaccgtggagaccctggaggcccaccagctgagagtgagcttcaccctgtggaacgagagcacccactaccagatcctgctgaccagcttcccccacatggagaaccacagctgcttcgagcacatgcaccacatccccgcccccagacccgaggagttccaccagagaagcaacgtgaccctgaccctgagaaacctgaagggctgctgcagacaccaggtgcagatccagcccttcttcagcagctgcctgaacgactgcctgagacacagcgccaccgtgagctgccccgagatgcccgacacccccgagcccatccccgactacatgcccctgtgggtgtactggttcatcaccggcatcagcatcctgctggtgggcagcgtgatcctgctgatcgtgtgcatgacctggagactggccggccccggcagcgagaagtacagcgacgacaccaagtacaccgacggcctgcccgccgccgacctgatccccccccccctgaagcccagaaaggtgtggatcatctacagcgccgaccaccccctgtacgtggacgtggtgctgaagttcgcccagttcctgctgaccgcctgcggcaccgaggtggccctggacctgctggaggagcaggccatcagcgaggccggcgtgatgacctgggtgggcagacagaagcaggagatggtggagagcaacagcaagatcatcgtgctgtgcagcagaggcaccagagccaagtggcaggccctgctgggcagaggcgcccccgtgagactgagatgcgaccacggcaagcccgtgggcgacctgttcaccgccgccatgaacatgatcctgcccgacttcaagagacccgcctgcttcggcacctacgtggtgtgctacttcagcgaggtgagctgcgacggcgacgtgcccgacctgttcggcgccgcccccagataccccctgatggacagattcgaggaggtgtacttcagaatccaggacctggagatgttccagcccggcagaatgcacagagtgggcgagctgagcggcgacaactacctgagaagccccggcggcagacagctgagagccgccctggacagattcagagactggcaggtgagatgccccgactggttcgagtgcgagaacctgtacagcgccgacgaccaggacgcccccagcctggacgaggaggtgttcgaggagcccctgctgccccccggcaccggcatcgtgaagagagcccccctggtgagagagcccggcagccaggcctgcctggccatcgaccccctggtgggcgaggagggcggcgccgccgtggccaagctggagccccacctgcagcccagaggccagcccgccccccagcccctgcacaccctggtgctggccgccgaggagggcgccctggtggccgccgtggagcccggccccctggccgacggcgccgccgtgagactggccctggccggcgagggcgaggcctgccccctgctgggcagccccggcgccggcagaaacagcgtgctgttcctgcccgtggaccccgaggacagccccctgggcagcagcacccccatggccagccccgacctgctgcccgaggacgtgagagagcacctggagggcctgatgctgagcctgttcgagcagagcctgagctgccaggcccagggcggctgcagcagacccgccatggtgctgaccgacccccacaccccctacgaggaggagcagagacagagcgtgcagagcgaccagggctacatcagcagaagcagcccccagccccccgagggcctgaccgagatggaggaggaggaggaggaggagcaggaccccggcaagcccgccctgcccctgagccccgaggacctggagagcctgagaagcctgcagagacagctgctgttcagacagctgcagaagaacagcggctgggacaccatgggcagcgagagcgagggccccagcgcctag

SEQ ID NO: 179491 - protein, 363 aa, Artificial Sequence
  derived and/or modified sequence
MDGGSGGLGSGDNAPTTEALFVALGAGVTALSHPLLYVKLLIQVGHEPMPPTLGTNVLGRKVLYLPSFFTYAKYIVQVDGKIGLFRGLSPRLMSNALSTVTRGSMKKVFPPDEIEQVSNKDDMKTSLKKVVKETSYEMMMQCVSRMLAHPLHVISMRCMVQFVGREAKYSGVLSSIGKIFKEEGLLGFFVGLIPHLLGDVVFLWGCNLLAHFINAYLVDDSFSQALAIRSYTKFVMGIAVSMLTYPFLLVGDLMAVNNCGLQAGLPPYSPVFKSWIHCWKYLSVQGQLFRGSSCFSAGCHQDHALPWSNLNHLKNTVSTWPPWVRPDHLGTPARRLQPNNNQMCSSPAGLQFHICHVSVQMWG

SEQ ID NO: 179492 - protein, 372 aa, Artificial Sequence
  derived and/or modified sequence
MGASDPEVAPWARGGAAGMAGAGAGAGARGGAAAGVEARARDPPPAHRAHPRHPRPAAQPSARRMDGGSGGLGSGDNAPTTEALFVALGAGVTALSHPLLYVKLLIQVGHEPMPPTLGTNVLGRKVLYLPSFFTYAKYIVQVDGKIGLFRGLSPRLMSNALSTVTRGSMKKVFPPDEIEQVSNKDDMKTSLKKVVKETSYEMMMQCVSRMLAHPLHVISMRCMVQFVGREAKYSGVLSSIGKIFKEEGLLGFFVGLIPHLLGDVVFLWGCNLLAHFINAYLVDDSFSQALAIRSYTKFVMGIAVSMLTYPFLLVGDLMAVNNCGLQAGLPPYSPVFKSWIHCWKYLSVQGQLFRGSSLLFRRVSSGSCFALE

SEQ ID NO: 179493 - protein, 201 aa, Artificial Sequence
  derived and/or modified sequence
  misc_feature (1)..(1): Xaa can be any naturally occurring amino acid
XAVCVPHVGPPPACHLNALHGPVCGTGGQVQLSCGATIPGSSAAMVPHFGVINGKLAHSPRLIMSGVLSSIGKIFKEEGLLGFFVGLIPHLLGDVVFLWGCNLLAHFINAYLVDDSFSQALAIRSYTKFVMGIAVSMLTYPFLLVGDLMAVNNCGLQAGLPPYSPVFKSWIHCWKYLSVQGQLFRGSSLLFRRVSSGSCFA

SEQ ID NO: 179494 - DNA, 1092 bp, Artificial Sequence
  derived and/or modified sequence
atggacggcggcagcggcggcctgggcagcggcgacaacgcccccaccaccgaggccctgttcgtggccctgggcgccggcgtgaccgccctgagccaccccctgctgtacgtgaagctgctgatccaggtgggccacgagcccatgccccccaccctgggcaccaacgtgctgggcagaaaggtgctgtacctgcccagcttcttcacctacgccaagtacatcgtgcaggtggacggcaagatcggcctgttcagaggcctgagccccagactgatgagcaacgccctgagcaccgtgaccagaggcagcatgaagaaggtgttcccccccgacgagatcgagcaggtgagcaacaaggacgacatgaagaccagcctgaagaaggtggtgaaggagaccagctacgagatgatgatgcagtgcgtgagcagaatgctggcccaccccctgcacgtgatcagcatgagatgcatggtgcagttcgtgggcagagaggccaagtacagcggcgtgctgagcagcatcggcaagatcttcaaggaggagggcctgctgggcttcttcgtgggcctgatcccccacctgctgggcgacgtggtgttcctgtggggctgcaacctgctggcccacttcatcaacgcctacctggtggacgacagcttcagccaggccctggccatcagaagctacaccaagttcgtgatgggcatcgccgtgagcatgctgacctaccccttcctgctggtgggcgacctgatggccgtgaacaactgcggcctgcaggccggcctgcccccctacagccccgtgttcaagagctggatccactgctggaagtacctgagcgtgcagggccagctgttcagaggcagcagctgcttcagcgccggctgccaccaggaccacgccctgccctggagcaacctgaaccacctgaagaacaccgtgagcacctggcccccctgggtgagacccgaccacctgggcacccccgccagaagactgcagcccaacaacaaccagatgtgcagcagccccgccggcctgcagttccacatctgccacgtgagcgtgcagatgtggggctag

SEQ ID NO: 179495 - DNA, 1119 bp, Artificial Sequence
  derived and/or modified sequence
atgggcgccagcgaccccgaggtggccccctgggccagaggcggcgccgccggcatggccggcgccggcgccggcgccggcgccagaggcggcgccgccgccggcgtggaggccagagccagagaccccccccccgcccacagagcccaccccagacaccccagacccgccgcccagcccagcgccagaagaatggacggcggcagcggcggcctgggcagcggcgacaacgcccccaccaccgaggccctgttcgtggccctgggcgccggcgtgaccgccctgagccaccccctgctgtacgtgaagctgctgatccaggtgggccacgagcccatgccccccaccctgggcaccaacgtgctgggcagaaaggtgctgtacctgcccagcttcttcacctacgccaagtacatcgtgcaggtggacggcaagatcggcctgttcagaggcctgagccccagactgatgagcaacgccctgagcaccgtgaccagaggcagcatgaagaaggtgttcccccccgacgagatcgagcaggtgagcaacaaggacgacatgaagaccagcctgaagaaggtggtgaaggagaccagctacgagatgatgatgcagtgcgtgagcagaatgctggcccaccccctgcacgtgatcagcatgagatgcatggtgcagttcgtgggcagagaggccaagtacagcggcgtgctgagcagcatcggcaagatcttcaaggaggagggcctgctgggcttcttcgtgggcctgatcccccacctgctgggcgacgtggtgttcctgtggggctgcaacctgctggcccacttcatcaacgcctacctggtggacgacagcttcagccaggccctggccatcagaagctacaccaagttcgtgatgggcatcgccgtgagcatgctgacctaccccttcctgctggtgggcgacctgatggccgtgaacaactgcggcctgcaggccggcctgcccccctacagccccgtgttcaagagctggatccactgctggaagtacctgagcgtgcagggccagctgttcagaggcagcagcctgctgttcagaagagtgagcagcggcagctgcttcgccctggagtag

SEQ ID NO: 179496 - DNA, 606 bp, Artificial Sequence
  derived and/or modified sequence
tgagccgtgtgcgtgccccacgtgggccccccccccgcctgccacctgaacgccctgcacggccccgtgtgcggcaccggcggccaggtgcagctgagctgcggcgccaccatccccggcagcagcgccgccatggtgccccacttcggcgtgatcaacggcaagctggcccacagccccagactgatcatgagcggcgtgctgagcagcatcggcaagatcttcaaggaggagggcctgctgggcttcttcgtgggcctgatcccccacctgctgggcgacgtggtgttcctgtggggctgcaacctgctggcccacttcatcaacgcctacctggtggacgacagcttcagccaggccctggccatcagaagctacaccaagttcgtgatgggcatcgccgtgagcatgctgacctaccccttcctgctggtgggcgacctgatggccgtgaacaactgcggcctgcaggccggcctgcccccctacagccccgtgttcaagagctggatccactgctggaagtacctgagcgtgcagggccagctgttcagaggcagcagcctgctgttcagaagagtgagcagcggcagctgcttcgcctag

SEQ ID NO: 179497 - DNA, 1092 bp, Artificial Sequence
  derived and/or modified sequence
atggacggggggtccggcggactaggcagcggtgataatgcaccaaccacagaggccttgtttgtcgccttgggtgccggagtgactgccttgagccaccctctgctatacgtcaaactgttaattcaggttggccacgaaccgatgcccccaactttgggcacgaatgttctaggaagaaaggttttgtacctgccatctttttttacatacgccaaatatatagtccaggtggacggaaagataggattgtttcgcggactctcacctaggctgatgagcaacgcactgtcaaccgtgaccagaggaagtatgaagaaagtgttcccccctgacgagattgaacaagttagcaacaaggatgacatgaagaccagcctcaagaaagtggttaaggaaacttcctatgagatgatgatgcagtgtgtctcccgcatgttggctcatcccctgcacgtgatttcaatgcgctgcatggttcagttcgtgggtcgcgaggcgaagtatagtggtgtcctctcttctatcgggaaaatctttaaggaggagggacttcttggattctttgttgggctgattcctcatctcctcggcgatgttgtatttttgtggggatgtaatctcctcgctcacttcatcaacgcttacttggtagatgattccttcagccaggcgttagctatcaggagctacacgaagtttgtcatggggatcgctgtgtctatgctcacttaccccttccttttggttggcgatctgatggccgtcaataattgtggattacaagccgggctgccgccttatagcccagtttttaagtcttggatccactgttggaaatatttgtccgtgcaagggcagctctttagaggcagctcctgcttctccgcaggttgccatcaggaccacgcactgccatggagcaatcttaatcacctaaaaaacactgtatccacttggcccccctgggtcagacctgaccaccttggcaccccggcccgccggctccaacctaataacaaccagatgtgtagcagccctgctggtctgcagttccacatctgccatgtctctgttcagatgtgggggtag

SEQ ID NO: 179498 - DNA, 1119 bp, Artificial Sequence
  derived and/or modified sequence
atgggcgcctcggatccagaggtcgcgccatgggcccgtggtggcgctgctgggatggcgggggcgggagcaggcgctggggcaagggggggagccgctgctggagtcgaggctagagctcgtgacccgcctccagcccatcgtgctcaccccaggcacccacgacccgccgcgcaacccagcgcaaggaggatggatggaggctcaggaggactgggcagcggggacaacgcccccacaaccgaggctctgtttgtggcccttggagcaggagtgactgccctgtcccacccgctgctgtatgtgaaactgctgatccaggtcgggcatgaacccatgccaccgacactaggtaccaatgtgttgggcagaaaagtgttgtatctaccttcattcttcacatatgccaaatacatagtgcaggtggacggcaagatcggtttgtttagaggattgtccccaaggctgatgtcaaacgccctcagcacagtgacacggggctccatgaagaaagtatttccacctgatgagattgagcaggttagcaataaggacgacatgaaaactagtcttaagaaagttgtgaaagagacctcatacgaaatgatgatgcagtgtgtttctcgcatgcttgcacatcccttgcatgtgataagtatgaggtgcatggtccagtttgttggtcgggaggctaaatacagcggagtcctctcttcgatcggcaaaatctttaaggaagagggcctgctcgggttttttgtgggccttataccccacctactgggcgacgtggtgtttctgtggggttgtaatctgctggcccatttcatcaatgcatatctggtcgatgactcatttagtcaggcactggctattcggtcttatacaaaatttgtgatggggatagcagtgtccatgctgacctatccattcctgcttgtcggcgacctcatggccgtaaataattgcgggctgcaggctggattacccccgtactcccccgtctttaaaagctggatccattgctggaagtacctgtctgttcagggccaactgtttagaggaagttcccttttgttccgccgcgtgtcttcagggtcctgcttcgcgttagagtag

SEQ ID NO: 179499 - DNA, 606 bp, Artificial Sequence
  derived and/or modified sequence
tgagcggtttgtgtgccgcacgtgggccctcctcctgcttgccacctcaatgcacttcacggacctgtttgcggcaccggtggacaggttcagctgagctgtggggctaccatacctggctcatctgcggcaatggtcccccatttcggggtcataaacggcaagttggctcactcgcctcggctgattatgagcggcgtattgagcagcattgggaagatctttaaagaggaaggcttactgggcttcttcgtgggcctgatcccacacctgctgggggatgtagtcttcctgtggggctgcaatctccttgcccatttcatcaacgcctatttggttgatgatagtttttctcaagcgcttgccatacgctcctacactaaattcgttatgggtattgctgtgagtatgctcacatacccctttctgctggtcggggatttaatggctgttaacaattgcgggctccaggccggcctgcccccttactcgcccgtcttcaagtcctggattcattgttggaagtacctttctgtgcagggccagctgttcaggggatcatcgttgctgtttcgtagagtgagtagtggctcttgcttcgcttag

SEQ ID NO: 179500 - DNA, 1092 bp, Artificial Sequence
  derived and/or modified sequence
atggatggcggcagcggcggcctgggcagcggggacaatgcccccaccacagaggccctgtttgtggccctgggcgctggggtgacagccctgagccaccccctgctgtatgtgaagctgctgatccaggtgggccacgagcccatgccacccaccctgggcaccaacgtgctgggcaggaaggtgctgtacctgcccagcttcttcacctacgccaagtacatcgtgcaggtggatggcaagattggcctcttccggggcctgagcccccggctgatgagcaatgccctgagcacagtgacccggggctccatgaagaaggtgttccccccagatgaaattgagcaggtgagcaacaaggatgacatgaagaccagcctgaagaaggtggtgaaggagaccagctatgagatgatgatgcagtgtgtgtccaggatgctggcccaccccctgcacgtgatctccatgcgctgcatggtgcagtttgtgggccgggaggccaagtacagcggcgtgctgagcagcatcggcaagatcttcaaggaggagggcctgctgggcttctttgtgggcctcatcccccacctgctgggagatgtggtgttcctgtggggctgcaacctgctggcccacttcatcaatgcctacctggtggatgacagcttcagccaggccctggccatccgcagctacaccaagtttgtgatgggcattgctgtgtccatgctgacctaccccttcctgctggtgggggacctgatggctgtgaacaactgtggcctgcaggccggcctgcccccctacagccctgtgttcaagtcctggatccactgctggaagtacctgtctgtgcagggccagctgttccggggcagcagctgcttctctgctggctgccaccaggaccacgccctgccctggagcaacctgaaccacctgaagaacacagtgtccacctggccaccctgggtgcggccagaccacctgggcaccccagcccggcggctgcagcccaacaacaaccagatgtgcagcagccctgctggcctgcagttccacatctgccacgtgtctgtgcagatgtggggctag

SEQ ID NO: 179501 - DNA, 1119 bp, Artificial Sequence
  derived and/or modified sequence
atgggcgccagtgaccctgaggtggccccctgggcccggggcggcgctgctggcatggccggggccggggccggggccggggcccggggcggcgctgctgctggggtggaggcccgggcccgggaccccccaccagcccaccgggcccaccccaggcaccccaggcctgctgcccagcccagcgcccggaggatggatggcggcagcggcggcctgggcagcggggacaatgcccccaccacagaggccctgtttgtggccctgggcgctggggtgacagccctgagccaccccctgctgtatgtgaagctgctgatccaggtgggccacgagcccatgccacccaccctgggcaccaacgtgctgggcaggaaggtgctgtacctgcccagcttcttcacctacgccaagtacatcgtgcaggtggatggcaagattggcctcttccggggcctgagcccccggctgatgagcaatgccctgagcacagtgacccggggctccatgaagaaggtgttccccccagatgaaattgagcaggtgagcaacaaggatgacatgaagaccagcctgaagaaggtggtgaaggagaccagctatgagatgatgatgcagtgtgtgtccaggatgctggcccaccccctgcacgtgatctccatgcgctgcatggtgcagtttgtgggccgggaggccaagtacagcggcgtgctgagcagcatcggcaagatcttcaaggaggagggcctgctgggcttctttgtgggcctcatcccccacctgctgggagatgtggtgttcctgtggggctgcaacctgctggcccacttcatcaatgcctacctggtggatgacagcttcagccaggccctggccatccgcagctacaccaagtttgtgatgggcattgctgtgtccatgctgacctaccccttcctgctggtgggggacctgatggctgtgaacaactgtggcctgcaggccggcctgcccccctacagccctgtgttcaagtcctggatccactgctggaagtacctgtctgtgcagggccagctgttccggggcagcagcctgctcttcagaagagtgagcagcggcagctgctttgccctggagtag

SEQ ID NO: 179502 - DNA, 606 bp, Artificial Sequence
  derived and/or modified sequence
tgagctgtgtgtgtgccccacgtgggccccccaccagcctgccacctgaatgccctgcacggccctgtgtgtggcaccggcggccaggtgcagctgagctgtggggccaccatccctggcagcagcgctgccatggtgccccactttggagtcatcaatggcaagctggcccacagccccaggctcatcatgtctggagtgctgagcagcatcggcaagatcttcaaggaggagggcctgctgggcttctttgtgggcctcatcccccacctgctgggagatgtggtgttcctgtggggctgcaacctgctggcccacttcatcaatgcctacctggtggatgacagcttcagccaggccctggccatccgcagctacaccaagtttgtgatgggcattgctgtgtccatgctgacctaccccttcctgctggtgggggacctgatggctgtgaacaactgtggcctgcaggccggcctgcccccctacagccctgtgttcaagtcctggatccactgctggaagtacctgtctgtgcagggccagctgttccggggcagcagcctgctcttccggcgggtgagcagcggcagctgctttgcctag

SEQ ID NO: 179503 - DNA, 1732 bp, Artificial Sequence
  derived and/or modified sequence
atcctcgccaccctcggcctgcggctcagccctcggcccgcaggatggatggcgggtcagggggcctggggtctggggacaacgccccgaccactgaggctcttttcgtggcactgggcgcgggcgtgacggcgctcagccatcccctgctctacgtgaagctgctcatccaggtgggtcatgagccgatgccccccacccttgggaccaatgtgctggggaggaaggtcctctatctgccgagcttcttcacctacgccaagtacatcgtgcaagtggatggtaagatagggctgttccgaggcctgagtccccggctgatgtccaacgccctctctactgtgactcggggtagcatgaagaaggttttccctccagatgagattgagcaggtttccaacaaggatgatatgaagacttccctgaagaaagttgtgaaggagacctcctacgagatgatgatgcagtgtgtgtcccgcatgttggcccaccccctgcatgtcatctcaatgcgctgcatggtccagtttgtgggacgggaggccaagtacagtggtgtgctgagctccattgggaagattttcaaagaggaagggctgctgggattcttcgttggattaatccctcacctcctgggcgatgtggttttcttgtggggctgtaacctgctggcccacttcatcaatgcctacctggtggatgacagcttcagccaggccctggccatccggagctataccaagttcgtgatggggattgcagtgagcatgctgacctaccccttcctgctagttggcgacctcatggctgtgaacaactgcgggctgcaagctgggctccccccttactccccagtgttcaaatcctggattcactgctggaagtacctgagtgtgcagggccagctcttccgaggctccagctgcttttccgccgggtgtcatcaggatcatgctttgccctggagtaacctgaatcatctaaaaaacacggtctcaacctggccaccgtgggtgaggcctgaccaccttgggacacctgcaagacgactccaacccaacaacaaccagatgtgctccagcccagccgggcttcagttccatatttgccatgtgtctgtccagatgtggggttgagcgggggtggggctgcacccagtggattgggtcacccggcagacctagggaaggtgaggcgaggtggggagttggcagaatccccatacctcgcagatttgctgagtctgtcttgtgcagagggccagagaatggcttatgggggcccaggttggatggggaaaggctaatggggtcagaccccaccccgtctacccctccagtcagcccagcgcccatcctgcagctcagctgggagcatcattctcctgctttgtacatagggtgtggtcccctggcacgtggccaccatcatgtctaggcctatgctaggaggcaaatggccaggctctgcctgtgtttttctcaacactacttttctgatatgagggcagcacctgcctctgaatgggaaatcatgcaactactcagaatgtgtcctcctcatctaatgctcatctgtttaatggtgatgcctcgcgtacaggatctggttacctgtgcagttgtgaatacccagaggttgggcagatcagtgtctctagtcctacccagttttaaagttcatggtaagatttgacctcatctcccgcaaataaatgtattggtgatttgga

SEQ ID NO: 179504 - DNA, 1959 bp, Artificial Sequence
  derived and/or modified sequence
gtgacctcgccgccgggcgccatgggagcttcggacccggaagtggcgccctgggctcgcggcggtgccgcggggatggcgggagccggagctggagccggagctcgcggcggagcggcggcgggggtcgaggctcgagctcgcgatccaccgcccgcgcaccgcgcacatcctcgccaccctcggcctgcggctcagccctcggcccgcaggatggatggcgggtcagggggcctggggtctggggacaacgccccgaccactgaggctcttttcgtggcactgggcgcgggcgtgacggcgctcagccatcccctgctctacgtgaagctgctcatccaggtgggtcatgagccgatgccccccacccttgggaccaatgtgctggggaggaaggtcctctatctgccgagcttcttcacctacgccaagtacatcgtgcaagtggatggtaagatagggctgttccgaggcctgagtccccggctgatgtccaacgccctctctactgtgactcggggtagcatgaagaaggttttccctccagatgagattgagcaggtttccaacaaggatgatatgaagacttccctgaagaaagttgtgaaggagacctcctacgagatgatgatgcagtgtgtgtcccgcatgttggcccaccccctgcatgtcatctcaatgcgctgcatggtccagtttgtgggacgggaggccaagtacagctgtcctgcggggccaccatcccaggaagctcagctgccatggtgcctcattttggggtcattaatgggaaattggcccattcccctagactgattatgagtggtgtgctgagctccattgggaagattttcaaagaggaagggctgctgggattcttcgttggattaatccctcacctcctgggcgatgtggttttcttgtggggctgtaacctgctggcccacttcatcaatgcctacctggtggatgacagcttcagccaggccctggccatccggagctataccaagttcgtgatggggattgcagtgagcatgctgacctaccccttcctgctagttggcgacctcatggctgtgaacaactgcgggctgcaagctgggctccccccttactccccagtggccagctcttccgaggctccagcctgcttttccgccgggtgtcatcaggatcatgctttgccctggagtaacctgaatcatctaaaaaacacggtctcaacctggccaccgtgggtgaggcctgaccaccttgggacacctgcaagacgactccaacccaacaacaaccagatgtgctccagcccagccgggcttcagttccatatttgccatgtgtctgtccagatgtggggttgagcgggggtggggctgcacccagtggattgggtcacccggcagacctagggaaggtgaggcgaggtggggagttggcagaatccccatacctcgcagatttgctgagtctgtcttgtgcagagggccagagaatggcttatgggggcccaggttggatggggaaaggctaatggggtcagaccccaccccgtctacccctccagtcagcccagcgcccatcctgcagctcagctgggagcatcattctcctgctttgtacatagggtgtggtcccctggcacgtggccaccatcatgtctaggcctatgctaggaggcaaatggccaggctctgcctgtgtttttctcaacactacttttctgatatgagggcagcacctgcctctgaatgggaaatcatgcaactactcagaatgtgtcctcctcatctaatgctcatctgtttaatggtgatgcctcgcgtacaggatctggttacctgtgcagttgtgaatacccagaggttgggcagatcagtgtctctagtcctacccagttttaaagttcatggtaagatttgacctcatctcccgcaaataaatgtattggtgatttgg

SEQ ID NO: 179505 - DNA, 2006 bp, Artificial Sequence
  derived and/or modified sequence
cccgccgcaccacgctcccgagctcccccgcggcctggagtggtgcgccccggccccgccccctgacgccggtgagggggcgtggccccgtcacgtgacggggagtgacctcgccgccgggcgccatgggagcttcggacccggaagtggcgccctgggctcgcggcggtgccgcggggatggcgggagccggagctggagccggagctcgcggcggagcggcggcgggggtcgaggctcgagctcgcgatccaccgcccgcgcaccgcgcacatcctcgccaccctcggcctgcggctcagccctcggcccgcaggatggatggcgggtcagggggcctggggtctggggacaacgccccgaccactgaggctcttttcgtggcactgggcgcgggcgtgacggcgctcagccatcccctgctctacgtgaagctgctcatccaggtgggtcatgagccgatgccccccacccttgggaccaatgtgctggggaggaaggtcctctatctgccgagcttcttcacctacgccaagtacatcgtgcaagtggatggtaagatagggctgttccgaggcctgagtccccggctgatgtccaacgccctctctactgtgactcggggtagcatgaagaaggttttccctccagatgagattgagcaggtttccaacaaggatgatatgaagacttccctgaagaaagttgtgaaggagacctcctacgagatgatgatgcagtgtgtgtcccgcatgttggcccaccccctgcatgtcatctcaatgcgctgcatggtccagtttgtgggacgggaggccaagtacagtggtgtgctgagctccattgggaagattttcaaagaggaagggctgctgggattcttcgttggattaatccctcacctcctgggcgatgtggttttcttgtggggctgtaacctgctggcccacttcatcaatgcctacctggtggatgacagcttcagccaggccctggccatccggagctataccaagttcgtgatggggattgcagtgagcatgctgacctaccccttcctgctagttggcgacctcatggctgtgaacaactgcgggctgcaagctgggctccccccttactccccagtgttcaaatcctggattcactgctggaagtacctgagtgtgcagggccagctcttccgaggctccagcctgcttttccgccgggtgtcatcaggatcatgctttgccctggagtaacctgaatcatctaaaaaacacggtctcaacctggccaccgtgggtgaggcctgaccaccttgggacacctgcaagacgactccaacccaacaacaaccagatgtgctccagcccagccgggcttcagttccatatttgccatgtgtctgtccagatgtggggttgagcgggggtggggctgcacccagtggattgggtcacccggcagacctagggaaggtgaggcgaggtggggagttggcagaatccccatacctcgcagatttgctgagtctgtcttgtgcagagggccagagaatggcttatgggggcccaggttggatggggaaaggctaatggggtcagaccccaccccgtctacccctccagtcagcccagcgcccatcctgcagctcagctgggagcatcattctcctgctttgtacatagggtgtggtcccctggcacgtggccaccatcatgtctaggcctatgctaggaggcaaatggccaggctctgcctgtgtttttctcaacactacttttctgatatgagggcagcacctgcctctgaatgggaaatcatgcaactactcagaatgtgtcctcctcatctaatgctcatctgtttaatggtgatgcctcgcgtacaggatctggttacctgtgcagttgtgaatacccagaggttgggcagatcagtgtctctagtcctacccagttttaaagttcatggtaagatttgacctcatctcccgcaaataaatgtattggtgatttgga

SEQ ID NO: 179506 - DNA, 602 bp, Artificial Sequence
  derived and/or modified sequence
atgcagtgtgtgtcccgcatgttggcccaccccctgcatgtcatctcaatgcgctgcatggtccagtttgtgggacgggaggccaagtacagctgtcctgcggggccaccatcccaggaagctcagctgccatggtgcctcattttggggtcattaatgggaaattggcccattcccctagactgattatgagtggtgtgctgagctccattgggaagattttcaaagaggaagggctgctgggattcttcgttggattaatccctcacctcctgggcgatgtggttttcttgtggggctgtaacctgctggcccacttcatcaatgcctacctggtggatgacagcttcagccaggccctggccatccggagctataccaagttcgtgatggggattgcagtgagcatgctgacctaccccttcctgctagttggcgacctcatggctgtgaacaactgcgggctgcaagctgggctccccccttactccccagtgttcaaatcctggattcactgctggaagtacctgagtgtgcagggccagctcttccgaggctccagcctgcttttccgccgggtgtcatcaggatcatgctttgcc

SEQ ID NO: 179507 - DNA, 1092 bp, Artificial Sequence
  derived and/or modified sequence
atggacggcggcagcggcggcctgggcagcggcgacaacgcccccacgaccgaggcgctattcgtggcactgggcgctggcgtgacagccctcagtcaccctctgctgtacgtaaagttactgattcaagtgggccatgaacccatgcctccaacattgggcacaaacgttcttgggcggaaagtcctgtacctgccctcatttttcacgtacgctaagtatatcgtccaggtggatggcaagatcggcctgtttcgtggcctgtctccaaggctgatgtcgaatgcactttcaactgtgacaagaggttctatgaaaaaggtcttcccacccgatgaaatcgagcaagtatctaataaagatgatatgaagaccagcctcaaaaaggtggtcaaagaaacctcctatgaaatgatgatgcagtgcgtttctagaatgcttgctcatccgctccacgttatctcaatgcgctgcatggtgcagttcgttggccgggaggcgaaatatagcggagtgttgagttccatcggcaaaatatttaaagaagaggggctgctcggcttctttgtgggtctgatccctcacctgttgggcgacgtggtgttcttgtgggggtgcaacctcttagcacacttcatcaacgcctatctggttgatgattctttttcccaggcactagcaatccggagttatactaagttcgttatgggtatagctgtcagcatgctaacttaccccttcctgttggtgggagacctaatggcagtgaacaactgcgggttacaagccggcctgccgccctactcaccagtgtttaaatcatggatccactgctggaaatatctgtctgtgcagggacagctgtttcgcggaagtagttgcttcagcgccggatgccaccaagatcacgctctgccttggagtaatcttaaccatcttaaaaatacagtctctacatggccaccttgggtgcgccctgaccacctaggtacaccagctcggagactgcaacctaacaataatcagatgtgttctagtcccgccggcctccagtttcacatctgccacgtgtctgtccaaatgtggggttag

SEQ ID NO: 179508 - DNA, 1119 bp, Artificial Sequence
  derived and/or modified sequence
atgggcgccagcgaccccgaggtggccccctgggcccggggcggcgccgcaggaatggccggagcaggggcgggcgctggcgcgagagggggagccgctgcaggggttgaggcacgcgcgagggatccacctcccgcccatagggctcaccctcgacatcccagacccgctgcacaacccagcgccaggaggatggacggcggctccgggggactgggttcgggagacaatgctcccacaacagaggcactgttcgtcgctctgggcgcgggagtgaccgccctgagccatccgctgctgtacgtgaagttactcatacaagtgggccacgaacctatgcctcctacactcggaactaacgtgctggggcggaaagtcctttatctaccaagctttttcacctatgctaagtacatcgtgcaagtggacggcaaaataggtctgttccgcggactcagcccccggctcatgtcgaacgccctcagcactgtaaccagaggaagcatgaaaaaagtcttcccacctgacgagatcgaacaggtgtccaataaagatgatatgaaaacctcactcaagaaggtcgtgaaggagactagttacgagatgatgatgcagtgtgtgagcaggatgctggctcacccactccacgttatcagcatgaggtgcatggtgcagtttgttgggagggaagcaaagtacagcggggttctgtcgtccatcggcaagatctttaaggaggaaggattattgggttttttcgtaggtctcattccccacttactgggggacgtcgtctttctttggggatgcaacttgctcgctcatttcatcaatgcttatctggtggacgattcattcagtcaggccctggccatacgatcttacaccaagttcgtgatgggaatcgctgtgtccatgctcacctatccattcctgttagtcggggatctgatggccgtgaataattgcgggctgcaagctggccttcccccgtactcccccgtatttaagagctggatccactgctggaagtacctgtcagtgcagggccagctcttcaggggctccagtctcctcttcaggagagtgtctagcggctcctgtttcgccctcgagtag

SEQ ID NO: 179509 - DNA, 606 bp, Artificial Sequence
  derived and/or modified sequence
tgagccgtgtgcgtgccccacgtgggccccccccccgcctgccacttaaatgccctccacggacctgtgtgcggcacaggagggcaggtgcagctgagttgtggagctaccatccctgggagctccgctgctatggttccgcacttcggggttatcaacggcaaactggcacacagcccccgtctgattatgagtggggttttaagtagcattgggaaaatttttaaagaggaaggcctgctcggttttttcgtgggcctgatcccgcatctgctgggggatgtggtgtttttatggggctgcaatctgttggcccactttatcaatgcgtacctggtggacgactctttctcccaggccttggctatccgtagctataccaagttcgtaatgggtatagcagtgagtatgctgacgtacccctttctgttggtgggtgacctcatggctgtcaataactgtgggctgcaggcaggactccctccttactcacccgtcttcaaatcatggatacactgttggaagtatctcagcgtacaggggcagttgttccggggctcatccctgctatttcggcgtgtttccagcggatcttgttttgcttag

SEQ ID NO: 179510 - DNA, 1092 bp, Artificial Sequence
  derived and/or modified sequence
atggatggaggtagcggaggactcggaagtggagataacgcccctacgactgaggccctcttcgtcgcattgggagccggagttactgctctctcccatcctctcctttatgttaagctcttaatccaggtggggcacgaacctatgcctcctactctagggacaaatgtcctcggcagaaaggtgctttacctgcccagcttcttcacatatgctaaatatatcgttcaggtcgatggtaaaataggcctgtttcgcggactgtctccccgactgatgagcaatgccttgtccactgtcaccaggggttcaatgaagaaggttttccccccagatgaaatagaacaagtgagcaataaggacgacatgaaaacgagtcttaaaaaggttgttaaagaaacttcttacgagatgatgatgcagtgcgtgagcaggatgctagctcacccactccacgtcatttccatgcggtgcatggtgcagttcgttggcagggaggccaaatactcaggggttctttcgagcatcggcaagattttcaaagaggaagggctcctaggatttttcgtcggcctgataccacatttgttgggagatgtcgttttcttgtggggctgtaatctgctcgcacacttcatcaatgcatacctcgtagatgatagcttcagtcaggccctcgccatcagatcttatacgaagtttgtgatgggaatagctgtctctatgctgacttatccgttcctcctggtgggggatctcatggccgtcaacaactgcggcctgcaggcgggactgccaccttatagtccagtgttcaagtcctggattcattgctggaaatatctgtctgtgcaaggccagctgtttcggggttcatcctgcttcagcgctggatgccaccaagatcatgcactgccatggagtaatctaaaccatctgaagaatactgtgtctacatggcccccttgggtgcggcctgaccatctgggcacaccggctcgtcggctgcagcctaataataaccaaatgtgtagctctcccgctgggcttcagtttcacatttgtcacgtgtccgtccaaatgtgggggtag

SEQ ID NO: 179511 - DNA, 1119 bp, Artificial Sequence
  derived and/or modified sequence
atgggtgcttctgacccggaagtggctccatgggccagaggtggcgctgctggcatggcaggagctggggctggcgctggggctcgcggaggcgctgccgcaggtgtggaggcacgagcccgagaccccccacctgctcaccgggctcacccacggcaccctcgaccagctgcccagccatccgcgaggagaatggatggcggtagtggcggactgggctctggcgataacgcccctaccactgaggcactcttcgtggcattgggagctggtgtaaccgcactctcacaccctctcctatacgtgaagttactgatccaggtgggccacgagccgatgccacccacactgggcacaaatgttctcgggaggaaagtgctatacctgccctccttcttcacatatgcaaaatacatcgtgcaggtggacggaaaaattgggctgttcaggggcctctcaccccgactcatgagcaacgccctgagtaccgtgacgaggggctccatgaaaaaggtgttccctccagacgagatcgagcaggtctctaataaagatgatatgaaaacgtcgcttaagaaggtggttaaggaaacatcgtatgaaatgatgatgcaatgcgtcagtcggatgttggcccaccccctacacgtcataagtatgagatgcatggtacagtttgttggaagggaagctaagtattcgggagtgctcagttccattgggaagattttcaaagaggaaggcctcctgggcttcttcgtggggttgattcctcatctgctaggggatgtggtattcctctggggctgtaatttgctcgcccatttcattaatgcctacctagtagacgattctttttctcaggcactggctatcaggagttacaccaagtttgtgatggggatcgccgtgtcaatgctgacatatccctttctgctggtcggcgatctgatggccgtcaataactgcggtttgcaggccggtttgcccccttacagtcctgtatttaaatcttggatccattgctggaaatacctaagcgttcaggggcagctttttaggggctcctcactacttttccggagggtgagcagtggttcctgctttgctctggagtag

SEQ ID NO: 179512 - DNA, 606 bp, Artificial Sequence
  derived and/or modified sequence
tgagcggtctgcgtgcctcatgtagggcctccccctgcgtgtcacctcaatgctttgcacggcccagtgtgcggaactggtggtcaggtacaactgagttgtggggctacaatacctggctcatctgccgcaatggtcccccacttcggtgttataaacggaaagctggctcactcacctcgtttgatcatgtctggcgttctgtcgagcattggtaaaatcttcaaggaagagggcttgctaggctttttcgtgggcctcataccccacttattaggggatgttgtgttcctctggggctgcaatttactggcacacttcattaacgcctacctggtggacgactcctttagccaggccctggccatccgctcctacaccaagttcgtgatgggtattgctgtcagtatgctgacctaccccttcctgttggtgggggatctgatggccgtcaataactgtggattgcaggcaggccttcctccgtattctcctgtattcaagtcatggatacattgttggaagtacttatccgtgcaagggcagttgtttaggggctcctccctcctttttcgccgtgtttcttcagggtcttgctttgcctag

SEQ ID NO: 179513 - protein, 303 aa, Artificial Sequence
  derived and/or modified sequence
MADAASQVLLGSGLTILSQPLMYVKVLIQVGYEPLPPTIGRNIFGRQVCQLPGLFSYAQHIASIDGRRGLFTGLTPRLCSGVLGTVVHGKVLQHYQESDKGEELGPGNVQKEVSSSFDHVIKETTREMIARSAATLITHPFHVITLRSMVQFIGRESKYCGLCDSIITIYREEGILGFFAGLVPRLLGDILSLWLCNSLAYLVNTYALDSGVSTMNEMKSYSQAVTGFFASMLTYPFVLVSNLMAVNNCGLAGGCPPYSPIYTSWIDCWCMLQKEGNMSRGNSLFFRKVPFGKTYCCDLKMLI

SEQ ID NO: 179514 - DNA, 912 bp, Artificial Sequence
  derived and/or modified sequence
atggctgacgctgccagtcaggtccttttggggtctgggctcactatcctgagccaaccgctcatgtatgtcaaggtgcttatccaagtcggctatgagcccctgccaccgacaatcggacgcaacatttttggccggcaagtttgccagttacccggcctgttcagctacgcccaacatatcgcgtctatagatgggcggcggggactcttcacaggcttgacccctcggctctgttcaggtgtactggggaccgtcgtgcatggtaaagttctccagcattatcaagagagtgacaaaggagaggaactcggaccaggtaatgtgcagaaagaagtgtcatcaagtttcgaccacgttattaaggagactactagagagatgattgcaagatcagctgcgaccctcatcacccatccattccatgtgattactttacgtagtatggttcagtttattggccgcgagagcaaatattgcggcctgtgcgactccatcatcactatatatcgggaagagggaattctcggttttttcgcaggactggttcctcggctattgggtgatatcctaagcctgtggctctgtaatagtcttgcgtacttagtcaacacctacgcattggacagcggcgtgtcaaccatgaatgagatgaaatcgtacagccaagcggtcacgggatttttcgcctccatgctgacttacccgtttgttctcgtgagtaatctgatggctgttaataactgtggcttggcagggggttgtccaccttactcaccaatttacacaagttggattgactgctggtgcatgctgcagaaggaggggaatatgagtcgaggcaatagtcttttcttcagaaaggtcccatttggtaaaacatactgttgtgacctgaagatgctgatctag

SEQ ID NO: 179515 - DNA, 912 bp, Artificial Sequence
  derived and/or modified sequence
atggctgatgctgccagccaggtgctgctgggcagcggcctgaccatcctgagccagcccctgatgtatgtgaaggtgctgatccaggtgggctatgagcccctgccccccaccatcggcaggaacatcttcggccggcaggtgtgccagctgcccggcctcttctcctatgcccagcacatcgccagcattgatggaagaagaggcctcttcaccggcctgaccccccggctgtgcagcggcgtgctgggcaccgtggtgcacggcaaggtgctgcagcactaccaggagagtgacaagggggaggagctgggccctggaaatgtgcagaaggaggtgagcagcagctttgaccacgtgatcaaggagaccacccgggagatgattgcccggtctgctgccaccctcatcacccaccccttccacgtgatcaccctgcgctccatggtgcagttcatcggccgggagagcaagtactgcggcctgtgtgacagcatcatcaccatctaccgggaggagggcatcctgggcttctttgctggcctggtgccccggctgctgggggacatcctgagcctgtggctgtgcaacagcctggcctacctggtgaacacctacgccctggacagcggcgtgtccaccatgaatgagatgaagagctacagccaggccgtgacaggcttctttgcctccatgctgacctacccctttgtgctggtgagcaacctgatggctgtgaacaactgtggcctggccggcggctgccccccctacagccccatctacacctcctggattgactgctggtgcatgctgcagaaggagggcaacatgagccggggcaacagcctcttcttcaggaaggtgccctttgggaagacctactgctgtgacctgaagatgctgatctag

SEQ ID NO: 179516 - DNA, 912 bp, Artificial Sequence
  derived and/or modified sequence
atggccgacgccgccagccaggtgctgctgggcagcggcctgaccatactcagccagccactaatgtacgtgaaagtactgatacaggtgggctacgaaccccttccaccgactatcggccgaaacatctttgggcgacaggtgtgtcaattaccagggttgttctcatatgcccaacacatcgcatccatcgacggccgccgaggtcttttcacagggttgacacccaggctatgcagcggcgtgctgggaaccgtcgttcacggaaaagtgctgcagcattaccaggaaagcgataagggggaagagctgggaccggggaacgtgcagaaagaagtcagctctagctttgatcacgttattaaagagaccacaagggaaatgattgctcggtccgctgcaaccctcatcactcaccccttccacgtgattacattacgaagtatggtgcagtttatcggccgcgagtcaaaatattgcggcctctgtgacagtatcataacgatttaccgcgaagaaggaatcctgggctttttcgctgggctggtgcctcgtctacttggcgatattttgtccctgtggctttgcaactcacttgcttatttggtgaatacttacgccctggactctggcgtgtcgactatgaacgagatgaagtcctatagtcaggctgttacggggttctttgcttcaatgctgacatacccatttgtgctagtaagtaacctgatggcagtgaataactgcggactggcggggggctgccctccctatagtcccatctatacgagctggattgactgttggtgcatgctgcaaaaagaggggaacatgagcagggggaacagcctgttctttcgcaaagtgccttttggcaaaacatattgctgcgacctgaaaatgctgatctag

SEQ ID NO: 179517 - DNA, 912 bp, Artificial Sequence
  derived and/or modified sequence
atggcggacgctgcaagccaggtcctgctgggatcagggttgactattctgtcccagccgttgatgtatgttaaagttcttatccaagtgggatatgaaccacttcctcccaccatcgggcgaaatatctttggccgacaggtgtgccagctcccgggattgtttagctatgcccagcacatagctagcatcgacgggagacgcggactttttaccggactgacccccaggctgtgcagtggagtgctcggcacggttgttcatggcaaagtccttcagcattatcaggaatccgataaaggtgaagagctgggcccaggtaatgtccaaaaggaggtgtcctcctcatttgatcacgtgattaaggagaccacgcgcgagatgattgctcgaagcgccgctacactgataactcaccccttccatgtgattacgctgagatccatggtgcagttcattggtcgagaaagcaagtattgtggactgtgcgactcaatcattactatttatcgcgaggaggggattttgggcttttttgccggtctggtgccgagattgcttggcgacatactgagtctctggctgtgcaatagtctcgcttatctggtaaatacatatgcccttgattctggagtgtcgactatgaacgaaatgaaatcctatagccaggccgttaccggatttttcgcctctatgctgacatacccgttcgtgctcgtttcaaacctgatggcggttaacaactgcgggctagccggtgggtgtccaccctatagcccaatatatacctcctggatagactgctggtgtatgctgcagaaagaaggcaatatgagcagggggaactccctctttttcaggaaggttcccttcggtaagacctactgctgtgatcttaagatgctcatctag

SEQ ID NO: 179518 - DNA, 912 bp, Artificial Sequence
  derived and/or modified sequence
atggccgacgccgccagccaggtgctgctgggcagcggcctgaccatcctgagccagcccctgatgtacgtgaaggtgctgatccaggtgggctacgagcccctgccccccaccatcggcagaaacatcttcggcagacaggtgtgccagctgcccggcctgttcagctacgcccagcacatcgccagcatcgacggcagaagaggcctgttcaccggcctgacccccagactgtgcagcggcgtgctgggcaccgtggtgcacggcaaggtgctgcagcactaccaggagagcgacaagggcgaggagctgggccccggcaacgtgcagaaggaggtgagcagcagcttcgaccacgtgatcaaggagaccaccagagagatgatcgccagaagcgccgccaccctgatcacccaccccttccacgtgatcaccctgagaagcatggtgcagttcatcggcagagagagcaagtactgcggcctgtgcgacagcatcatcaccatctacagagaggagggcatcctgggcttcttcgccggcctggtgcccagactgctgggcgacatcctgagcctgtggctgtgcaacagcctggcctacctggtgaacacctacgccctggacagcggcgtgagcaccatgaacgagatgaagagctacagccaggccgtgaccggcttcttcgccagcatgctgacctaccccttcgtgctggtgagcaacctgatggccgtgaacaactgcggcctggccggcggctgccccccctacagccccatctacaccagctggatcgactgctggtgcatgctgcagaaggagggcaacatgagcagaggcaacagcctgttcttcagaaaggtgcccttcggcaagacctactgctgcgacctgaagatgctgatctag

SEQ ID NO: 179519 - protein, 437 aa, Artificial Sequence
  derived and/or modified sequence
MGRRMRGAAATAGLWLLALGSLLALWGGLLPPRTELPASRPPEDRLPRRPARSGGPAPAPRFPLPPPLAWDARGGSLKTFRALLTLAAGADGPPRQSRSEPRWHVSARQPRPEESAAVHGGVFWSRGLEEQVPPGFSEAQAAAWLEAARGARMVALERGGCGRSSNRLARFADGTRACVRYGINPEQIQGEALSYYLARLLGLQRHVPPLALARVEARGAQWAQVQEELRAAHWTEGSVVSLTRWLPNLTDVVVPAPWRSEDGRLRPLRDAGGELANLSQAELVDLVQWTDLILFDYLTANFDRLVSNLFSLQWDPRVMQRATSNLHRGPGGALVFLDNEAGLVHGYRVAGMWDKYNEPLLQSVCVFRERTARRVLELHRGQDAAARLLRLYRRHEPRFPELAALADPHAQLLQRRLDFLAKHILHCKAKYGRRSGT

SEQ ID NO: 179520 - DNA, 2685 bp, Artificial Sequence
  derived and/or modified sequence
tacgccccggcgcgggcgcagccagtccggcttcctccaggcccccaagtcccggaccgagtgtggggccgcctctccctctcggaaggagccatcgccgctttaagtggaagaggagaggaagggggcgggggagcggggggcggggagcggaggcggaggagggggagggggatccccctggctcccacgtggtccgggcgcctgtgaatcgcgcccaccggagggtctcacagcgaaatacaaaagcagctgggaagcggcggggactcgagttcccagcgccgggcggagcgccggacagagccccgcagcgccccgcggccgcgatggggccgaagcgcccgaagccccggagcccacaaactgccgggcccgcctcgccgccgggacccgggtgcctgggctcggcttgaagcggcggcggcgcaccggcacagccgcgggagcatgggcaggaggatgcggggcgccgccgccaccgcggggctctggctgctggcgctgggctcgctgctggcgctgtggggagggctcctgccgccgcggaccgagctgcccgcctcccggccgcccgaagaccgactcccacggcgcccggcccggagcggcggccccgcgcccgcgcctcgcttccctctgcccccgcccctggcgtgggacgcccgcggcggctccctgaaaactttccgggcgctgctcaccctggcggccggcgcggacggcccgccccggcagtcccggagcgagcccaggtggcacgtgtcagccaggcagccccggccggaggagagcgccgcggtgcacgggggcgtcttctggagccgcggcctggaggagcaggtgcccccgggcttttcggaggcccaggcggcggcgtggctggaggcggctcgcggcgcccggatggtggccctggagcgcgggggttgcgggcgcagctccaaccgactggcccgttttgccgacggcacccgcgcctgcgtgcgctacggcatcaacccggagcagattcagggcgaggccctgtcttactatctggcgcgcctgctgggcctccagcgccacgtgccgccgctggcactggctcgggtggaggctcggggcgcgcagtgggcgcaggtgcaggaggagctgcgcgctgcgcactggaccgagggcagcgtggtgagcctgacacgctggctgcccaacctcacggacgtggtggtgcccgcgccctggcgctcggaggacggccgtctgcgccccctccgggatgccgggggtgagctggccaacctcagccaggcggagctggtggacctagtacaatggaccgacttaatccttttcgactacctgacggccaacttcgaccggctcgtaagcaacctcttcagcctgcagtgggacccgcgcgtcatgcagcgtgccaccagcaacctgcaccgcggtccgggcggggcgctggtctttctggacaatgaggcgggcttggtgcacggctaccgggtagcaggcatgtgggacaagtataacgagccgctgttgcagtcagtgtgcgtgttccgcgagcggaccgcgcggcgcgtcctggagctgcaccgcggacaggacgccgcggcccggctgctgcgcctctaccggcgccacgagcctcgcttccccgagctggccgcccttgcagacccccacgctcagctgctacagcgccgcctcgacttcctcgccaagcacattttgcactgtaaggccaagtacggccgccggtctgggacttagtgtcaccgggaggaaaagagagagatctggggctggggtatggatgatggggggaagggcggtcgcctctgccactgtcagggaccagccggccaacgcccacccgcaaaggtgtctaaaaacttcagcttttcacccacctgcccctttctttcaatcccacgctgtttcctttcaaagttctgggaggacgaactcaccgaggcgagaagtgtaacattctctccacccagcttataaaaggattctttactgtgccagcacggggattggatccgaagaaactggctactggggtttggcccccgagtggccgtccctgtgggagatgcaccccattcttgggccccccctcattccctttccgaaaaaggaaaacttgcgtttgagccgttgagctaattctgcaattttctaccaaacagagcgctggtggccccggagcagggctgtgacattggctggtggagcccccttcctgtgttctccctttgttccagcgccgcgatggtgagatcactgttccaagcagggggacggctcgcgataggacaaagagagcaggacctccagactctggggagccctgcagaccttgacaatttgcctgactcattcctgacctcttgtcattttggcctgaaggctacaaattcagggtcagctgtatgcactaagtcaaataatgaatttcttcctccctctcgcaaccgaccaaaattttgacaacgatgatgttcaccagaaggaaaaaaaaaaatcagttttatgcactttattttgttttgattttcattttttattaagaaaaaattttattttacagaatttaccttctctgtatatatgtgcataaagtgtggtgtaaatatactaaacaaacttatatttcaataaaagggagtttaaaatttataattt

SEQ ID NO: 179521 - DNA, 1314 bp, Artificial Sequence
  derived and/or modified sequence
atgggccgaagaatgcgcggtgccgctgcaaccgcgggcttatggcttctggcgctgggatcccttctggccctatggggtggtttgctgccacctcgaactgagctgccagcttccagacccccggaagatcggctccctaggcggccggctcgatcgggcggaccagcccctgcccctagatttccattaccaccacccctagcttgggatgcccgcggagggtctctcaaaacctttcgcgcgttgctgactctcgccgcgggcgccgatggaccccccaggcagtctagaagcgaaccccggtggcatgtgtccgcacggcagccccggcccgaggaaagtgccgctgtgcacgggggagtgttttggtctcgtggccttgaagagcaagttcccccaggatttagtgaagctcaggccgccgcctggttagaggcggcgagaggcgcgaggatggtggcattagaacgtgggggctgtggcaggagcagcaacaggttagcaaggttcgcggacggcaccagggcctgtgtgaggtatggaatcaacccagagcaaatacagggcgaagctctgtcctactacttagctcgcctcctcggtttgcagcgtcatgtgccaccactggcattggcgagggttgaggcccggggtgcccaatgggcgcaagttcaggaggagctgcgggccgcacattggacagagggatctgtcgtgtctctgacccggtggctgccaaacttaactgatgtcgtggtgcccgcaccttggcggtctgaggatggacgtctgagacccctacgggatgccggcggggagctggcgaatctctcgcaggccgagctggtagatttggtgcagtggactgacctcattctgttcgattatctgacagctaatttcgatcgactggtgtccaacttgttcagtctgcaatgggatcctagggtgatgcagcgtgctacatccaatctacatagaggacccggcggagcactggtgtttctagacaatgaggccggactcgttcacggatatcgtgtggcagggatgtgggataaatacaacgagcctctgcttcagagtgtgtgcgtgtttcgggagcgcaccgccaggcgcgttctggaattacatcgtggacaagacgccgcggctcggctgctgcgcctgtatcgccgccatgagccgagattccctgaactggccgctcttgccgacccacatgcacaactcctgcagaggagattagattttctggccaaacatatcctccattgtaaggcaaaatacgggcgcagaagtggtacttag

SEQ ID NO: 179522 - DNA, 1314 bp, Artificial Sequence
  derived and/or modified sequence
atgggccgcaggatgagaggagctgctgccacagctggcctgtggctgctggccctgggcagcctgctggccctgtggggcggcctgctgccccccaggacagagctgcctgccagccggcccccagaagatcggctgccccggcggcctgcccggagcggcggccctgccccagccccccgcttccccctgcccccacccctggcctgggatgcccggggcggcagcctgaagaccttccgggccctgctgaccctggccgccggggctgatggccccccccggcagagccgctctgagccccgctggcacgtgtctgcccggcagcccaggcctgaggagagcgctgctgtgcatggaggagtcttctggagccggggcctggaggagcaggtgcccccaggcttcagcgaggcccaggccgccgcctggctggaggccgcccggggggccaggatggtggccctggagcggggcggctgcggccgcagcagcaaccggctggccaggtttgctgatggcacccgggcctgtgtgcgctatggcatcaaccctgagcagatccagggcgaggccctgagctactacctggcccggctgctgggcctgcagagacatgtgccccccctggccctggcccgggtggaggcccggggggcccagtgggcccaggtgcaggaggagctgcgggccgcccactggacagagggctctgtggtgtccctgacccgctggctgcccaacctgacagatgtggtggtgcctgccccctggaggagtgaagatggccgcctgcggcccctgagagatgctggaggagagctggccaacctgagccaggccgagctggtggacctggtgcagtggacagacctgatcctgtttgactacctgacagccaactttgaccggctggtgagcaacctcttcagcctgcagtgggacccccgggtgatgcagagggccaccagcaacctgcaccggggccctgggggcgccctggtgttcctggacaatgaagctggcctggtgcacggctacagagtggccggcatgtgggacaagtacaatgagcccctgctgcagagcgtgtgtgtgttccgggagaggacagccaggagagtgctggagctgcaccggggccaggatgctgctgcccggctgctgcggctgtacagaagacatgagccccgcttccctgagctggccgccctggccgacccccacgcccagctgctgcagaggcggctggacttcctggccaagcacatcctgcactgcaaggccaagtatggaagaagaagtggcacctag

SEQ ID NO: 179523 - DNA, 1314 bp, Artificial Sequence
  derived and/or modified sequence
atgggccggcggatgcggggcgccgccgccaccgccggcctgtggctgctcgcactggggagtctgttagctctgtggggtggcctgctgcccccgaggaccgagctaccggcatctcggccaccagaggacagactgcctagacgaccagcccggtccggtggacccgcacccgcacccaggtttcctttacctcctccactggcctgggacgctagggggggatctctgaaaacctttagggcactcctaacactggccgccggggcagacggaccccccagacagagtcgctcagaacccagatggcacgtcagcgcccggcagccacgcccagaagagtccgccgctgtacatggcggagtgttctggtcacggggccttgaagagcaagttcctcctggattctcagaggcccaggcagccgcgtggttagaagctgcaaggggggctcggatggtggccctcgagcgagggggatgtggacgctcctcaaatcgcctggcacgcttcgcagatggtactcgcgcttgtgtgcgatacggtattaaccctgagcagattcagggcgaagctttatcttactacctggcacgtctcctgggcctccagcgacacgttcccccattagccttggcacgtgtagaagcaaggggtgcccaatgggctcaggtgcaggaagagctgagagcagcgcactggacagagggatccgttgtgagccttacaagatggttacccaacttgacagatgttgtggtgcccgcaccctggcgcagcgaagatggcagactgcgccccctcagggacgcaggaggagagcttgcgaatttaagccaagctgaactcgtggacctcgtacaatggacggatctgattctctttgactatctgacagctaactttgaccggttggtctcgaatctgttctctcttcagtgggatcccagggtcatgcagagagccactagcaatctgcacagaggtcctggaggggcactggtttttttggataatgaagccggacttgttcatggctacagggtggccgggatgtgggataaatataacgaacctctcttgcaatccgtatgtgtgtttcgcgagcgcacagcgcgcagagtcttagagttgcacaggggccaagatgccgcagcccggctccttcggctgtacagacggcatgagccccgctttcctgaattggctgcgctggccgaccctcacgcacagctgctccagcgaaggctggatttccttgcaaaacatatactgcattgcaaggcaaaatacggtcggcgttcaggaacctag

SEQ ID NO: 179524 - DNA, 1314 bp, Artificial Sequence
  derived and/or modified sequence
atgggtcgtagaatgcggggagctgccgctacagccggactgtggttgctggctctggggtctctgttagccctgtgggggggtctgctgcccccacggaccgagctccccgcaagccggccacctgaggaccggctgcccagaagacctgccagatctggcggacctgcccctgcccctaggttccccctgccccctccgttggcctgggatgctcgagggggatccctgaagacttttcgggcactacttaccttggctgcgggtgctgacggacctcctcggcagtcgagaagcgagccgagatggcatgtgagcgccagacaaccccgtccagaagaatccgccgcagtacacggaggcgtgttttggtcccgaggactggaggaacaggtgcccccaggcttttccgaagcccaggcagcggcttggttggaggctgctaggggggcaagaatggtggccctggaacgtggaggctgtggcaggagtagcaatcgacttgccagatttgccgatggtacccgcgcatgcgtgagatatggcatcaaccctgaacagattcagggggaagcactgagttactacctggcaaggcttctgggcttacagagacacgtaccaccccttgcccttgcaagagtggaggcacgtggtgctcagtgggcgcaagtgcaggaggagctgcgcgcagcacattggacagaaggctctgtcgtgtcactcacgcgctggttacccaatttgaccgacgtcgtcgtgccagctccatggcggtccgaggatgggaggttaaggccactacgcgacgcaggcggagaattggcgaatttatcgcaggccgagctggtcgatctggtgcagtggacagacctcatcctgtttgattatctaaccgcaaactttgatcgactcgtctctaacctgtttagcctgcagtgggatccaagggtaatgcagagagctacatccaacctgcatcgcggacctgggggagccttggtgtttctggacaatgaagccggacttgtgcacggttatcgcgtggcaggcatgtgggacaaatataatgagccacttcttcagagtgtgtgcgtattccgcgagagaaccgcccgaagggtgttagagttacaccgcggtcaagatgcggcagcacgtctgttgaggctctatcggaggcacgagccaagatttccagaactggccgctctggcagatcctcacgctcagttgctgcagagacgcctggatttcctggccaagcacattctccattgcaaggctaaatatggaaggaggtctgggacctag

SEQ ID NO: 179525 - DNA, 1314 bp, Artificial Sequence
  derived and/or modified sequence
atgggcagaagaatgagaggcgccgccgccaccgccggcctgtggctgctggccctgggcagcctgctggccctgtggggcggcctgctgccccccagaaccgagctgcccgccagcagaccccccgaggacagactgcccagaagacccgccagaagcggcggccccgcccccgcccccagattccccctgcccccccccctggcctgggacgccagaggcggcagcctgaagaccttcagagccctgctgaccctggccgccggcgccgacggcccccccagacagagcagaagcgagcccagatggcacgtgagcgccagacagcccagacccgaggagagcgccgccgtgcacggcggcgtgttctggagcagaggcctggaggagcaggtgccccccggcttcagcgaggcccaggccgccgcctggctggaggccgccagaggcgccagaatggtggccctggagagaggcggctgcggcagaagcagcaacagactggccagattcgccgacggcaccagagcctgcgtgagatacggcatcaaccccgagcagatccagggcgaggccctgagctactacctggccagactgctgggcctgcagagacacgtgccccccctggccctggccagagtggaggccagaggcgcccagtgggcccaggtgcaggaggagctgagagccgcccactggaccgagggcagcgtggtgagcctgaccagatggctgcccaacctgaccgacgtggtggtgcccgccccctggagaagcgaggacggcagactgagacccctgagagacgccggcggcgagctggccaacctgagccaggccgagctggtggacctggtgcagtggaccgacctgatcctgttcgactacctgaccgccaacttcgacagactggtgagcaacctgttcagcctgcagtgggaccccagagtgatgcagagagccaccagcaacctgcacagaggccccggcggcgccctggtgttcctggacaacgaggccggcctggtgcacggctacagagtggccggcatgtgggacaagtacaacgagcccctgctgcagagcgtgtgcgtgttcagagagagaaccgccagaagagtgctggagctgcacagaggccaggacgccgccgccagactgctgagactgtacagaagacacgagcccagattccccgagctggccgccctggccgacccccacgcccagctgctgcagagaagactggacttcctggccaagcacatcctgcactgcaaggccaagtacggcagaagaagcggcacctag

SEQ ID NO: 179526 - protein, 2279 aa, Artificial Sequence
  derived and/or modified sequence
MYRSSARSSVSSHRPKDDGGGGPRSGRSSGSSSGPARRSSPPPPPSGSSSRTPARRPRSPSGHRGRRASPSPPRGRRVSPSPPRARRGSPSPPRGRRLFPPGPAGFRGSSRGESRADYARDGRGDHPGDSGSRRRSPGLCSDSLEKSLRITVGNDHFCVSTPERRRLSDRLGSPVDNLEDMDRDDLTDDSVFTRSSQCSRGLERYISQEEGPLSPFLGQLDEDYRTKETFLHRSDYSPHISCHDELLRGTERNREKLKGYSIRSEERSREAKRPRYDDTVKINSMGGDHPSFTSGTRNYRQRRRSPSPRFLDPEFRELDLARRKREEEEERSRSLSQELVGVDGGGTGCSIPGLSGVLTASEPGYSLHRPEEVSVMPKKSILKKRIEVDIMEPSMQLESFSSSTSSSQDHPLYSGHPSLPLSGAIAAFASEIENKGTMVETALKEPQGNLYQWGPLPGIPKDNSPLREKFGSFLCHKDNLDLKAEGPERHTDFLLPHERASQDGSGFSRILSMLADSTSTQEKRRRSFPDIEDEEKFLYGDEEEDLKAESVPKPLGSSESEVMRQKASSLPSSAPAVKLESLEETNPEYAKIHDLLKTIGLDIGVAEISQLAARTQERLHGKKPSLRSSADRRSSVDRYFSADHCSSVDHRFSADRCSSVDHCFSADRRSSDPHRLESREAHHSNTHSPEVSHPHPPSPVDPYLLTKNSPPFLKSDHPVGHISGPEVVGSGFQSSVAVRCMLPSAPSAPIRLPHTAALSQFHMPRASQFAAARIPPNYQGPAIPPASFDAYRHYMAYAASRWPMYPTSQPSNHPVPEPHRIMPITKQATRSRPNLRVIPTVTPDKPKQKESLRGSIPAAQVPVQVSIPSLIRYNPEKISDEKNRASQKQKVIEEREKLKNDREARQKKMYYLRTELERLHKQQGEMLRKKRREKDGHKDPLLVEVSRLQDNIMKDIAELRQEAEEAEKKQSELDKVAQILGINIFDKSQKSLSDSREPTEKPGKAEKSKSPEKVSSFSNSSSNKESKVNNEKFRTKSPKPAESPQSATKQLDQPTAAYEYYDAGNHWCKDCNTICGTMFDFFTHMHNKKHTQTLDPYNRPWASKTQSEAKQDAIKRTDKITVPAKGSEFLVPISGFYCQLCEEFLGDPISGEQHVKGHQHNEKYKKYVDENPLYEERRNLDRQAGLAVVLETERRRQSELKRKLSEKPKEEKKEKKAKAVKEVKEDDKVSEKLEDQLSEGRNSPEKAENKRNTGIKLQLKEEVKKESPTSSSFGKFSWKKPEKEEEKSSLVTPSISKEEILESSKDKEDGKTEAGKAKPIKIKLSGKTVVAHTSPWMPVVTTSTQTKIRPNLPIPSTVLRKSCSATMSKPAPLNTFLSIKSSGTTAKPLPVVKESSADLLLPPDIISKAFGGEEVILKGSPEEKVVLAEKSEPSHLPEQILPPPPPPPPPPPPPPPVIPHPAAPSAAQANAILAPVKSNPVVSQTLSPGFVGPNILNPVLPVAIMASAQPAAIPSDETAPGVSESDRDQTLFSVLVRPPPPLSSVFSEQAKKLEKRNSCLATANAKDLYDIFYSSGGKGAPETKGAPETKLSGGPLANGENSNLSRTKSSDTSSTSPLNSSASQEELHQDEGLVAAPIVSNSEKPIAKTLVALGKWSVVEHVGPKSTGSTYGFLQPLTRLCQSRPYETITPKTDTLAIWTSSSFQSDTSRDISPEKSELDLGEPGPPGVEPPPQLLDIQCKESQKLVEIHLRESVNQDKESQELRKSEDCRESEIETNTELKERVKELSEGIVDEGVSTSIGPHSIDDSNLNHGNRYMWEGEVKQPNLLMIDKEAEQSNKLMTGSETPSKVVIKLSPQACSFTKAKLDSFLSEARSLLNPQDTPVKISAPELLLHSPARSAMCLTGSPQEQGVSVVSEEGLENSAPESASRTSRYRSLKLKRERSKDFQVKKIYELAVWDENKKRPETWESPEKPKTEALELQDVHPELTVTIESKALEDFEATDLKVEELTALGNLGDMPVDFCTTRVSPAHRSPTVLCQKVCEENSVSPIGCNSSDPADFEPIPSFSGFPLDSPKTLVLDFETEGERNSPNPRSVRIPSPNILKTGLTENVDRGLGGLEGTHQALDLLAGGMMPEEVKESSQLDKQESLGLELKTINSAGLGPSPCLPDLVDFVTRTSGVQKDKLCSPLSEPGDPSKCSSLELGPLQLEISNASTTEVAILQVDDDSGDPLNLVKAPVSRSPPREQVIEDNMVPQGMPEQETTVGAIQDHTESSVHN

SEQ ID NO: 179527 - DNA, 8021 bp, Artificial Sequence
  derived and/or modified sequence
ctgcggcggcgcgctccgagcctgcgtctagggcgcccccgggtcagagctgtcgccgtggccgccgctgcaagaaccatgtaccgcagcagcgctcgctcctccgtctcttcccaccggcctaaagacgacggcgggggcggcccgcgcagcggccgcagctctggctcctcctcaggcccggctcgccgcagctcaccgccgcctccgccctccggctcctcgtcgcggaccccggctcgccgaccccgctcgccctcagggcaccgcggccgccgggcctcgccgtccccgccacggggtcgtcgcgtctccccgtccccgcctcgggcccgtcgcggctccccgtcgccaccgcggggccgacgactcttcccgccgggcccggccggcttcagaggcagcagccggggggagtcccgcgccgactatgcccgggacggccgcggagaccatccaggcgacagcggcagccggagacgctctcctggtctgtgttctgactctttggaaaagagcttaaggatcactgttggcaatgaccacttctgtgttagcacaccagaacggcgacggcttagtgatcggctggggtcaccagtggataatctggaagacatggacagggatgacctgactgatgattctgtcttcactcgaagctcccagtgctctcggggtcttgagcgatatatttcccaggaggaagggcctctcagtcccttcttgggacaacttgatgaggactaccgaacaaaagaaactttcctgcatcgatctgattatagtccccatatcagttgtcatgatgagctgttgcggggaacagaacggaatcgagaaaaactcaaaggctactccatacgatctgaagaaaggagccgggaggccaaaagaccccgttatgatgacacagtgaagataaacagcatgggaggggatcacccaagttttacatcaggaactcgcaactatcgacagcgtagaagaagcccaagtcctaggtttctcgaccctgagtttcgagaactggatcttgccagacgaaagcgagaggaagaggaggagcgaagtaggagcttgagtcaggagctggttggagttgatggtggtggtactggctgttccatccctggattgtcaggtgtcctaacagcatcggagccaggatattctttgcatcggcctgaggaagtatctgtgatgcccaagaaatccattttgaagaagcggattgaggtggacataatggagccctccatgcagcttgagagtttttccagcagtaccagctccagccaggatcaccctctctactctgggcacccatcccttccactaagtggtgctattgctgcttttgcctcagagattgaaaacaaggggactatggtagagactgccttgaaggaacctcagggcaacctctaccaatggggtccccttcctgggattcccaaagacaacagtcctctcagagaaaaatttggaagttttctatgccacaaggataatttggatttgaaggctgagggacctgagcgacacacagacttcctgctgccccatgagagagctagccaggatggcagtggtttttcccgcattctgagcatgttggctgattctaccagtacacaggaaaaaaggcgacgtagctttcccgacattgaagatgaggagaaatttctctatggggatgaagaagaggatttaaaggcagaatccgtaccaaagccccttgggagctctgagagtgaagttatgaggcagaaggcaagctccctgccgtcttcagctccagctgtaaagctagaatcactagaagagaccaatccagaatatgcgaagatccatgacttgctcaagacaatagggctggatattggagtagcagagattagtcaattggctgcacgcacccaggaacgacttcatggcaagaagccatcattacgctcctcagctgaccgccgttcctcagttgaccgatacttttcagctgaccactgttcctcagttgaccaccgcttctcagctgaccgctgttcctcagttgaccactgcttctcagctgatcgacgttcctcagatccccacagactagagagcagggaggcacatcatagcaatacccactctccagaggtgtcccatccacacccaccttctcctgtggatccttacctgctcacaaaaaacagccctccattcctaaagtctgaccatccagtgggtcatatttcaggaccagaggtggttggtagtgggtttcagtcatctgttgcagtcaggtgcatgttgccatcagccccatctgccccaattagacttccacacactgctgctttatctcagtttcacatgccaagggcctctcagtttgctgcagctcggatacctccgaactaccagggacctgccattccccctgcctcttttgatgcctataggcactacatggcatatgcagcctccagatggcccatgtatcccacctctcaaccgtcaaaccaccctgtacctgaaccacacaggataatgccaataaccaaacaagctactcgtagccgtcccaatcttcgtgtgatccccactgtgactcctgataagcctaagcagaaagagtctctgcgaggctcaattcctgcggcccaagtgcctgtccaggtgtccattccatcactcataagatataatccagagaagatctctgatgagaagaaccgtgcttcccagaagcaaaaggttattgaagagagggaaaaactaaagaatgaccgggaagcccgccagaagaagatgtactatcttaggaccgagttagagcggcttcataaacaacaaggagaaatgctgcgcaagaaacgaagggagaaggatggccacaaagatcctctcttggtggaggtgagtcggcttcaggataacattatgaaggacattgcagagctacggcaagaggcagaagaggcagaaaagaagcaatctgaactggacaaagtggctcagatcttgggaattaacatcttcgataaatcccagaagtctttaagtgacagtagagagcctacagagaagcctgggaaagcagaaaaatctaagagcccagaaaaagtgtcatcgttctcaaactcctcctccaacaaggaatcaaaagtaaacaatgagaagtttcgtactaagagccccaagcctgccgaaagcccccagtcagccactaagcagttggatcagcccactgctgcttatgagtattatgatgctggcaatcactggtgcaaagactgcaacaccatctgtgggaccatgtttgatttcttcactcatatgcacaataagaagcacacacagacactggatccctacaacagaccttgggcttcaaagacccagagtgaggccaagcaagatgccataaagcgcactgacaagataactgttcctgcaaaaggctctgagtttctggttcccatcagtggattttattgccagctctgtgaggaatttttgggggatccaatttctggggagcaacatgtgaagggtcaccaacacaatgagaaatacaagaaatatgtggatgaaaacccattatatgaggagcggcggaatctggaccgccaagctggcttggctgtggtcctagagacagaacggcgacggcagagtgagctaaagcgcaaacttagtgagaaaccaaaggaggagaagaaagaaaaaaaggcaaaggctgtgaaagaagtaaaggaggatgacaaggtctctgagaaattagaagaccaactctctgagggtaggaactcccctgaaaaagctgaaaataaaaggaacactggcatcaaactccagttaaaagaagaggtaaagaaggaatcaccaacatcatcttcttttgggaaattcagctggaagaagccagaaaaagaagaggagaaaagttcattggtgaccccaagtatctctaaagaagagattctagaaagtagtaaggacaaagaggatggcaaaactgaagctgggaaggcaaagcctatcaaaatcaagctctctgggaaaactgttgttgcacataccagcccttggatgcctgttgtgacaacttccacacagactaagatccgacccaacctgcctattccatccacagtactccgcaagtcatgttcagccacaatgagcaagccagctcctcttaacacctttctgtctattaagtcctctggaaccactgctaaacctctgccagtggttaaagagtcttcagctgatctcctcttacctccagacatcatctccaaagcatttggaggggaagaggtgattctaaaagggtctccagaggaaaaagtggtgttggctgaaaagagtgagccatctcatttacctgaacaaatactaccacctcctccaccacccccacctccaccacctccaccaccccccgttatacctcatccagctgccccgtctgctgctcaagcaaatgctatcttggctccagtaaaatcaaacccagttgtatctcagactctcagccctggcttcgtgggtcctaacattttgaacccagtgttgcctgtagccatcatggcctcagcacagccagctgccattccttctgatgagacagctcctggggtgagtgagagtgaccgagaccagaccctgttctctgtgttagtacgtcctccaccacccctctcaagtgtgttcagtgaacaagccaaaaaattagagaagcgaaattcatgcttagccacagccaatgctaaggacctgtatgacatattctatagtagtggtggaaagggggcccctgagactaagggggcccctgagactaagctaagtggtggtccattggccaatggggaaaatagcaacctctctagaaccaaaagttcagacacctcttctacttctcctttgaacagcagtgcatcccaagaggagttgcatcaagatgagggtttggtcgctgctcctatagttagcaactctgaaaagcccattgcaaaaactctggtggccctagggaaatggtcagttgtagaacatgtaggcccaaaaagcacaggcagcacctatggcttcctacagcctctgacaaggttgtgccaaagcaggccttatgaaacaattaccccaaagacagacactttggccatatggacctctagttccttccagagtgacactagtagggatatatctccagagaagagtgagcttgacctgggagagccaggaccacctggtgtagaaccacctcctcaactgttagatatacagtgcaaagaatctcagaagttggtagaaatccacctcagagaatctgttaaccaggataaggaaagccaagagctccgtaaatctgaggattgtagagaaagtgagatagagacaaacactgaactaaaagaaagggtaaaggagctgtctgaggggatagttgatgagggagtaagtaccagcattggaccccacagcatagatgattctaatttgaaccatggaaacagatacatgtgggagggagaagtaaaacagcccaacttgctaatgattgacaaagaggctgaacagtccaataaattgatgacaggaagtgaaactccaagtaaagtagtgatcaaattgagtccacaggcttgctctttcacaaaggcaaaattagactcatttttatcagaagctaggtctttactcaacccacaagatacacctgtgaaaatttctgccccagagttgctgcttcattccccagccagatcagctatgtgtttaacaggtagtccacaagagcaaggagtttcagttgttagtgaggaggggctagagaattcagctccagaatcagcttctagaacttctaggtacagaagtctcaaactcaagagagaaagatcaaaagactttcaagttaaaaagatctatgagttggctgtttgggatgaaaacaagaagaggccagagacctgggagagcccagagaaaccaaaaacagaagcactggagctacaagatgtccatccagagttaacagtgacaatagaaagcaaggccctagaagactttgaagctacagacttaaaggtagaggagcttactgccctggggaatctgggggatatgcctgttgatttctgcactactcgggtaagcccagcacatagatccccaactgtcttgtgtcagaaagtgtgtgaagaaaattctgtatcacctatagggtgtaattcctccgatcccgctgacttcgaaccaatcccatctttttctgggtttccgttagattctcccaaaaccttggtgcttgactttgagacagagggtgaacgaaactcacctaatcccaggagtgttaggatcccttctcctaacattttgaaaactggacttacagaaaatgttgaccgtggcttggggggcctagagggaacacaccaggcccttgacctgttagcaggaggaatgatgcctgaggaagtaaaagaatcttcccaattagacaaacaagagtcactcggattggaattaaaaacaattaattctgcaggccttgggccatctccttgccttccagaccttgttgactttgtcacacggacctctggagttcaaaaagataaactgtgttctccactctctgagccaggtgacccttctaaatgtagttccctggagttggggccattacagctagaaatatcgaatgcatccaccacagaggtggcaattctgcaagtagatgatgacagtggcgaccctctgaatttggttaaagctccagtgtcaaggtcccctccaagggagcaggtaattgaagacaatatggtccctcagggaatgcctgaacaggaaactacagttggtgccatccaggaccacacagaatccagtgttcacaactaagaataaatacctagagctacttgtgagtgaatcattggcttctagaaatcagatgcccagatgatccaagactagtttgttatctcatctggaacctacaccaagagatgcagtcagcatcttaaagtaaatgttcatggaagctaaaaaatttacctcctttccttttccctttccccttaaaacaccagacaaatcgataacaacttatatatatatatatatatctgtaaaaatgtattttgttaatttttttggccaatttattttctcccactttgtcattaaaatcacatgtctaactggctcaccacatagtgtgctttgattgtattttggctttgactctgccatttctgaaatgtgggggaggatggaggcagctgacctctccagttgctgtgttgtattcctacccaatttcctgggcagttgatgcatctctgggaaaaacaccagaaagcttgctgaaatggaaaacttggaagaattgttcatctcttaggcttccatttggatgggcctgccttaacattgtttgaaatgcagcgtgagtagctcttttgtttactgtttacaccccttattggcatgtcaactcctgtacttcccttactctgttgcctttcttgagatgcattgtcctgctaacccacaaacctgtttggaaataaacatggaagaatatctggcaggcttacttttagaagacgacaaatcggtaaggcttattcatggttcattgccaggagcagatatgcttttgagatcacttttatttttgaaatggcctttgttcattgtattgtgatccaataacactttgtattaaattgtttagcagccatttgtgttgtgaaggggtagaagatctctgaaacttgtcttgagattgaactcattccctgttccacaaacccatatgtatcctttcctctacctcctcctttcccaattaatttcaaccatagtacgatgtttggggttgtatattttgttaaaaagattaaagaatttatgagttggcttggacaagtttaactttatttttaatgtgttaattacttggaataaatgcattaatctcaaaaaaaaaaaaaaaa

SEQ ID NO: 179528 - DNA, 6840 bp, Artificial Sequence
  derived and/or modified sequence
atgtacagaagcagcgccagaagcagcgtgagcagccacagacccaaggacgacggcggcggcggccccagaagcggcagaagcagcggcagcagcagcggccccgccagaagaagcagccccccccccccccccagcggcagcagcagcagaacccccgccagaagacccagaagccccagcggccacagaggcagaagagccagccccagcccccccagaggcagaagagtgagccccagcccccccagagccagaagaggcagccccagcccccccagaggcagaagactgttcccccccggccccgccggcttcagaggcagcagcagaggcgagagcagagccgactacgccagagacggcagaggcgaccaccccggcgacagcggcagcagaagaagaagccccggcctgtgcagcgacagcctggagaagagcctgagaatcaccgtgggcaacgaccacttctgcgtgagcacccccgagagaagaagactgagcgacagactgggcagccccgtggacaacctggaggacatggacagagacgacctgaccgacgacagcgtgttcaccagaagcagccagtgcagcagaggcctggagagatacatcagccaggaggagggccccctgagccccttcctgggccagctggacgaggactacagaaccaaggagaccttcctgcacagaagcgactacagcccccacatcagctgccacgacgagctgctgagaggcaccgagagaaacagagagaagctgaagggctacagcatcagaagcgaggagagaagcagagaggccaagagacccagatacgacgacaccgtgaagatcaacagcatgggcggcgaccaccccagcttcaccagcggcaccagaaactacagacagagaagaagaagccccagccccagattcctggaccccgagttcagagagctggacctggccagaagaaagagagaggaggaggaggagagaagcagaagcctgagccaggagctggtgggcgtggacggcggcggcaccggctgcagcatccccggcctgagcggcgtgctgaccgccagcgagcccggctacagcctgcacagacccgaggaggtgagcgtgatgcccaagaagagcatcctgaagaagagaatcgaggtggacatcatggagcccagcatgcagctggagagcttcagcagcagcaccagcagcagccaggaccaccccctgtacagcggccaccccagcctgcccctgagcggcgccatcgccgccttcgccagcgagatcgagaacaagggcaccatggtggagaccgccctgaaggagccccagggcaacctgtaccagtggggccccctgcccggcatccccaaggacaacagccccctgagagagaagttcggcagcttcctgtgccacaaggacaacctggacctgaaggccgagggccccgagagacacaccgacttcctgctgccccacgagagagccagccaggacggcagcggcttcagcagaatcctgagcatgctggccgacagcaccagcacccaggagaagagaagaagaagcttccccgacatcgaggacgaggagaagttcctgtacggcgacgaggaggaggacctgaaggccgagagcgtgcccaagcccctgggcagcagcgagagcgaggtgatgagacagaaggccagcagcctgcccagcagcgcccccgccgtgaagctggagagcctggaggagaccaaccccgagtacgccaagatccacgacctgctgaagaccatcggcctggacatcggcgtggccgagatcagccagctggccgccagaacccaggagagactgcacggcaagaagcccagcctgagaagcagcgccgacagaagaagcagcgtggacagatacttcagcgccgaccactgcagcagcgtggaccacagattcagcgccgacagatgcagcagcgtggaccactgcttcagcgccgacagaagaagcagcgacccccacagactggagagcagagaggcccaccacagcaacacccacagccccgaggtgagccacccccacccccccagccccgtggacccctacctgctgaccaagaacagcccccccttcctgaagagcgaccaccccgtgggccacatcagcggccccgaggtggtgggcagcggcttccagagcagcgtggccgtgagatgcatgctgcccagcgcccccagcgcccccatcagactgccccacaccgccgccctgagccagttccacatgcccagagccagccagttcgccgccgccagaatcccccccaactaccagggccccgccatcccccccgccagcttcgacgcctacagacactacatggcctacgccgccagcagatggcccatgtaccccaccagccagcccagcaaccaccccgtgcccgagccccacagaatcatgcccatcaccaagcaggccaccagaagcagacccaacctgagagtgatccccaccgtgacccccgacaagcccaagcagaaggagagcctgagaggcagcatccccgccgcccaggtgcccgtgcaggtgagcatccccagcctgatcagatacaaccccgagaagatcagcgacgagaagaacagagccagccagaagcagaaggtgatcgaggagagagagaagctgaagaacgacagagaggccagacagaagaagatgtactacctgagaaccgagctggagagactgcacaagcagcagggcgagatgctgagaaagaagagaagagagaaggacggccacaaggaccccctgctggtggaggtgagcagactgcaggacaacatcatgaaggacatcgccgagctgagacaggaggccgaggaggccgagaagaagcagagcgagctggacaaggtggcccagatcctgggcatcaacatcttcgacaagagccagaagagcctgagcgacagcagagagcccaccgagaagcccggcaaggccgagaagagcaagagccccgagaaggtgagcagcttcagcaacagcagcagcaacaaggagagcaaggtgaacaacgagaagttcagaaccaagagccccaagcccgccgagagcccccagagcgccaccaagcagctggaccagcccaccgccgcctacgagtactacgacgccggcaaccactggtgcaaggactgcaacaccatctgcggcaccatgttcgacttcttcacccacatgcacaacaagaagcacacccagaccctggacccctacaacagaccctgggccagcaagacccagagcgaggccaagcaggacgccatcaagagaaccgacaagatcaccgtgcccgccaagggcagcgagttcctggtgcccatcagcggcttctactgccagctgtgcgaggagttcctgggcgaccccatcagcggcgagcagcacgtgaagggccaccagcacaacgagaagtacaagaagtacgtggacgagaaccccctgtacgaggagagaagaaacctggacagacaggccggcctggccgtggtgctggagaccgagagaagaagacagagcgagctgaagagaaagctgagcgagaagcccaaggaggagaagaaggagaagaaggccaaggccgtgaaggaggtgaaggaggacgacaaggtgagcgagaagctggaggaccagctgagcgagggcagaaacagccccgagaaggccgagaacaagagaaacaccggcatcaagctgcagctgaaggaggaggtgaagaaggagagccccaccagcagcagcttcggcaagttcagctggaagaagcccgagaaggaggaggagaagagcagcctggtgacccccagcatcagcaaggaggagatcctggagagcagcaaggacaaggaggacggcaagaccgaggccggcaaggccaagcccatcaagatcaagctgagcggcaagaccgtggtggcccacaccagcccctggatgcccgtggtgaccaccagcacccagaccaagatcagacccaacctgcccatccccagcaccgtgctgagaaagagctgcagcgccaccatgagcaagcccgcccccctgaacaccttcctgagcatcaagagcagcggcaccaccgccaagcccctgcccgtggtgaaggagagcagcgccgacctgctgctgccccccgacatcatcagcaaggccttcggcggcgaggaggtgatcctgaagggcagccccgaggagaaggtggtgctggccgagaagagcgagcccagccacctgcccgagcagatcctgcccccccccccccccccccccccccccccccccccccccccccccgtgatcccccaccccgccgcccccagcgccgcccaggccaacgccatcctggcccccgtgaagagcaaccccgtggtgagccagaccctgagccccggcttcgtgggccccaacatcctgaaccccgtgctgcccgtggccatcatggccagcgcccagcccgccgccatccccagcgacgagaccgcccccggcgtgagcgagagcgacagagaccagaccctgttcagcgtgctggtgagaccccccccccccctgagcagcgtgttcagcgagcaggccaagaagctggagaagagaaacagctgcctggccaccgccaacgccaaggacctgtacgacatcttctacagcagcggcggcaagggcgcccccgagaccaagggcgcccccgagaccaagctgagcggcggccccctggccaacggcgagaacagcaacctgagcagaaccaagagcagcgacaccagcagcaccagccccctgaacagcagcgccagccaggaggagctgcaccaggacgagggcctggtggccgcccccatcgtgagcaacagcgagaagcccatcgccaagaccctggtggccctgggcaagtggagcgtggtggagcacgtgggccccaagagcaccggcagcacctacggcttcctgcagcccctgaccagactgtgccagagcagaccctacgagaccatcacccccaagaccgacaccctggccatctggaccagcagcagcttccagagcgacaccagcagagacatcagccccgagaagagcgagctggacctgggcgagcccggcccccccggcgtggagccccccccccagctgctggacatccagtgcaaggagagccagaagctggtggagatccacctgagagagagcgtgaaccaggacaaggagagccaggagctgagaaagagcgaggactgcagagagagcgagatcgagaccaacaccgagctgaaggagagagtgaaggagctgagcgagggcatcgtggacgagggcgtgagcaccagcatcggcccccacagcatcgacgacagcaacctgaaccacggcaacagatacatgtgggagggcgaggtgaagcagcccaacctgctgatgatcgacaaggaggccgagcagagcaacaagctgatgaccggcagcgagacccccagcaaggtggtgatcaagctgagcccccaggcctgcagcttcaccaaggccaagctggacagcttcctgagcgaggccagaagcctgctgaacccccaggacacccccgtgaagatcagcgcccccgagctgctgctgcacagccccgccagaagcgccatgtgcctgaccggcagcccccaggagcagggcgtgagcgtggtgagcgaggagggcctggagaacagcgcccccgagagcgccagcagaaccagcagatacagaagcctgaagctgaagagagagagaagcaaggacttccaggtgaagaagatctacgagctggccgtgtgggacgagaacaagaagagacccgagacctgggagagccccgagaagcccaagaccgaggccctggagctgcaggacgtgcaccccgagctgaccgtgaccatcgagagcaaggccctggaggacttcgaggccaccgacctgaaggtggaggagctgaccgccctgggcaacctgggcgacatgcccgtggacttctgcaccaccagagtgagccccgcccacagaagccccaccgtgctgtgccagaaggtgtgcgaggagaacagcgtgagccccatcggctgcaacagcagcgaccccgccgacttcgagcccatccccagcttcagcggcttccccctggacagccccaagaccctggtgctggacttcgagaccgagggcgagagaaacagccccaaccccagaagcgtgagaatccccagccccaacatcctgaagaccggcctgaccgagaacgtggacagaggcctgggcggcctggagggcacccaccaggccctggacctgctggccggcggcatgatgcccgaggaggtgaaggagagcagccagctggacaagcaggagagcctgggcctggagctgaagaccatcaacagcgccggcctgggccccagcccctgcctgcccgacctggtggacttcgtgaccagaaccagcggcgtgcagaaggacaagctgtgcagccccctgagcgagcccggcgaccccagcaagtgcagcagcctggagctgggccccctgcagctggagatcagcaacgccagcaccaccgaggtggccatcctgcaggtggacgacgacagcggcgaccccctgaacctggtgaaggcccccgtgagcagaagcccccccagagagcaggtgatcgaggacaacatggtgccccagggcatgcccgagcaggagaccaccgtgggcgccatccaggaccacaccgagagcagcgtgcacaactag

SEQ ID NO: 179529 - DNA, 6840 bp, Artificial Sequence
  derived and/or modified sequence
atgtataggtcgagtgcgcggtcaagcgtttcctctcatagacctaaggacgatggcggcggaggccctcgctccgggcgctctagcggatcgagctccggtccagctagacgctcatcccctcctccaccaccatcaggcagcagcagtagaactcctgctaggcgcccgaggagcccctcaggccatcgtggtagacgggcaagtccatccccaccccgcggacgacgtgtgagcccctcgcccccacgggctcgacgtgggtctcccagccctcccagggggcgtcgtctgttcccccccggacctgcgggattccgaggctctagtaggggggagtcgcgcgcagattatgcacgcgacgggaggggtgaccatccaggcgactctggctcccgtcgtagatctcccggcctctgttctgattctctcgaaaaaagtttgaggataactgtgggcaacgaccacttctgcgtttccacacccgaacgtcgtcgactctccgaccgtctgggttctcccgtggacaacctggaggatatggaccgggacgaccttactgacgactcagtgtttacaagaagttcacagtgttcaagaggactcgagcggtacataagccaggaagaggggccactaagcccttttttgggtcaactcgacgaggactaccgtactaaagaaacttttctgcacaggagtgattattcaccacatatcagctgccatgacgaactccttaggggtactgagaggaatcgagaaaagttgaaggggtattccattcggagcgaagagcgaagcagggaagctaaacgtccgaggtatgacgacaccgtgaagataaacagcatgggcggtgaccacccaagttttacctccggcacccgtaactacaggcagcggcggaggagcccaagtccacggttcctggacccagagttccgcgagctcgatctggcacgtaggaagcgagaggaagaggaggaaagatcacgctccctttcacaggaactcgtgggcgtcgacggtggaggtacgggctgcagcatacctggcttatcaggtgttttgacagcttcagaacccggctactcactgcacaggccagaggaggtcagcgtgatgccaaagaagtctatactgaagaaacggatagaggtagacataatggaaccatccatgcaactagagagtttctctagctccacatcttctagccaggaccatcccttgtatagcggccatccaagcctgcccttatcgggagcaatcgccgcttttgcttccgaaattgagaataagggtaccatggtagaaactgctttaaaggaacctcaggggaatttgtaccagtgggggcctctgcccggtatcccgaaggacaacagcccactccgggaaaagttcggaagcttcttgtgtcataaagataacctcgatctgaaggccgaggggcccgaaagacacaccgatttccttctgccccatgagcgcgcaagccaagatggtagcgggtttagccgcattctgtctatgctggcagattccacatctacacaagagaagaggaggcgctcgttccccgacattgaggacgaagagaaatttctgtacggcgatgaggaggaggatctgaaggctgagtcagtccctaagcctttgggatcctctgagtccgaggtgatgcgccagaaagcttctagcctaccctcgagcgccccagccgtcaagttggaatccctagaagagacaaatcctgagtacgctaaaattcacgacctgctcaaaacaatcgggttggacattggagttgccgagatctcgcaattagccgctagaactcaagaacgcctgcacgggaagaagccttcactgagatccagcgccgaccgaaggtccagtgtggaccgctacttttcggcagatcactgcagcagcgtagatcaccgtttctctgctgaccgatgtagcagcgtcgatcattgcttcagcgctgataggagatcctcagatccacaccggctcgaatctagagaggctcatcattccaatacccatagtcccgaggtgagccacccccaccccccaagccctgtcgatccatatctgctgacaaaaaatagcccccctttcctgaagtcagatcacccagtcggacacatctccggtcccgaagtcgtgggctctgggttccagtctagtgtggcggtccgctgcatgttaccctccgctccatccgccccaattcgactgccccataccgctgccctgagtcagttccacatgcccagggcaagccagttcgccgcagcacgcatcccaccaaactatcagggcccagcaatacctccagcttccttcgacgcttacagacattatatggcgtatgcggcaagccggtggccaatgtaccctacctctcagccttccaaccacccagtgcccgagcctcacagaattatgccaattaccaaacaggctacccggagtaggcctaacctccgggtaattcccacagtgactccagataaacccaagcagaaggaatcactccggggttctataccagcggcccaagtgcctgtgcaagtctccatcccttctctcattagatacaatcccgaaaaaattagcgatgaaaaaaaccgcgccagtcaaaaacagaaggttatagaagaacgagaaaagctgaaaaacgaccgtgaggctaggcaaaagaaaatgtattatttgcgaaccgaattggagcgactgcacaaacaacagggtgaaatgttgcggaagaagagacgcgaaaaggacgggcacaaagatcctctacttgtcgaggttagtcgcctgcaggataacattatgaaggacatcgctgaactgaggcaggaggccgaggaagcagagaaaaaacagtcggagctggacaaagttgcacagattcttggaattaatatcttcgataagagccagaagagcctgtcggattcccgtgaacctaccgagaagccagggaaggcggaaaaatctaaatcaccagagaaagtcagctcattttctaacagttccagcaacaaggagtcgaaggtcaacaacgagaagttccggaccaagagtcccaaacctgcagaaagtccacaatctgcgaccaaacagctagatcagcccacagcggcctacgagtactacgacgccgggaatcattggtgtaaggactgcaatactatttgcggaacgatgtttgacttttttacgcatatgcataataagaaacacacccagaccctcgacccctataatcgtccatgggcttctaagacccagtccgaggcaaagcaggatgccatcaaaagaaccgataaaatcactgtgcccgcgaaaggatcagagttcctcgttccaatctctggcttctactgtcagctttgcgaggagttcttgggggaccctatcagtggagaacagcacgtcaaagggcaccagcataatgaaaaatataagaagtacgtagacgagaacccattatacgaggagaggaggaacctggaccgccaggccggcttggctgtggtgctggaaacagaacgaaggaggcagagcgaattgaaacgcaagttatccgagaagccaaaagaggagaagaaagagaagaaagctaaagcagtgaaggaagtgaaggaggacgacaaagtcagcgaaaagctcgaggatcagctgtcagagggcagaaatagcccagagaaagccgagaacaaacgcaatacgggaatcaagctgcaattgaaagaggaagttaaaaaggaatctcctacctctagttcgttcggcaaattttcctggaagaaaccggagaaagaagaggagaagtcctcgctggttacacctagtatttccaaggaagaaattttagagtccagcaaggacaaggaagatggcaaaactgaggccggtaaggccaagcctataaaaatcaagctctctggtaaaacagtggtggcacacacatcaccatggatgcctgttgtgactacctcaacccagaccaagattagacctaatctccccatcccctccacagtgttacgcaagtcctgctccgcgacaatgtccaagcccgctcccttgaacacctttctgtccattaaatccagtggtacaaccgcaaagccgctccccgtggtcaaagagtctagtgctgatctcctgttacctccagacatcatcagtaaagcctttgggggcgaggaggtaatactcaagggatctcccgaggaaaaagtggttctcgccgaaaagagcgagccatcccacctgcccgaacagattctgccacctccaccgcctccacccccaccacctccaccacccccgcccgtgatccctcacccagctgcgccttctgctgctcaggccaacgccattttggcccctgtcaaatccaacccggtggtgagtcagactcttagccccggtttcgtcggacctaacattttaaacccggttctgccagtcgccatcatggcgagtgcgcaacccgcagctatcccgtcagacgagactgcacctggagtatcagagagtgatcgagatcaaaccttgttttctgtgctggtcagacctccaccgcccctctccagtgtctttagcgaacaggccaagaaattggagaaacggaactcctgcctggctaccgcaaacgctaaagatctgtatgacatattttattcaagcggcggaaagggcgcgccagaaacaaaaggagccccagaaaccaagctgagtggcggacccctggcaaacggcgagaacagtaatctgtcccgcactaaaagctccgacacatcatccacatctcctttaaatagttcagccagccaggaggagctgcaccaggatgaggggctggttgctgccccaatcgtaagtaattcagagaaacccattgctaaaacactcgtggccctcggtaagtggtcagtggttgagcacgtgggccctaagtccaccggaagcacgtacgggttcctgcagccacttactcgactttgtcagagccgaccttacgagactattactcctaaaacagatactctggcaatctggacaagtagcagcttccagagtgatacttcgagggacatctctccagaaaagtcagagctggacctgggcgagccaggtcctcccggagttgaacctcctccacagcttcttgatatccagtgtaaagagagtcagaagctggtggaaatccacctccgtgagtccgtgaaccaagataaagaaagccaagagctccgcaaatctgaggattgccgggagtctgaaatcgaaaccaacaccgaattgaaggagcgcgtaaaagagctcagcgagggaattgtggacgagggagtgtccacctccattggtccccattctatcgacgattctaatctgaaccacggcaaccgctacatgtgggaaggggaggtaaagcagcccaatcttcttatgatcgacaaagaagccgagcagagcaacaagctcatgaccgggtccgagaccccctcaaaggtcgtaataaagctctcaccacaagcctgttccttcaccaaagcaaagctggactcgtttctgagtgaggccaggagtcttctcaacccccaggacacacccgtaaagatctctgcacctgagttgcttcttcacagtccagctcgcagtgctatgtgcttaaccggtagtccacaggaacaaggtgtgagtgtggtcagtgaggaaggactcgagaacagcgccccggagtccgcttccaggacttcgaggtacagatctctcaagctcaaaagagaacgatccaaagacttccaggtgaagaagatatatgagttggctgtgtgggacgaaaataagaaaagaccggaaacctgggaatcccccgaaaaacctaaaactgaagcactggaattacaggatgttcaccccgagctgacagtgaccattgagtctaaggctctggaggacttcgaggctacggacttaaaggtggaggagctgaccgccctggggaacttgggagatatgcccgtggacttttgtacgacacgtgtaagccccgctcatagaagtcccaccgtactgtgccagaaggtttgtgaggagaactcagtgtcccctatcggatgtaactcaagtgatccggctgatttcgagcctatcccgtccttttccgggtttccattagattcaccgaagaccttggtccttgatttcgaaacagagggcgaacgcaactctcccaatcccaggtcagtcagaatccctagtcctaatatcctgaaaactggactgactgaaaatgtggatcgggggttgggggggctggaggggactcaccaagccctcgacctgcttgccggtggaatgatgcctgaggaggttaaagaatcaagtcagctggacaaacaggagagtctgggccttgagctcaagaccatcaattctgccggacttggcccctctccatgcctgcccgacctggtcgatttcgttactaggacaagcggcgtccagaaagacaagctttgctccccgcttagcgagccgggggacccctcaaaatgtagcagcttggagctaggaccattacagctggaaatatccaatgcaagtactacagaagtggcgatcctacaggtcgatgacgatagcggggatcctctgaacctggtgaaagcaccagtgtccagaagccccccgagagaacaggtcattgaggacaatatggttccacagggcatgcccgaacaggaaacaaccgtgggtgctattcaagaccacaccgaatcttcagtgcataattag

SEQ ID NO: 179530 - DNA, 8006 bp, Artificial Sequence
  derived and/or modified sequence
ctgcggcggcgcgctccgagcctgcgtctagggcgcccccgggtcagagctgtcgccgtggccgccgctgcaagaaccatgtaccgcagcagcgctcgctcctccgtctcttcccaccggcctaaagacgacggcgggggcggcccgcgcagcggccgcagctctggctcctcctcaggcccggctcgccgcagctcaccgccgcctccgccctccggctcctcgtcgcggaccccggctcgccgaccccgctcgccctcagggcaccgcggccgccgggcctcgccgtccccgccacggggtcgtcgcgtctccccgtccccgcctcgggcccgtcgcggctccccgtcgccaccgcggggccgacgactcttcccgccgggcccggccggcttcagaggcagcagccggggggagtcccgcgccgactatgcccgggacggccgcggagaccatccaggcgacagcggcagccggagacgctctcctggtctgtgttctgactctttggaaaagagcttaaggatcactgttggcaatgaccacttctgtgttagcacaccagaacggcgacggcttagtgatcggctggggtcaccagtggataatctggaagacatggacagggatgacctgactgatgattctgtcttcactcgaagctcccagtgctctcggggtcttgagcgatatatttcccaggaggaagggcctctcagtcccttcttgggacaacttgatgaggactaccgaacaaaagaaactttcctgcatcgatctgattatagtccccatatcagttgtcatgatgagctgttgcggggaacagaacggaatcgagaaaaactcaaaggctactccatacgatctgaagaaaggagccgggaggccaaaagaccccgttatgatgacacagtgaagataaacagcatgggaggggatcacccaagttttacatcaggaactcgcaactatcgacagcgtagaagaagcccaagtcctaggtttctcgaccctgagtttcgagaactggatcttgccagacgaaagcgagaggaagaggaggagcgaagtaggagcttgagtcaggagctggttggagttgatggtggtggtactggctgttccatccctggattgtcaggtgtcctaacagcatcggagccaggatattctttgcatcggcctgaggaagtatctgtgatgcccaagaaatccattttgaagaagcggattgaggtggacataatggagccctccatgcagcttgagagtttttccagcagtaccagctccagccaggatcaccctctctactctgggcacccatcccttccactaagtggtgctattgctgcttttgcctcagagattgaaaacaaggggactatggtagagactgccttgaaggaacctcagggcaacctctaccaatggggtccccttcctgggattcccaaagacaacagtcctctcagagaaaaatttggaagttttctatgccacaaggataatttggatttgaaggctgagggacctgagcgacacacagacttcctgctgccccatgagagagctagccaggatggcagtggtttttcccgcattctgagcatgttggctgattctaccagtacacaggaaaaaaggcgacgtagctttcccgacattgaagatgaggagaaatttctctatggggatgaagaagaggatttaaaggcagaatccgtaccaaagccccttgggagctctgagagtgaagttatgaggcagaaggcaagctccctgccgtcttcagctccagctgtaaagctagaatcactagaagagaccaatccagaatatgcgaagatccatgacttgctcaagacaatagggctggatattggagtagcagagattagtcaattggctgcacgcacccaggaacgacttcatggcaagaagccatcattacgctcctcagctgaccgccgttcctcagttgaccgatacttttcagctgaccactgttcctcagttgaccaccgcttctcagctgaccgctgttcctcagttgaccactgcttctcagctgatcgacgttcctcagatccccacagactagagagcagggaggcacatcatagcaatacccactctccagaggtgtcccatccacacccaccttctcctgtggatccttacctgctcacaaaaaacagccctccattcctaaagtctgaccatccagtgggtcatatttcaggaccagaggtggttggtagtgggtttcagtcatctgttgcagtcaggtgcatgttgccatcagccccatctgccccaattagacttccacacactgctgctttatctcagtttcacatgccaagggcctctcagtttgctgcagctcggatacctccgaactaccagggacctgccattccccctgcctcttttgatgcctataggcactacatggcatatgcagcctccagatggcccatgtatcccacctctcaaccgtcaaaccaccctgtacctgaaccacacaggataatgccaataaccaaacaagctactcgtagccgtcccaatcttcgtgtgatccccactgtgactcctgataagcctaagcagaaagagtctctgcgaggctcaattcctgcggcccaagtgcctgtccaggtgtccattccatcactcataagatataatccagagaagatctctgatgagaagaaccgtgcttcccagaagcaaaaggttattgaagagagggaaaaactaaagaatgaccgggaagcccgccagaagaagatgtactatcttaggaccgagttagagcggcttcataaacaacaaggagaaatgctgcgcaagaaacgaagggagaaggatggccacaaagatcctctcttggtggaggtgagtcggcttcaggataacattatgaaggacattgcagagctacggcaagaggcagaagaggcagaaaagaagcaatctgaactggacaaagtggctcagatcttgggaattaacatcttcgataaatcccagaagtctttaagtgacagtagagagcctacagagaagcctgggaaagcagaaaaatctaagagcccagaaaaagtgtcatcgttctcaaactcctcctccaacaaggaatcaaaagtaaacaatgagaagtttcgtactaagagccccaagcctgccgaaagcccccagtcagccactaagcagttggatcagcccactgctgcttatgagtattatgatgctggcaatcactggtgcaaagactgcaacaccatctgtgggaccatgtttgatttcttcactcatatgcacaataagaagcacacacagacactggatccctacaacagaccttgggcttcaaagacccagagtgaggccaagcaagatgccataaagcgcactgacaagataactgttcctgcaaaaggctctgagtttctggttcccatcagtggattttattgccagctctgtgaggaatttttgggggatccaatttctggggagcaacatgtgaagggtcaccaacacaatgagaaatacaagaaatatgtggatgaaaacccattatatgaggagcggcggaatctggaccgccaagctggcttggctgtggtcctagagacagaacggcgacggcagagtgagctaaagcgcaaacttagtgagaaaccaaaggaggagaagaaagaaaaaaaggcaaaggctgtgaaagaagtaaaggaggatgacaaggtctctgagaaattagaagaccaactctctgagggtaggaactcccctgaaaaagctgaaaataaaaggaacactggcatcaaactccagttaaaagaagaggtaaagaaggaatcaccaacatcatcttcttttgggaaattcagctggaagaagccagaaaaagaagaggagaaaagttcattggtgaccccaagtatctctaaagaagagattctagaaagtagtaaggacaaagaggatggcaaaactgaagctgggaaggcaaagcctatcaaaatcaagctctctgggaaaactgttgttgcacataccagcccttggatgcctgttgtgacaacttccacacagactaagatccgacccaacctgcctattccatccacagtactccgcaagtcatgttcagccacaatgagcaagccagctcctcttaacacctttctgtctattaagtcctctggaaccactgctaaacctctgccagtggttaaagagtcttcagctgatctcctcttacctccagacatcatctccaaagcatttggaggggaagaggtgattctaaaagggtctccagaggaaaaagtggtgttggctgaaaagagtgagccatctcatttacctgaacaaatactaccacctcctccaccacccccacctccaccacctccaccaccccccgttatacctcatccagctgccccgtctgctgctcaagcaaatgctatcttggctccagtaaaatcaaacccagttgtatctcagactctcagccctggcttcgtgggtcctaacattttgaacccagtgttgcctgtagccatcatggcctcagcacagccagctgccattccttctgatgagacagctcctggggtgagtgagagtgaccgagaccagaccctgttctctgtgttagtacgtcctccaccacccctctcaagtgtgttcagtgaacaagccaaaaaattagagaagcgaaattcatgcttagccacagccaatgctaaggacctgtatgacatattctatagtagtggtggaaagggggcccctgagactaagggggcccctgagactaagctaagtggtggtccattggccaatggggaaaatagcaacctctctagaaccaaaagttcagacacctcttctacttctcctttgaacagcagtgcatcccaagaggagttgcatcaagatgagggtttggtcgctgctcctatagttagcaactctgaaaagcccattgcaaaaactctggtggccctagggaaatggtcagttgtagaacatgtaggcccaaaaagcacaggcagcacctatggcttcctacagcctctgacaaggttgtgccaaagcaggccttatgaaacaattaccccaaagacagacactttggccatatggacctctagttccttccagagtgacactagtagggatatatctccagagaagagtgagcttgacctgggagagccaggaccacctggtgtagaaccacctcctcaactgttagatatacagtgcaaagaatctcagaagttggtagaaatccacctcagagaatctgttaaccaggataaggaaagccaagagctccgtaaatctgaggattgtagagaaagtgagatagagacaaacactgaactaaaagaaagggtaaaggagctgtctgaggggatagttgatgagggagtaagtaccagcattggaccccacagcatagatgattctaatttgaaccatggaaacagatacatgtgggagggagaagtaaaacagcccaacttgctaatgattgacaaagaggctgaacagtccaataaattgatgacaggaagtgaaactccaagtaaagtagtgatcaaattgagtccacaggcttgctctttcacaaaggcaaaattagactcatttttatcagaagctaggtctttactcaacccacaagatacacctgtgaaaatttctgccccagagttgctgcttcattccccagccagatcagctatgtgtttaacaggtagtccacaagagcaaggagtttcagttgttagtgaggaggggctagagaattcagctccagaatcagcttctagaacttctaggtacagaagtctcaaactcaagagagaaagatcaaaagactttcaagttaaaaagatctatgagttggctgtttgggatgaaaacaagaagaggccagagacctgggagagcccagagaaaccaaaaacagaagcactggagctacaagatgtccatccagagttaacagtgacaatagaaagcaaggccctagaagactttgaagctacagacttaaaggtagaggagcttactgccctggggaatctgggggatatgcctgttgatttctgcactactcgggtaagcccagcacatagatccccaactgtcttgtgtcagaaagtgtgtgaagaaaattctgtatcacctatagggtgtaattcctccgatcccgctgacttcgaaccaatcccatctttttctgggtttccgttagattctcccaaaaccttggtgcttgactttgagacagagggtgaacgaaactcacctaatcccaggagtgttaggatcccttctcctaacattttgaaaactggacttacagaaaatgttgaccgtggcttggggggcctagagggaacacaccaggcccttgacctgttagcaggaggaatgatgcctgaggaagtaaaagaatcttcccaattagacaaacaagagtcactcggattggaattaaaaacaattaattctgcaggccttgggccatctccttgccttccagaccttgttgactttgtcacacggacctctggagttcaaaaagataaactgtgttctccactctctgagccaggtgacccttctaaatgtagttccctggagttggggccattacagctagaaatatcgaatgcatccaccacagaggtggcaattctgcaagtagatgatgacagtggcgaccctctgaatttggttaaagctccagtgtcaaggtcccctccaagggagcaggtaattgaagacaatatggtccctcagggaatgcctgaacaggaaactacagttggtgccatccaggaccacacagaatccagtgttcacaactaagaataaatacctagagctacttgtgagtgaatcattggcttctagaaatcagatgcccagatgatccaagactagtttgttatctcatctggaacctacaccaagagatgcagtcagcatcttaaagtaaatgttcatggaagctaaaaaatttacctcctttccttttccctttccccttaaaacaccagacaaatcgataacaacttatatatatatatatatatctgtaaaaatgtattttgttaatttttttggccaatttattttctcccactttgtcattaaaatcacatgtctaactggctcaccacatagtgtgctttgattgtattttggctttgactctgccatttctgaaatgtgggggaggatggaggcagctgacctctccagttgctgtgttgtattcctacccaatttcctgggcagttgatgcatctctgggaaaaacaccagaaagcttgctgaaatggaaaacttggaagaattgttcatctcttaggcttccatttggatgggcctgccttaacattgtttgaaatgcagcgtgagtagctcttttgtttactgtttacaccccttattggcatgtcaactcctgtacttcccttactctgttgcctttcttgagatgcattgtcctgctaacccacaaacctgtttggaaataaacatggaagaatatctggcaggcttacttttagaagacgacaaatcggtaaggcttattcatggttcattgccaggagcagatatgcttttgagatcacttttatttttgaaatggcctttgttcattgtattgtgatccaataacactttgtattaaattgtttagcagccatttgtgttgtgaaggggtagaagatctctgaaacttgtcttgagattgaactcattccctgttccacaaacccatatgtatcctttcctctacctcctcctttcccaattaatttcaaccatagtacgatgtttggggttgtatattttgttaaaaagattaaagaatttatgagttggcttggacaagtttaactttatttttaatgtgttaattacttggaataaatgcattaatctca

SEQ ID NO: 179531 - DNA, 6840 bp, Artificial Sequence
  derived and/or modified sequence
atgtaccgcagcagcgcccggagctctgtgagcagccaccggcccaaggatgatggcggcggcggccccaggagcggccgcagcagcggcagcagcagcggccctgcccggcgcagcagccccccacctccacccagcggcagcagcagcaggaccccagcccggcggcccaggagccccagcggccaccggggccggcgggccagccccagccccccccggggccggcgggtgagccccagccccccccgggcccggcggggcagccccagccccccccggggccggcggctcttccccccaggccctgctggcttccggggcagcagcagaggagagagcagagctgactatgccagagatggccgcggggaccaccctggggacagcggcagcagaagaagaagccctggcctgtgcagcgacagcctggagaagagcctgcgcatcaccgtgggcaatgaccacttctgtgtgtccaccccagagcggcggcggctgagtgaccggctgggcagccctgtggacaacctggaggacatggacagagatgacctgacagatgacagcgtcttcaccaggagcagccagtgcagccggggcctggagcgctacatcagccaggaggagggccccctgagccccttcctgggccagctggatgaggactaccgcaccaaggagaccttcctgcacagaagtgactacagcccccacatcagctgccatgatgagctgctgcggggcacagagaggaaccgggagaagctgaagggctacagcatccgctctgaggagaggagccgggaggccaagaggcccaggtatgatgacacagtgaagatcaacagcatgggcggggaccaccccagcttcaccagcggcaccaggaactaccggcagaggagaagaagccccagcccccgcttcctggaccctgagttccgggagctggacctggcccggaggaagcgggaggaggaggaggagaggagccgcagcctgagccaggagctggtgggcgtggatggcggcggcaccggctgcagcatccctggcctgtctggagtgctgacagccagcgagcccggctacagcctgcacaggcctgaggaggtgtctgtgatgcccaagaagagcatcctgaagaagagaattgaggtggacatcatggagcccagcatgcagctggagagcttcagcagcagcaccagcagcagccaggaccaccccctgtacagcggccaccccagcctgcccctgagcggggccatcgccgcctttgccagcgagattgaaaataaaggcaccatggtggagacagccctgaaggagccccagggcaacctgtaccagtggggccccctgcccggcatccccaaggacaacagccccctgcgggagaagtttggcagcttcctgtgccacaaggacaacctggacctgaaggccgagggccctgagcggcacacagacttcctgctgccccatgagcgggccagccaggacggcagcggcttcagccgcatcctgtccatgctggccgacagcaccagcacccaggagaagagaagaagaagcttcccagacattgaagatgaggagaagttcctgtatggagatgaggaggaggacctgaaggccgagagcgtgcccaagcccctgggcagcagcgagagcgaggtgatgaggcagaaggccagcagcctgcccagcagcgccccagctgtgaagctggagagcctggaggagaccaacccagaatatgccaagatccatgacctgctgaagaccatcggcctggacattggagtggccgagatcagccagctggccgcccggacccaggagcggctgcacggcaagaagcccagcctgcggagcagcgctgaccggcgcagctctgtggaccgctacttctctgctgaccactgcagctctgtggaccaccgcttctctgctgaccgctgcagctctgtggaccactgcttctctgctgaccggcgcagcagtgacccccaccggctggagagccgggaggcccaccacagcaacacccacagccctgaggtgagccacccccacccccccagccctgtggacccctacctgctgaccaagaacagcccccccttcctgaagagtgaccaccctgtgggccacatcagcggccctgaggtggtgggcagcggcttccagagctctgtggccgtgcgctgcatgctgcccagcgcccccagcgcccccatccggctgccccacacagctgccctgagccagttccacatgccccgggccagccagtttgctgctgcccgcatcccccccaactaccagggccctgccatccccccagccagctttgatgcctaccgccactacatggcctatgctgccagccgctggcccatgtaccccaccagccagcccagcaaccaccctgtgcctgagccccaccgcatcatgcccatcaccaagcaggccaccaggagccggcccaacctgcgggtcatccccaccgtgaccccagacaagcccaagcagaaggagagcctgcggggcagcatcccagctgcccaggtgcctgtgcaggtgtccatccccagcctcatccgctacaaccctgagaagatcagtgatgagaagaacagagccagccagaagcagaaggtgattgaggagcgggagaagctgaagaatgaccgggaggcccggcagaagaagatgtactacctgaggacagagctggagcggctgcacaagcagcagggcgagatgctgaggaagaagagaagagagaaggatggccacaaggaccccctgctggtggaggtgtcccggctgcaggacaacatcatgaaggacattgctgagctgcggcaggaggccgaggaggccgagaagaagcagagcgagctggacaaggtggcccagatcctgggcatcaacatctttgacaagagccagaagagcctgagtgacagccgggagcccacagagaagccaggcaaggccgagaagagcaagagccctgagaaggtgagcagcttcagcaacagcagcagcaacaaggagagcaaggtgaacaatgagaagttccgcaccaagagccccaagccagctgagagcccccagagcgccaccaagcagctggaccagcccacagctgcctatgagtactatgatgctggcaaccactggtgcaaggactgcaacaccatctgtggcaccatgtttgacttcttcacccacatgcacaacaagaagcacacccagaccctggacccctacaaccggccctgggccagcaagacccagagcgaggccaagcaggatgccatcaagaggacagacaagatcaccgtgcctgccaagggcagcgagttcctggtgcccatcagcggcttctactgccagctgtgtgaggagttcctgggggaccccatcagcggggagcagcacgtgaagggccaccagcacaatgagaagtacaagaagtatgtggatgagaaccccctgtatgaggagaggaggaacctggaccggcaggccggcctggccgtggtgctggagacagagcggcggcggcagagcgagctgaagaggaagctgtctgagaagcccaaggaggagaagaaggagaagaaggccaaggctgtgaaggaggtgaaggaggatgacaaggtgtctgagaagctggaggaccagctgtctgagggcaggaacagccctgagaaggccgagaacaagaggaacacaggcatcaagctgcagctgaaggaggaggtgaagaaggagagccccaccagcagcagctttgggaagttctcctggaagaagccagagaaggaggaggagaagagcagcctggtgacccccagcatcagcaaggaggagatcctggagagcagcaaggacaaggaggatggcaagacagaggccggcaaggccaagcccatcaagatcaagctgagcggcaagacagtggtggcccacaccagcccctggatgcctgtggtgaccaccagcacccagaccaagatccggcccaacctgcccatccccagcacagtgctgaggaagagctgcagcgccaccatgagcaagccagcccccctgaacaccttcctgagcatcaagagcagcggcaccacagccaagcccctgcctgtggtgaaggagagcagcgctgacctgctgctgcccccagacatcatcagcaaggccttcggcggggaggaggtgatcctgaagggcagccctgaggagaaggtggtgctggccgagaagtctgagcccagccacctgcctgagcagatcctgcccccacctcctcctcctcctcctcctcctcctcctcctcctcctgtgatcccccaccctgctgcccccagcgctgcccaggccaatgccatcctggcccctgtgaagagcaaccctgtggtgtcccagaccctgagccctggctttgtgggccccaacatcctgaaccctgtgctgcctgtggccatcatggccagcgcccagcctgctgccatccccagtgatgaaacagcccctggggtgtctgagagtgaccgggaccagaccctcttctctgtgctggtgcggcccccaccacccctgagcagcgtcttcagcgagcaggccaagaagctggagaagaggaacagctgcctggccacagccaatgccaaggacctgtatgacatcttctacagcagcggcggcaagggggcccctgagaccaagggggcccctgagaccaagctgagcggcggccccctggccaacggggagaacagcaacctgagcaggaccaagagcagtgacaccagcagcaccagccccctgaacagcagcgccagccaggaggagctgcaccaggatgagggcctggtggccgcccccatcgtgagcaacagcgagaagcccatcgccaagaccctggtggccctgggcaagtggagcgtggtggagcacgtgggccccaagagcacaggcagcacctacggcttcctgcagcccctgacccggctgtgccagagccggccctatgagaccatcacccccaagacagacaccctggccatctggaccagcagcagcttccagagcgacaccagccgggacatcagccctgagaagtctgagctggacctgggggagcccggccccccaggagtggagcccccaccccagctgctggacatccagtgcaaggagagccagaagctggtggagatccacctgcgggagagcgtgaaccaggacaaggagagccaggagctgaggaagtctgaggactgccgggagagcgagattgagaccaacacagagctgaaggagcgggtgaaggagctgtctgagggcatcgtggatgagggcgtgtccaccagcatcggcccccacagcattgatgacagcaacctgaaccacggcaaccgctacatgtgggagggggaggtgaagcagcccaacctgctgatgattgacaaggaggccgagcagagcaacaagctgatgactggaagtgagacccccagcaaggtggtgatcaagctgagcccccaggcctgcagcttcaccaaggccaagctggacagcttcctgtctgaggcccggagcctgctgaacccccaggacacccctgtgaagatcagcgcccctgagctgctgctgcacagccctgcccggagcgccatgtgcctgaccggcagcccccaggagcagggcgtgtctgtggtgtctgaggagggcctggagaacagcgcccctgagagcgccagcaggaccagccgctaccgcagcctgaagctgaagcgggagaggagcaaggacttccaggtgaagaagatctatgagctggccgtgtgggatgagaacaagaagaggcctgagacctgggagagccctgagaagcccaagacagaggccctggagctgcaggatgtgcaccctgagctgactgtgaccatcgagagcaaggccctggaggactttgaggccacagacctgaaggtggaggagctgacagccctgggcaacctgggggacatgcctgtggacttctgcaccaccagggtgtccccagcccacaggagccccaccgtgctgtgccagaaggtgtgtgaggagaacagcgtgagccccatcggctgcaacagcagtgaccctgctgactttgagcccatccccagcttcagcggcttccccctggacagccccaagaccctggtgctggactttgaaacagaaggagagaggaacagccccaaccccaggtctgtgcgcatccccagccccaacatcctgaagacaggcctgacagaaaatgtggaccggggcctgggcggcctggagggcacccaccaggccctggacctgctggccggcggcatgatgcctgaggaggtgaaggagagcagccagctggacaagcaggagagcctgggcctggagctgaagaccatcaacagcgctggcctgggccccagcccctgcctgcctgacctggtggactttgtgaccaggaccagcggcgtgcagaaggacaagctgtgcagccccctgtctgagcccggggaccccagcaagtgcagcagcctggagctgggccccctgcagctggagatcagcaatgccagcaccacagaggtggccatcctgcaggtggatgatgattctggggaccccctgaacctggtgaaggcccctgtgagccgcagccccccccgggagcaggtgattgaggacaacatggtgccccagggcatgcctgagcaggagaccaccgtgggcgccatccaggaccacacagagagctctgtgcacaactag

SEQ ID NO: 179532 - DNA, 6840 bp, Artificial Sequence
  derived and/or modified sequence
atgtaccggagcagcgcccggagcagcgtgagcagccaccggcccaaggacgatggaggcggcgggcccaggagcgggaggtcctctggttcatcatctgggcccgccaggcgatcaagcccacccccacccccatcgggttctagctctaggactcctgccagaaggcccagaagcccaagtggccatcgaggccgacgagcgtcacctagtcctcccaggggccggcgtgtgtccccttctcctccacgcgcacggagaggcagcccatctcctcccaggggaaggagactttttccgcccggtccagctggattccgcggctcctcccggggcgagtccagagctgactatgcgagagacggccggggtgaccaccctggggacagcgggtcaaggaggaggagcccaggcctgtgctccgattctctcgagaagagcctacgtattacggttgggaatgaccatttctgcgtgtcgacacctgagaggcgaaggttgagcgaccggctgggcagccccgtagataatctcgaagacatggatcgggacgacctgaccgacgacagtgtgttcacgcggtcaagccaatgctctcgaggactggagaggtacatatctcaagaggaaggcccactctccccctttctcggtcagttggatgaagattacaggacgaaagaaaccttcctgcacagatctgactatagtccgcatattagctgtcatgacgagttattgcgcggcacagaaaggaatcgggaaaaattgaagggttactctatccgctctgaggagaggtcccgagaggcgaaaagaccaagatacgatgatacagtgaagattaacagtatgggtggagatcatccttcttttacgagcggcactcgtaactatcgccagcggagaagaagccccagcccccgctttcttgatcctgaatttagagaactcgatctggctaggcgtaaacgggaggaagaggaggaacggtccagatctctgtcgcaagagctcgtcggcgtcgatgggggcggaactgggtgcagcataccagggttgagtggagttttgaccgcctcagagccaggctactctctgcaccgtcctgaggaggtgtcagtgatgcccaagaagtcaattttgaaaaagcgtattgaggtagacatcatggaaccctctatgcagttggagagcttttcctcctcaaccagttcaagtcaagatcatcctctctactccggccatcccagcctccctttatctggggcaatagcagcgttcgcttctgagattgagaataagggcaccatggtggagaccgcgctgaaagagcctcaggggaatctatatcagtgggggcccctaccagggatcccaaaggataactcccctttacgagagaaattcggtagttttctgtgccataaggataacctggacctcaaggctgaaggccccgaacggcacacggacttcctcttgccgcacgaaagggcttcccaagacggatctggctttagcagaatcctctccatgttggcagactccacaagcacccaagagaaaaggcgcaggagcttccccgacattgaggatgaggagaagttcctatatggagacgaagaagaggacctcaaggctgaaagcgttcctaagcccctcgggtcatccgaatctgaggtgatgagacagaaagccagttccctcccttccagtgctccggccgtcaagttggagtcactcgaggagaccaatccagaatatgcaaagattcacgatctgctgaagacgattggattagatatcggagttgctgagattagccaactcgccgcccgcacgcaagagcgactgcacggaaagaagccgtcactccgctcatctgctgaccggagatcttcagtggatcgatacttcagcgccgaccactgcagttctgtggatcaccgcttttccgccgacaggtgcagcagcgtggatcattgcttttccgcagacagacggtcgtctgatccccacaggctagagagcagggaggctcatcatagcaatactcactcaccagaggtgagccatccccatcccccttcacccgtggacccttatctcctcaccaaaaattcccccccattcctcaagtccgaccacccagtcggtcatatttctggaccagaggtggtaggctctggcttccaatctagcgtcgctgtgcggtgtatgttgccctctgcaccatcggcccccatccgtttgccacatacagccgctctaagtcagttccacatgcctcgtgcctctcaattcgccgctgctaggataccccctaactatcaaggcccagccatcccacctgctagctttgacgcataccgccactacatggcttatgcagcctctcgttggccgatgtacccaacgagtcagccctctaatcaccccgtgcccgagccacatagaatcatgcctatcaccaaacaggctacaagatcccgccctaatctacgcgtcatccctaccgtgacgcccgacaaaccaaagcagaaggagtcgcttcgcggcagcatcccagcagcacaagtcccagtgcaagtctcaattccctccttaatcagatataatcccgaaaagatcagcgatgagaaaaatcgggccagccagaagcagaaggtgattgaagagcgggaaaagctgaagaacgatcgggaagcccgtcaaaagaagatgtattacctgcgcacggaactggaacggctccacaagcaacagggggagatgctgcgaaaaaagcgcagggaaaaagacggtcacaaagatccactgcttgtggaagttagccggctccaggataatatcatgaaggacatcgccgagctccgccaggaagcggaggaagcagaaaagaaacagagcgagctggacaaagtcgcacagattcttggcattaacatttttgataaatctcagaagtcactcagcgatagcagagagccaaccgagaaaccaggcaaagccgaaaaatcaaagagcccagagaaagtaagcagcttctctaatagttcctcaaacaaagagagcaaagtgaacaatgaaaaattccgtacgaaaagccctaagcccgccgagagtccgcagtctgccaccaagcaattggaccagccaaccgcagcctacgaatattacgatgcggggaaccactggtgcaaggactgcaacactatctgcggcaccatgttcgacttctttacccacatgcacaataaaaagcatacccagacacttgacccttacaacaggccatgggcatcaaaaacacagtctgaggccaaacaagacgctatcaagagaactgataagatcacagttccagctaaggggagtgaattcctagtaccaatcagcggtttttactgccagctgtgtgaagagttcctcggggacccgattagtggggagcaacacgtcaaggggcaccagcacaacgagaaatataaaaagtacgtggacgagaaccccctgtatgaagagcgtagaaatctcgaccggcaggctggacttgccgtggtgttggagacggagcggcggaggcagtccgagctcaagcggaaattgtccgaaaaacctaaagaagaaaaaaaggaaaaaaaagccaaggcagtaaaggaggtcaaggaggatgataaggttagcgaaaagttggaggatcaattatcagaggggaggaactccccagagaaggctgaaaataagcgtaatacaggaattaagctccagctgaaggaagaggtgaaaaaggagtcccctacctcgagttctttcggcaagtttagctggaagaaaccagagaaagaggaggagaaaagcagtttggtgacgccatcaatttccaaagaagaaatcctagaatcgtccaaagacaaggaggacggtaaaacggaagcaggcaaggcgaaaccaattaaaatcaagttgtcgggcaagaccgtggttgcccacacctccccgtggatgccagtagttactacttcaacccaaacaaaaatccggcccaatctacctataccctccacagtgctccggaagtcttgtagcgccaccatgagcaaaccagccccactgaatacttttctgtcgatcaaatcgtctggtacaactgccaaacctctgccagtggtcaaagaaagttccgccgatttattgctcccgccagacattattagtaaagcgttcggaggggaggaagtgattctgaaaggatccccagaggagaaagtggttcttgccgaaaaatctgagccctcccacctgccagagcaaattctcccaccccctcctccccctcctcccccacctcctccccccccacccgtgattccccatcccgccgctccttctgccgctcaggctaatgcaattttggcgcccgtgaaatctaacccagtcgtctcccagacactttcgccagggttcgttgggcccaacatcctgaatcccgttctgcccgtagctataatggcctctgcacaacccgcagccatccctagcgatgaaaccgctcccggagtgtccgagtctgacagggatcagaccttgtttagcgtccttgtacggccccctccccctctgagcagtgtgttctccgaacaggctaagaaactggaaaagaggaattcatgcctggccactgcaaacgccaaagatctgtacgatatattttattcctcaggggggaaaggggcaccagagacaaagggcgcgcccgaaaccaaactgtctgggggccccttggctaacggagagaactctaatctttcccgcacaaagtcctctgatacttcatccacttcgcccctgaattcatccgcctcacaagaggaactccaccaggacgagggcctggtggctgcgcccatcgtttcaaactctgagaaacctatagcgaagacattggtagccttaggtaaatggtccgtggttgagcatgtcggacctaaatcaactggctctacctatggtttcctgcagcctctgacccgactatgccagagtaggccttatgaaaccataacgcccaaaactgacaccctcgccatctggacctcctccagcttccagagtgacaccagcagagacatttcccccgagaagagcgaactggatctgggtgagcctggcccccctggcgttgaacccccaccacagcttctcgacatccagtgcaaagaatctcagaagctggtcgaaatccatctccgtgaaagcgtcaatcaggacaaggagtcacaagagctgaggaagagtgaagattgcagagaaagcgagatagagacaaacactgagttgaaagaacgcgtcaaagaacttagtgaggggattgtggacgaaggagtgagcacctccataggccctcattcaatcgacgacagtaatttgaatcacggtaataggtacatgtgggagggggaagtaaaacagccgaacctcttaatgatcgataaggaagcagaacagtcgaacaagcttatgactggaagtgagacaccctccaaggtggtgatcaagctgagtccacaagcgtgcagctttacaaaagccaagttagactcgtttctcagcgaagccagatctctgctcaacccacaggacacccccgtgaagatttcagctcctgagctgctccttcactctcctgctcgctctgcgatgtgtcttacagggagtcctcaggagcaaggtgtgtctgtggtgagcgaagagggtctcgaaaactccgctcctgagtcagcaagtagaacatccagatatcgctcccttaagctcaaacgggagcgatctaaggacttccaggtgaaaaaaatctacgaactcgccgtgtgggatgagaataagaagcgaccagagacctgggagtcacccgaaaaacctaagaccgaagccctggagttacaggatgttcatcctgagttgacagtgactattgaatcaaaggcactggaggactttgaagccaccgacctgaaggttgaggagttgaccgcactgggaaatctgggtgatatgccagtggatttctgcaccacacgagtgagtcccgcccaccgatccccgacggtgctttgtcagaaggtatgcgaggagaactcagtaagtcctatcgggtgcaactcctccgatcctgctgatttcgaacctattccaagctttagtggctttcctctcgatagcccaaagacactggtactcgacttcgagactgaaggggagcggaattcccccaaccctaggagcgtgaggatcccgagtccaaatattctcaaaactggtctaacagaaaacgtagacagaggactggggggtctagagggcacacaccaagcccttgacctgctggccggcggaatgatgccagaagaggttaaggagtcctctcaattggataaacaagaatctctgggtttagaattgaaaacaattaatagtgccggcctcggccctagcccctgcctgcccgacctcgttgattttgtcacacgcacgtctggcgttcagaaagataaattgtgctcacctctctctgaaccaggggacccgagtaaatgcagttctctggagctgggacccctgcagctggagatatctaacgccagtacaaccgaagtggcaatcttacaggttgatgatgacagcggtgacccccttaacctggtcaaggcacccgtttccagatcccccccacgggagcaggtgatcgaggataatatggtgccgcagggcatgcctgagcaggagactaccgtgggtgccatccaggaccacactgagtcctctgttcacaactag

SEQ ID NO: 179533 - DNA, 6839 bp, Artificial Sequence
  derived and/or modified sequence
atgtatagatcgagcgcccgatccagcgtttccagccataggccaaaggatgatggcggtgggggaccaaggtctggacgtagctctggctccagctctggccctgctcgtagatctagcccacccccacctccttccggctcatcttcacggacacctgcaaggcggcctcgcagcccaagtggtcatcgcggtcgaagagcttcccccagcccgccaaggggcaggagggtgagccccagcccaccacgggcacggcgtgggtcaccttccccaccccgagggcgacgcttgtttcctccaggacccgcagggttccgaggaagctctcgtggggaaagtagggccgattacgccagagatggcagaggcgaccatcccggtgattctggttcacgcagaagatcacccggtctttgtagcgattccctggaaaaatcactcagaatcacagtgggcaacgatcacttttgtgtctccacacccgaaagaaggagattgtccgataggttaggctcacccgtggacaatctcgaggatatggacagagacgatttgaccgacgattccgtatttacacgatcaagccagtgttccaggggcctggaacggtacataagccaggaagaggggccactgagccccttcctgggccagcttgatgaggattacagaaccaaagaaacgtttctacacaggtccgactattctcctcatatctcatgtcatgacgagctgctgagaggcaccgagcggaatcgcgaaaagctgaaaggatactcaattaggtcagaggagcgctcccgtgaagccaagaggcccaggtatgacgatactgtgaaaatcaactcaatgggtggcgatcacccctcttttacctccggcacccggaactatcgccagaggaggcggtctccatccccgaggtttttagatccagagtttcgtgagctggacctggctcgcaggaagcgggaggaagaggaggaaagaagccgatcgctgtctcaggagcttgtaggggttgatggcggaggcacaggctgttctattcccggattatctggtgtcctaacggcttcagaacctggctatagtctgcacagaccagaggaagtttccgtcatgcctaagaaaagcattttgaaaaagcggattgaggtcgacataatggaaccttccatgcagttagagtctttttcctcctccacgtcctccagccaagaccaccccctgtactccggccatccttccctccctctcagtggcgcaatcgctgccttcgcatccgagatcgaaaacaaggggactatggtggagacagcactcaaggagccacagggtaacctgtaccagtggggacctctcccaggcattcctaaagacaacagccctctgcgtgagaagtttggttctttcctttgccacaaggacaacttagacctgaaggctgagggcccagagcggcatactgactttctgctgccacatgaacgggcttcacaggatggaagcggtttctcccgtatcctgtctatgcttgcagatagcaccagtactcaggagaaaagacgccgatcctttcctgatatagaggatgaggaaaaatttctgtatggcgatgaagaggaggacctcaaagctgaatctgttccaaaaccacttggttcaagcgagtcagaagtcatgaggcaaaaagcaagctccttgccttcatcagctcctgccgttaagctggaatcactggaagagactaatccagaatatgcaaagatccatgatctgctgaagaccatcggactggacattggcgtcgcagagatctcacagctagcggcaagaactcaggagaggttgcacggaaagaagccctccctcagatcatccgctgatcgaagaagtagcgtggatagatacttctctgcggaccattgctcgtctgtggaccatcgattcagcgccgacagatgcagctctgtggatcattgtttttccgccgaccgaaggtccagcgatcctcaccgtttggagtcccgcgaggctcatcatagtaacacacactcacctgaagtcagccacccccaccctccatcccccgtggatccatacttgctcaccaagaattctccacctttcttaaagtctgaccatcccgtgggccatatttctggaccagaagtggtcggcagtgggtttcagtcctcagtcgctgtgcgctgtatgctcccctctgcgccaagtgctcctatcaggcttccccacacagcggcactcagtcagttccatatgccaagagcctctcagtttgctgcagctaggatccctcctaattaccaggggcctgctatcccacccgcttcatttgacgcataccgccactacatggcttacgcagcctctcggtggccgatgtatcccacatcacaacctagcaaccatcccgtgcctgagccccacagaatcatgcctatcactaagcaggcaactcggtcccgtcccaacctacgtgtaatcccaactgtgacgcccgataagccgaagcaaaaggaatctttgcggggaagtataccagcagcccaggtgccagttcaggtgtctatcccttcattgataaggtataatcccgagaagataagcgacgagaagaatcgggcaagtcaaaaacaaaaggtcatagaggagagggaaaaactgaaaaacgaccgcgaggctcgtcaaaagaagatgtactatcttcgcactgagctggaacgcctccacaagcaacagggagaaatgttgaggaaaaaaaggcgcgaaaaggatggacataaggacccattgctagtcgaagttagtcgcctgcaggataatataatgaaggacattgccgagcttcgccaggaggccgaagaagcagagaagaaacagagtgagctggataaagtcgctcaaattcttgggattaacatctttgacaagtctcaaaaatccctgtccgactcacgggagccaactgagaaacccggtaaagctgaaaaatcgaaatctcctgagaaggtctcatcattcagcaacagctctagcaataaagagagcaaagtaaacaacgaaaagtttagaactaagtccccaaaacccgctgagagcccccagtcagctactaagcagctggaccagccgacggctgcatatgagtattacgacgcaggaaatcattggtgtaaagactgcaataccatttgcgggactatgttcgacttcttcacacacatgcataataagaaacacacacaaactcttgatccctacaatcgaccttgggcctccaagacgcagagcgaagctaaacaggacgcaattaagagaaccgataagatcaccgtccctgccaaagggtccgaattcctcgtgccaataagtggattttactgccagctctgcgaggagtttctgggagacccaatctccggggaacagcatgtcaaggggcatcagcacaacgaaaaatacaagaaatatgttgacgagaaccctctttacgaagagcgccgaaatttggaccgtcaggccggactggcagtcgttctcgagaccgaacggagacgacagtctgagctaaagcgaaagctcagcgaaaaacctaaagaggaaaaaaaggagaagaaagcgaaagctgtgaaagaggtgaaggaggatgacaaggtctctgagaagctggaggaccaactgagcgaaggtcggaacagtcccgaaaaggccgaaaacaagcgcaacacaggaataaagctacagcttaaggaagaggttaaaaaggagtcaccaacatcctccagcttcggaaagtttagctggaagaaacccgagaaggaggaagagaagagttcactcgtgactccttcaattagcaaggaggaaatactcgaaagctctaaggacaaggaggatggaaaaacggaagcaggtaaagccaaaccaataaagatcaaactgagcggaaagactgttgtggctcacacttctccgtggatgcctgtggtgactacgagtactcagaccaagattcgcccaaacctgccgatccctagcaccgtgctgcgaaagtcatgctctgctaccatgagtaaaccagctcccctaaacacttttctgagcatcaaatcaagcgggacaactgccaaaccccttccagtggtaaaggaatcctccgccgatctactcttgccgccagatatcatttctaaggccttcgggggagaagaagtcatactgaagggctccccggaggagaaagttgtattggccgaaaaaagtgagccatctcacctcccggaacagatcctgcccccaccccctccgccacccccacctcctccacctcctcctcccgtgatcccacaccccgcagcgcctagcgcagcacaggcgaatgcaatattggctcctgttaagtcaaatcctgtcgtgagccaaaccctcagcccgggttttgttgggcctaacatactaaatcccgtgcttcccgtggccattatggcttctgcccagcctgcagcaatcccttctgatgagacggccccaggagtctctgagagcgaccgcgaccagaccctgttctcagtgctcgtccgaccacccccaccactatcttctgtgttctcagaacaggcgaaaaagctggaaaaacggaacagctgcttagccaccgccaatgccaaagatctctatgacatcttttactcttccggcggaaagggagcaccagagacaaagggagcccctgaaacaaaactctccgggggaccccttgccaacggagaaaacagtaacttatcacggaccaagtcttcggatactagtagcaccagtccactgaattcgtcggctagccaggaagaactgcaccaggacgaaggcctggtagcagctccgatagtctctaactccgaaaagccaatcgcaaagacactggttgcgctgggcaaatggagtgtcgtggagcatgtgggcccaaaatcgacagggagcacctatggcttcctccagccattgacaaggctttgccaaagccggccttacgaaaccattacgccaaaaaccgacactttagccatttggacgtcgtcctcttttcaatcagacaccagccgggacatctcccccgagaaaagcgaactggacctgggtgagcccggacctccaggggtggaacccccaccccaacttctggacattcaatgtaaagagtcccagaaacttgtggaaatacatctgagggagagtgtgaatcaagacaaagaaagtcaggaactgagaaaatctgaagactgtagagagtcagaaattgagaccaacacagagctgaaagagagggtgaaagagctttccgaagggattgtggacgagggcgtctcaacatcaattggaccccactcaatcgacgacagcaacctgaatcacggcaacagatatatgtgggaaggagaagtgaagcagcctaacctgctcatgatcgacaaggaggccgaacagtctaataagctcatgaccggctcggaaacgccatcaaaagtcgtgatcaagctgtcgcctcaagcctgctcttttacgaaagccaagctcgacagttttcttagcgaggccaggtcactacttaacccccaggacacgccagtcaagatttctgctcctgaactgctgttgcacagccctgcgagatccgccatgtgtctcactggatcaccacaggagcagggtgtgtctgtagtatcagaagagggcttggaaaattcggcgcctgaatcagccagcaggactagcaggtatcgcagccttaagttgaaaagagagcggtccaaggatttccaagtaaaaaagatctacgaactcgcagtgtgggatgagaataaaaagagacccgagacatgggagagcccagagaaacccaagaccgaggcactggagttgcaggacgtccacccagaactcaccgttaccatagagagcaaggccctggaggacttcgaagcaacggatctcaaggtagaggaactgacagccctcggcaacctgggtgatatgcctgtggatttctgtacgactcgggtgagcccagctcacaggtcacctacagtgctctgtcagaaagtgtgtgaggaaaactccgttagcccgatcggttgcaactcctctgaccccgcagactttgagcccatcccctctttctctggatttcccctggatagtcccaaaactttggtgttggacttcgaaaccgagggggagaggaattcacctaatccgcgaagcgtaaggataccatctcctaatatcctgaagaccggactcacggaaaacgtcgacagaggtctgggcggtttggagggcacccatcaggcgctagatctgctggccggtggcatgatgcccgaggaggtaaaagagtctagtcagctcgataagcaggagtcattggggctcgaactcaagacgatcaattccgctgggctgggtccctccccttgtctgccagatcttgtggattttgtgacacgcacgagcggcgtgcaaaaggacaaactctgcagccctctgagcgaaccaggagatccaagcaagtgtagttcactggaacttggaccacttcagcttgagattagcaatgcctcaactaccgaagtcgccatcctccaggtggacgacgatagcggtgacccactaaatctggtgaaggcgcctgtgtcgaggagcccacccagggaacaggttattgaagataacatggttccacaggggatgcccgagcaagagactaccgtaggcgcaatccaagaccatactgaatcttctgtgcacaatta

SEQ ID NO: 179534 - protein, 517 aa, Artificial Sequence
  derived and/or modified sequence
MASDGARKQFWKRSNSKLPGSIQHVYGAQHPPFDPLLHGTLLRSTAKMPTTPVKAKRVSTFQEFESNTSDAWDAGEDDDELLAMAAESLNSEVVMETANRVLRNHSQRQGRPTLQEGPGLQQKPRPEAEPPSPPSGDLRLVKSVSESHTSCPAESASDAAPLQRSQSLPHSATVTLGGTSDPSTLSSSALSEREASRLDKFKQLLAGPNTDLEELRRLSWSGIPKPVRPMTWKLLSGYLPANVDRRPATLQRKQKEYFAFIEHYYDSRNDEVHQDTYRQIHIDIPRMSPEALILQPKVTEIFERILFIWAIRHPASGYVQGINDLVTPFFVVFICEYIEAEEVDTVDVSGVPAEVLCNIEADTYWCMSKLLDGIQDNYTFAQPGIQMKVKMLEELVSRIDEQVHRHLDQHEVRYLQFAFRWMNNLLMREVPLRCTIRLWDTYQSEPDGFSHFHLYVCAAFLVRWRKEILEEKDFQELLLFLQNLPTAHWDDEDISLLLAEAYRLKFAFADAPNHYKK

SEQ ID NO: 179535 - protein, 470 aa, Artificial Sequence
  derived and/or modified sequence
MPTTPVKAKRVSTFQEFESNTSDAWDAGEDDDELLAMAAESLNSEVVMETANRVLRNHSQRQGRPTLQEGPGLQQKPRPEAEPPSPPSGDLRLVKSVSESHTSCPAESASDAAPLQRSQSLPHSATVTLGGTSDPSTLSSSALSEREASRLDKFKQLLAGPNTDLEELRRLSWSGIPKPVRPMTWKLLSGYLPANVDRRPATLQRKQKEYFAFIEHYYDSRNDEVHQDTYRQIHIDIPRMSPEALILQPKVTEIFERILFIWAIRHPASGYVQGINDLVTPFFVVFICEYIEAEEVDTVDVSGVPAEVLCNIEADTYWCMSKLLDGIQDNYTFAQPGIQMKVKMLEELVSRIDEQVHRHLDQHEVRYLQFAFRWMNNLLMREVPLRCTIRLWDTYQSEPDGFSHFHLYVCAAFLVRWRKEILEEKDFQELLLFLQNLPTAHWDDEDISLLLAEAYRLKFAFADAPNHYKK

SEQ ID NO: 179536 - protein, 458 aa, Artificial Sequence
  derived and/or modified sequence
MASDGARKQFWKRSNSKLPGSIQHVYGAQHPPFDPLLHGTLLRSTAKMPTTPVKAKRVSTFQEFESNTSDAWDAGEDDDELLAMAAESLNSEVVMETANRVLRNHSQRQGRPTLQEGPGLQQKPRPEAEPPSPPSGDLRLVKSVSESHTSCPAEELRRLSWSGIPKPVRPMTWKLLSGYLPANVDRRPATLQRKQKEYFAFIEHYYDSRNDEVHQDTYRQIHIDIPRMSPEALILQPKVTEIFERILFIWAIRHPASGYVQGINDLVTPFFVVFICEYIEAEEVDTVDVSGVPAEVLCNIEADTYWCMSKLLDGIQDNYTFAQPGIQMKVKMLEELVSRIDEQVHRHLDQHEVRYLQFAFRWMNNLLMREVPLRCTIRLWDTYQSEPDGFSHFHLYVCAAFLVRWRKEILEEKDFQELLLFLQNLPTAHWDDEDISLLLAEAYRLKFAFADAPNHYKK

SEQ ID NO: 179537 - DNA, 1554 bp, Artificial Sequence
  derived and/or modified sequence
atggccagcgacggcgccagaaagcagttctggaagagaagcaacagcaagctgcccggcagcatccagcacgtgtacggcgcccagcacccccccttcgaccccctgctgcacggcaccctgctgagaagcaccgccaagatgcccaccacccccgtgaaggccaagagagtgagcaccttccaggagttcgagagcaacaccagcgacgcctgggacgccggcgaggacgacgacgagctgctggccatggccgccgagagcctgaacagcgaggtggtgatggagaccgccaacagagtgctgagaaaccacagccagagacagggcagacccaccctgcaggagggccccggcctgcagcagaagcccagacccgaggccgagccccccagcccccccagcggcgacctgagactggtgaagagcgtgagcgagagccacaccagctgccccgccgagagcgccagcgacgccgcccccctgcagagaagccagagcctgccccacagcgccaccgtgaccctgggcggcaccagcgaccccagcaccctgagcagcagcgccctgagcgagagagaggccagcagactggacaagttcaagcagctgctggccggccccaacaccgacctggaggagctgagaagactgagctggagcggcatccccaagcccgtgagacccatgacctggaagctgctgagcggctacctgcccgccaacgtggacagaagacccgccaccctgcagagaaagcagaaggagtacttcgccttcatcgagcactactacgacagcagaaacgacgaggtgcaccaggacacctacagacagatccacatcgacatccccagaatgagccccgaggccctgatcctgcagcccaaggtgaccgagatcttcgagagaatcctgttcatctgggccatcagacaccccgccagcggctacgtgcagggcatcaacgacctggtgacccccttcttcgtggtgttcatctgcgagtacatcgaggccgaggaggtggacaccgtggacgtgagcggcgtgcccgccgaggtgctgtgcaacatcgaggccgacacctactggtgcatgagcaagctgctggacggcatccaggacaactacaccttcgcccagcccggcatccagatgaaggtgaagatgctggaggagctggtgagcagaatcgacgagcaggtgcacagacacctggaccagcacgaggtgagatacctgcagttcgccttcagatggatgaacaacctgctgatgagagaggtgcccctgagatgcaccatcagactgtgggacacctaccagagcgagcccgacggcttcagccacttccacctgtacgtgtgcgccgccttcctggtgagatggagaaaggagatcctggaggagaaggacttccaggagctgctgctgttcctgcagaacctgcccaccgcccactgggacgacgaggacatcagcctgctgctggccgaggcctacagactgaagttcgccttcgccgacgcccccaaccactacaagaagtag

SEQ ID NO: 179538 - DNA, 1413 bp, Artificial Sequence
  derived and/or modified sequence
atgcccaccacccccgtgaaggccaagagagtgagcaccttccaggagttcgagagcaacaccagcgacgcctgggacgccggcgaggacgacgacgagctgctggccatggccgccgagagcctgaacagcgaggtggtgatggagaccgccaacagagtgctgagaaaccacagccagagacagggcagacccaccctgcaggagggccccggcctgcagcagaagcccagacccgaggccgagccccccagcccccccagcggcgacctgagactggtgaagagcgtgagcgagagccacaccagctgccccgccgagagcgccagcgacgccgcccccctgcagagaagccagagcctgccccacagcgccaccgtgaccctgggcggcaccagcgaccccagcaccctgagcagcagcgccctgagcgagagagaggccagcagactggacaagttcaagcagctgctggccggccccaacaccgacctggaggagctgagaagactgagctggagcggcatccccaagcccgtgagacccatgacctggaagctgctgagcggctacctgcccgccaacgtggacagaagacccgccaccctgcagagaaagcagaaggagtacttcgccttcatcgagcactactacgacagcagaaacgacgaggtgcaccaggacacctacagacagatccacatcgacatccccagaatgagccccgaggccctgatcctgcagcccaaggtgaccgagatcttcgagagaatcctgttcatctgggccatcagacaccccgccagcggctacgtgcagggcatcaacgacctggtgacccccttcttcgtggtgttcatctgcgagtacatcgaggccgaggaggtggacaccgtggacgtgagcggcgtgcccgccgaggtgctgtgcaacatcgaggccgacacctactggtgcatgagcaagctgctggacggcatccaggacaactacaccttcgcccagcccggcatccagatgaaggtgaagatgctggaggagctggtgagcagaatcgacgagcaggtgcacagacacctggaccagcacgaggtgagatacctgcagttcgccttcagatggatgaacaacctgctgatgagagaggtgcccctgagatgcaccatcagactgtgggacacctaccagagcgagcccgacggcttcagccacttccacctgtacgtgtgcgccgccttcctggtgagatggagaaaggagatcctggaggagaaggacttccaggagctgctgctgttcctgcagaacctgcccaccgcccactgggacgacgaggacatcagcctgctgctggccgaggcctacagactgaagttcgccttcgccgacgcccccaaccactacaagaagtag

SEQ ID NO: 179539 - DNA, 1554 bp, Artificial Sequence
  derived and/or modified sequence
atggccagtgacggcgctcggaaacagttctggaagcgatcaaatagcaagctgcctggaagcatccagcacgtgtatggcgctcaacacccccccttcgatcccctcctgcatggaactttgctgcggagtactgccaaaatgcccacaacaccagtcaaagctaagagggtatctactttccaggaattcgagagtaacacaagcgacgcatgggacgctggagaggatgacgatgagctgctagccatggccgccgaaagtcttaattcggaggtcgtgatggaaaccgccaatcgcgtgctacggaaccattctcaacgacaaggaagaccaaccctgcaggagggtccaggcctgcagcagaagcccagacccgaggccgaacctccctctccccctagtggggatttgaggttggtgaagtcagtgtctgagagccataccagttgtcctgccgaatcggctagtgatgccgcccctctacaaagatcccagtctttgcctcactccgcaacggttacgctgggcgggacttccgacccctctactttgagtagtagtgccctatccgagagggaagcttctcgccttgacaagttcaaacagctgctggcgggccctaacaccgatctcgaagagctccggaggctgtcctggtccggcatccccaagccagtgcggccaatgacatggaaactgctcagtggatacctccctgctaatgtcgacaggagacccgcaaccttacagcgtaaacagaaggaatacttcgcattcatagaacactactacgactcaagaaacgatgaggtccatcaggatacttaccgacagattcacatagacatccctcgaatgagtcccgaagcacttatacttcagccaaaagtaacagaaatttttgagcgaattctctttatttgggctattcggcacccagcatctggctatgtgcagggcataaacgatctggtgacgccatttttcgtagtgtttatttgcgagtacattgaggcagaggaagtcgacaccgtcgatgtcagtggggttccagcagaagtgctgtgtaatattgaagcagacacatactggtgcatgtctaaattgctggatggaattcaggacaactacacgtttgcccagcctgggatacagatgaaggtgaaaatgttggaggaactcgtcagtcggatcgatgaacaggtccacagacacctagatcagcatgaagtaaggtatctgcagttcgcctttaggtggatgaacaaccttctgatgcgtgaggtcccgctgagatgtacaattcggctgtgggacacctaccagagcgagcccgacggcttctcgcactttcacctctacgtgtgcgcagccttcttagttaggtggcgcaaggaaatcctcgaagaaaaggacttccaagagttgttactcttccttcagaatctgcccaccgctcattgggacgatgaggatattagtctgctcttagccgaggcatatcgactaaaatttgcttttgcagatgcgccgaaccactacaaaaaatag

SEQ ID NO: 179540 - DNA, 1413 bp, Artificial Sequence
  derived and/or modified sequence
atgcctactaccccagtcaaggctaaacgtgtgagtacctttcaggaatttgaatctaacacgtccgatgcgtgggatgctggagaagatgatgatgaactcctcgccatggctgccgagtcccttaactccgaagtggtcatggagaccgccaatagggtcttacgaaaccacagccaacgccaaggcagacctacactacaggaaggccccggcttacagcagaagcctcgcccagaggcagaacctccttctccccctagtggcgatctccgcctcgtgaagagtgtttctgagtcacacacttcctgccccgccgagtcagccagtgatgccgcaccccttcaacgatcccaaagtttgccccattccgccactgttactctggggggcacttcagacccctcaacactctcctcaagcgcgttgtccgaacgggaagcttctcggctggataagttcaaacagctgctggctggccctaatacggatttggaagaactgcggcggctgtcttggtctggaattcctaagcccgtgcgcccaatgacttggaagttgctttctggctacctccctgccaacgtggatcgacgcccagccactctgcagcgcaagcagaaggaatattttgcatttattgagcactattacgacagccgcaatgatgaagtacatcaagatacctaccgccagatccacatcgatatccccagaatgtctccggaggctctgattctgcagccaaaggtcactgagatattcgagcgaatcttgttcatatgggccattcgtcatccagcatctggatacgtccagggcattaacgacttggttactcctttctttgttgtgttcatttgcgagtacatcgaagctgaagaggttgacactgtcgacgtcagcggagtgccggccgaggttctgtgtaacatcgaagcagacacctactggtgcatgtcaaagctgctggacggcattcaggacaattatacttttgcacaacccggcatacagatgaaagtaaaaatgctagaggaactggtttcgaggatcgacgagcaggttcaccgacatttggatcagcacgaggttaggtatttacagttcgcctttcgctggatgaataaccttctcatgagagaagtgcctctgagatgtaccataagactctgggacacataccagtccgagcctgacgggtttagtcactttcatttatatgtttgcgcagcttttttagtgagatggcggaaagaaattctcgaagagaaagattttcaggaactgcttctgttcctgcaaaacctccctaccgctcactgggatgacgaagatatttctcttctgcttgccgaagcctaccgcctcaaatttgccttcgcagacgctccaaaccattacaagaaatag

SEQ ID NO: 179541 - DNA, 1554 bp, Artificial Sequence
  derived and/or modified sequence
atggccagtgatggagccaggaagcagttctggaagaggagcaacagcaagctgcccggcagcatccagcacgtgtatggagcccagcaccccccatttgaccccctgctgcacggcaccctgctgcggagcacagccaagatgcccaccacccctgtgaaggccaagagggtgtccaccttccaggagtttgagagcaacaccagtgatgcctgggatgctggggaggatgatgatgagctgctggccatggctgctgagagcctgaacagcgaggtggtgatggagacagccaacagagtgctgaggaaccacagccagaggcagggccggcccaccctgcaggagggccctggcctgcagcagaagcccaggcctgaggccgagccccccagccccccatctggggacctgcggctggtgaagtctgtgtctgagagccacaccagctgcccagctgagagcgccagtgatgctgcccccctgcagaggagccagagcctgccccacagcgccaccgtgaccctgggcggcaccagtgaccccagcaccctgagcagcagcgccctgtctgagcgggaggccagccggctggacaagttcaagcagctgctggccggccccaacacagacctggaggagctgcggcggctgtcctggagcggcatccccaagcctgtgcggcccatgacctggaagctgctgagcggctacctgcctgccaacgtggacagaagacctgccaccctgcagaggaagcagaaggagtactttgccttcatcgagcactactatgacagcagaaatgatgaggtgcaccaggacacctaccggcagatccacatcgacatccccaggatgagccctgaggccctgatcctgcagcccaaggtgacagagatctttgagcgcatcctcttcatctgggccatccgccacccagccagcggctacgtgcagggcatcaatgacctggtgacccccttctttgtggtgttcatctgtgagtacatcgaggccgaggaggtggacacagtggatgtgtctggagtgcctgctgaggtgctgtgcaacattgaagctgacacctactggtgcatgagcaagctgctggatggcatccaggacaactacacctttgcccagcccggcatccagatgaaggtgaagatgctggaggagctggtgtccagaattgatgagcaggtgcaccgccacctggaccagcacgaggtgcgctacctgcagtttgccttccgctggatgaacaacctgctgatgagggaggtgcccctgcgctgcaccatccggctgtgggacacctaccagagcgagccagatggcttcagccacttccacctgtatgtgtgtgccgccttcctggtgcgctggaggaaggagatcctggaggagaaggacttccaggagctgctgctcttcctgcagaacctgcccacagcccactgggatgatgaggacatcagcctgctgctggccgaggcctaccgcctgaagtttgcctttgctgatgcccccaaccactacaagaagtag

SEQ ID NO: 179542 - DNA, 1413 bp, Artificial Sequence
  derived and/or modified sequence
atgcccaccacccctgtgaaggccaagagggtgtccaccttccaggagtttgagagcaacaccagtgatgcctgggatgctggagaagatgatgatgagctgctggccatggctgctgagagcctgaacagcgaggtggtgatggagacagccaacagagtgctgaggaaccacagccagaggcagggccggcccaccctgcaggagggccctggcctgcagcagaagcccaggcctgaggccgagccccccagcccccccagcggggacctgcggctggtgaagtctgtgtctgagagccacaccagctgcccagctgagagcgccagtgatgctgcccccctgcagaggagccagagcctgccccacagcgccaccgtgaccctgggcggcaccagtgaccccagcaccctgagcagcagcgccctgtctgagcgggaggccagccggctggacaagttcaagcagctgctggccggccccaacacagacctggaggagctgcggcggctgtcctggagcggcatccccaagcctgtgcggcccatgacctggaagctgctgagcggctacctgcctgccaacgtggaccggcggcctgccaccctgcagaggaagcagaaggagtactttgccttcatcgagcactactatgacagcagaaatgatgaggtgcaccaggacacctaccggcagatccacatcgacatccccaggatgagccctgaggccctgatcctgcagcccaaggtgacagagatctttgagcgcatcctcttcatctgggccatccgccacccagccagcggctacgtgcagggcatcaatgacctggtgacccccttctttgtggtgttcatctgtgagtacattgaagctgaggaggtggacacagtggatgtgtctggagtgcctgctgaggtgctgtgcaacatcgaggccgacacctactggtgcatgagcaagctgctggatggcatccaggacaactacacctttgcccagcccggcatccagatgaaggtgaagatgctggaggagctggtgtccagaattgatgagcaggtgcaccgccacctggaccagcacgaggtgcgctacctgcagtttgccttccgctggatgaacaacctgctgatgagggaggtgcccctgcgctgcaccatccggctgtgggacacctaccagagcgagccagatggcttcagccacttccacctgtatgtgtgtgccgccttcctggtgcgctggaggaaggagatcctggaggagaaggacttccaggagctgctgctcttcctgcagaacctgcccacagcccactgggatgatgaggacatcagcctgctgctggccgaggcctaccgcctgaagtttgcctttgctgatgcccccaaccactacaagaagtag

SEQ ID NO: 179543 - DNA, 1554 bp, Artificial Sequence
  derived and/or modified sequence
atggccagcgacggcgcccggaagcagttctggaagcggagcaactcgaagctgccaggcagtatacaacacgtctacggagctcagcatccaccattcgatccattgcttcatggcacgttactccgctctaccgcaaaaatgcccaccacgcccgtaaaagcaaagcgggtctctacctttcaagagttcgaaagcaatacaagcgacgcgtgggatgctggtgaggatgacgatgaactacttgccatggccgccgaatcgctgaacagtgaggtggtcatggagactgcaaatagggtgctgcggaatcattctcagcgccaaggcaggcctacactccaggaaggtcctggcctgcagcagaagcctaggcccgaagcagagccgcccagtcctccttcaggtgatctacgactggtgaagtccgtgtctgaatcccatactagttgtcctgcggagtctgcctcagatgcggcccctctccagcggagccaatccctgccccacagtgcaacagtcacgctagggggaacctccgacccaagtactctgagttccagcgccctctccgagcgcgaagcctcccgccttgataagtttaaacagctcttggctggccccaataccgacctcgaggagctaaggaggctgtcgtggtccggaatccctaagccagtaagaccgatgacatggaaactcctctcaggctacctccccgccaacgtagatcgccgaccagccaccctccaacgaaaacaaaaagagtactttgcgttcatcgaacattattatgactcccgcaacgatgaggtccatcaggatacttatcgccaaatacacatagatatcccgcggatgtcccccgaggcactgattctgcagcctaaagttaccgagatttttgaacgtatcctgtttatttgggccatccggcatccggcctctggctatgtacagggtatcaacgatctcgtcacaccctttttcgtggtctttatttgtgagtatatcgaggctgaggaggtggataccgtcgacgtgtcaggcgtcccagccgaggtgctctgcaacatcgaggccgatacatattggtgcatgagtaagctcctcgatggaattcaagataattacacgtttgcccagcctgggatccagatgaaggtgaaaatgttggaagagcttgtcagcaggatcgacgaacaagtgcaccgccatctggatcagcatgaagtgagatatctccagtttgccttccggtggatgaacaacctgctgatgcgcgaggtgcccctccgatgtacaatacggctgtgggacacatatcagagtgaaccagacggattcagtcatttccatctttatgtctgcgctgcatttcttgtgcgatggcgcaaagaaattttggaggagaaggatttccaggagctattactgtttctacagaacctgcccactgcacactgggatgacgaggacatctctttactgctcgccgaagcgtacagactcaagttcgccttcgccgacgcacccaaccactacaagaaatag

SEQ ID NO: 179544 - DNA, 1413 bp, Artificial Sequence
  derived and/or modified sequence
atgcccaccacccccgtgaaggccaagcgggtgagcaccttccaggagttcgaatccaatacctcggatgcttgggatgcgggtgaagatgatgatgagctgctcgctatggccgccgaatcacttaattctgaggtagtgatggaaacggccaatcgggtcctgcggaaccactcacagaggcagggcagacctactttgcaggagggccctgggttgcagcagaagcctcgacccgaagctgagcccccttccccgccctctggagacctccgccttgtcaaatcagtctccgaatcacacacttcttgcccagctgagagtgcttctgacgctgctcctctgcagcggagccagtctttgcctcacagtgcaacggttaccctgggtggaacaagtgatccgagtacactgtctagcagtgctttgtccgagcgtgaggcaagccgcttggacaagtttaaacagctgctggccggtcccaatactgatctcgaagaactgagaagactctcatggagcggtatcccgaaaccggtgagaccgatgacctggaagctgctctcagggtatctccccgcgaatgtggatcggcgacccgccactctccagagaaagcagaaagagtacttcgctttcatcgaacattattatgatagccggaacgacgaagtccaccaggatacctacagacagatacatattgacataccacgtatgtctccagaggcgttgatcctacagcctaaggtgacagaaatcttcgagaggatcctgtttatttgggccattcggcaccccgcttcaggctatgtgcaaggcataaatgacctggtgacccctttcttcgtagtgttcatctgtgagtatatcgaagcggaggaagttgataccgttgatgttagcggtgtgcctgccgaggtcctatgcaatatagaggccgatacgtactggtgcatgagtaagctgttggatgggattcaggacaactataccttcgcccagcccggaatacagatgaaggttaaaatgctcgaggaactcgtcagccgcattgatgagcaggtgcataggcatctagatcagcatgaggtgaggtatctccagttcgcttttcggtggatgaataacttactcatgcgggaagtgccattgcggtgcaccattcgattatgggacacttaccagtcagaacccgatggattctcgcactttcatctgtacgtgtgtgccgctttcctcgttagatggaggaaagaaattcttgaagaaaaggattttcaggagctccttcttttcctgcagaatcttcccacagctcattgggatgatgaggacataagcctgttgctggctgaagcttatcggcttaagtttgcttttgctgatgctccaaatcactacaagaagtag

SEQ ID NO: 179545 - DNA, 1554 bp, Artificial Sequence
  derived and/or modified sequence
atggcgtctgatggtgcccgaaaacagttctggaaacgctctaactcgaagctgcccggtagcatacaacacgtttatggcgcacaacatcctcccttcgaccctttattgcatgggacacttctccgttctacagccaagatgcccacaacaccggttaaggcaaaacgcgtgtctacgtttcaggaattcgaaagtaacaccagcgatgcttgggacgctggcgaagatgacgacgagctgctggcgatggcagcagagagcttaaactctgaagtggtgatggagaccgcaaaccgagtgcttcggaatcatagccagcgccaggggcgtcctacactccaggagggaccaggtttgcaacaaaaacctcggcctgaggcagagccaccctcgccaccttctggtgacctcaggctggtaaaatctgtgtctgagagtcatacttcctgtccggcagagagtgctagtgatgcggctccactccagagatcccaatcattacctcacagcgccactgtgacattagggggaacctccgaccccagtaccctgtcctcctcagccctgtcagaaagagaggcttcccgcctagacaagttcaaacaactgctcgccggtccaaataccgacctcgaggaactcagacgactctcgtggtcgggaatcccaaaacccgtaaggccaatgacctggaaactcctgagcgggtatcttccagccaatgtcgacagacggcctgcaacgctccagcgcaaacaaaaggaatatttcgcctttatcgaacactactacgattccagaaacgatgaggtgcaccaggatacttaccgacaaatacacattgatatcccgaggatgtcaccggaagcactcatcctgcagcccaaggtgacggagatattcgagcgtatcctctttatctgggccattcggcacccagcaagtggctacgtgcagggtattaatgacttggtcacccccttcttcgtggtgtttatttgtgagtacattgaagcagaggaagtggatacagtggatgtgagcggagtgcccgctgaggtgctttgcaatattgaagccgatacttattggtgcatgtccaagcttttggacgggatccaggacaactacaccttcgctcaacccggtatacagatgaaagtgaagatgctcgaagaactggtttctcgtattgacgaacaggttcatagacatctggatcagcacgaagtgcgctacctgcaattcgcttttagatggatgaataacctgctgatgcgcgaggtgccactgcggtgtactatcaggttatgggatacttaccagtctgagcccgacggtttcagccatttccatctctacgtttgcgctgccttcctcgtacgctggcgaaaagagattctggaggaaaaggacttccaggagctgcttctgttcctgcaaaacttgccgacagcgcattgggatgacgaagacatatccctcctgctggctgaagcttaccgtctcaagttcgcctttgcggacgcgcctaatcattataaaaagtag

SEQ ID NO: 179546 - DNA, 1413 bp, Artificial Sequence
  derived and/or modified sequence
atgccaacgacacctgtcaaggctaagcgagtgagtactttccaggaattcgagtctaatacaagcgatgcatgggacgccggagaagatgacgacgaactgcttgcaatggccgctgaaagtttaaactccgaggtggttatggaaactgcgaatcgcgttttacggaaccattcgcagcgccaaggccgtcccactctgcaggaaggaccaggcctacagcagaagcccaggccggaagcagagccacccagtcccccttcaggggacttgcgactcgtgaaaagcgtgagcgaaagccacacctcgtgtcctgccgagagtgcgtcagatgccgctccgctgcagcgttctcaaagcctgccacatagtgctacagtgactctcggcggtacaagtgatcctagcactttaagttcctctgccctttcagaaagagaagcgtcccgcctggacaaatttaagcagctccttgcaggccctaacacagatctggaggaattacgccgtttgtcatggtctggcatcccaaagcctgtccgccctatgacatggaagcttctgagtggctacctgcctgctaatgtggatcgacgccctgccacgttgcagagaaagcaaaaggagtactttgcctttattgagcactattacgattccagaaacgacgaggtacaccaggacacatacagacagattcatattgacatacctaggatgagccctgaggccctgatcttgcagcccaaagtgaccgaaatctttgagaggatcctgtttatctgggccatccggcaccctgcctcgggctacgttcaagggataaatgatctcgtcactccgttctttgttgtgttcatctgtgaatacattgaggcagaagaagtcgatactgtcgacgtgtccggtgttcccgctgaggtgttgtgtaacatcgaagcagatacctactggtgcatgtccaaactgcttgacggcatccaggataattacacttttgcacagcccggtatccagatgaaggtgaagatgttggaagagctggtgagccgcatagacgagcaagtccataggcatctggaccagcatgaagtgaggtatctgcaatttgccttcaggtggatgaacaatctgcttatgcgagaggtccctctgagatgcaccattaggctatgggatacctaccaatcagaacccgatggcttttctcactttcacctgtacgtgtgcgccgcatttttggtgcgatggcggaaggagatcctcgaggaaaaagactttcaggaattgctcctgtttcttcaaaatctgcctaccgctcactgggatgacgaagatattagcctccttcttgcagaggcgtatcgcttgaagttcgctttcgcagacgctccgaatcattacaaaaaatag

SEQ ID NO: 179547 - DNA, 3787 bp, Artificial Sequence
  derived and/or modified sequence
gcgcgtaggcacaacttccggaaggaggcggaagagcttctcggctctaggctctggagtcccgggagcagtgaggggccacccggggcacaggaaagggccgctaggggagggccgggtgcactcggggtgtctgggccgcgggtctgagggatgaggaggggccatggccagcgacggggccaggaagcaattctggaagcgcagcaacagcaagctcccgggcagcatccagcacgtgtatggtgcccagcaccccccctttgatccactgttacatggcactttgctcaggtccacggccaagatgccgaccacaccagtgaaggccaagagggtcagcaccttccaggagtttgagagcaataccagcgatgcctgggacgctggggaggacgacgatgagctcctggccatggcggcggagagcctgaactccgaggtggtcatggagacggccaaccgtgtgctgcgtaaccacagccagcggcaggggcggcccacgctgcaggaggggccagggcttcagcagaagcccaggcccgaggcagagccgccctcaccccccagcggcgacctccggctggtgaagtcggtcagtgagagccacacgtcctgtcctgcagaaagtgccagcgatgccgcccctctgcagaggtcccagtctctcccacactcggccaccgtcacgctgggtggcacatctgaccccagcactctcagcagctcagcgctgagcgaaagagaggcctcccggctcgacaagttcaagcagctgcttgccggccccaacacggaccttgaggaattacggaggttgagctggtccggaatccctaagccagtgcgtccaatgacgtggaagctcctctcaggttaccttcccgccaatgtagaccggagaccagccactctccagagaaaacaaaaagaatattttgcatttattgagcactattacgattctaggaacgacgaagttcaccaggacacatacaggcagatccacatagacatccctcgcatgagccctgaagcgttgatcctgcagcccaaggtgacggagatttttgaaaggatcttgttcatatgggcgatccgccacccagccagtggatacgttcagggtataaatgatctcgtcactcctttctttgtggtcttcatttgtgaatacatagaggcagaggaggtggacacggtggacgtctccggcgtgcccgcagaggtgctgtgcaacatcgaggccgacacctactggtgcatgagcaagctgctggatggcattcaggacaactacacctttgcccaacctgggattcaaatgaaagtgaaaatgttagaagaactcgtgagccggattgatgagcaagtgcaccggcacctggaccaacacgaagtgagatacctgcagtttgccttccgctggatgaacaacctgctgatgagggaggtgcccctgcgttgtaccatccgcctgtgggacacctaccagtctgaaccggacggcttttctcatttccacttgtacgtgtgcgctgcttttctcgtgagatggaggaaggaaatactagaagaaaaagattttcaagagctgctgctcttcctccagaacctgcccacagcccactgggatgatgaggacatcagcctgttgctggccgaggcctaccgcctcaagtttgcttttgccgacgcccccaatcactacaagaaatgagcccaggcccacccgcagctggcctcactgtcccgggtggcgcgccccacctgcctggctggtggtaggcccctgtgagctggtcccgggctgctaaaaggccttgtgaggtggccccaccctccaggggagctggtgaagatgggccacagacctggtctagggctgacaaagacagggacagcctttgttttctgagataccaaagagagccaggggagggccccgggttcggcggccagaggcaggtcaggggtcccctctccctctccctgcaatgtccttgccaaatgactgcctcgtgctgcccctagtccggggcagcctaggaggccgaccctctttggagtcctgctgtctgggtgccagggccggaacgaggtagtggccatctcatacctactctgaaatgcaaaacttctattctgttgagtgaaagaataaaatgtagacaaaatctagaccgagacgttgcgctgacccggggtctctgtgccgcgaggtcccctcacagctgtatttcactgctgctggccctttccctccgtgtgttttcctgcttgcttggtttaaacgtggctgggaagctgaaggctggagtccaagccgtgagcccgccgagtgcctgggaggccgtgggaccaaaggctgggagcagagggaggcctcgccatcgccttactttccaccttgaacctcttttacaagagagaaacccccacctccctgaggtccagggccaagtggccccgccacgcaggtaggcgccggcctcagccagagcccctggaggcccacccaggctgtcgggccatgttgggctggcagacgggcagggggtcgcgtccctgtcatcaaagccctgaaccacagtgctcttctcaccgcagcctggaagcggaatgagcttttggagacttcctgggacttgctgtccttgtccaggtctgccaggtgtaggggaggtgtgactggttccatcatggaccggttcctccatggaccggttcctccgtggaccggttccgccatggaccggttccgccatggaccactcctgccctggaccactcctgccctggaccggttctgccgtggactggttcccgccgtggaccagttcccgctgtatactggttctgccctggactggttcccgctgtggactggttccttggggctctaagtgcggaagggcccagagctggtccctgcccagcgccctgctagggctgtgtccttggctccaggggccttgggactggcttcccagcgttccctcggtgtgtcacaggctgcatgacccctggaatgcgggcagggccacagccacagtctgtctgatccctgagcccaggacaggctcacgtcctcagcgacccactggtgactgacttcccagactctcctctgtccctcaggagcagccgtgtcctctcccaggccctaggacactgccagagactgtgggacatacaggcataagtgatgtgtgtgtttctgcttctgttttaaaaatccagggtcattacacacagcatggaaattagcacaaaatgctgtgcaaacgtcagatgctcccaaaccagcaaagggatgggcttgcttcacatcagatgcgggcacgccttacccctgccttccgtgtccccaccccagggtcaagggttcctcagaccagccatgcctcctcctcctgccgcctccttttctagatggggaggggattccgtcacaagaagagccgcccctcggccgtgtgcaggaagccccatgtcgctttgccgagatcagccctgggaggatccccttctccagctcagatcatgccgtgtggccagaaggctgcggacacaactgacctgcttctcgaggtggttgatgttttaaacaggaagctccacggagttcagccctgtgtgcatttcctcatgtatgtaaacgccaagactgaatgtgagaggtgttggccgcgggccttaagtctgagcagatccatctggaatgttcggggtgtgctgtctggatgtggtgcgctaaaaacacggaataaagatcagtgacaaa

SEQ ID NO: 179548 - DNA, 2267 bp, Artificial Sequence
  derived and/or modified sequence
agaagtctgtgcccttacccatcacagcctcatccttatctcctccattccctaggggacttaacaggtgttgaaattattacagagaaagctgactcactcaccaggaatctgatcctgctgtgggctggcttgggtggaggtgttcctcccgcccccgcacccatcctcctgtttgaactcaggctgctgcctgctgggcctgcctgcccttggagccctgctgagctcagcctgaggcctggctcctccaggctgggggaaaaccaggcttgctgtgctcggcagcagagattcttctggagtgagcatccagcacgtgtatggtgcccagcaccccccctttgatccactgttacatggcactttgctcaggtccacggccaagatgccgaccacaccagtgaaggccaagagggtcagcaccttccaggagtttgagagcaataccagcgatgcctgggacgctggggaggacgacgatgagctcctggccatggcggcggagagcctgaactccgaggtggtcatggagacggccaaccgtgtgctgcgtaaccacagccagcggcaggggcggcccacgctgcaggaggggccagggcttcagcagaagcccaggcccgaggcagagccgccctcaccccccagcggcgacctccggctggtgaagtcggtcagtgagagccacacgtcctgtcctgcagaaagtgccagcgatgccgcccctctgcagaggtcccagtctctcccacactcggccaccgtcacgctgggtggcacatctgaccccagcactctcagcagctcagcgctgagcgaaagagaggcctcccggctcgacaagttcaagcagctgcttgccggccccaacacggaccttgaggaattacggaggttgagctggtccggaatccctaagccagtgcgtccaatgacgtggaagctcctctcaggttaccttcccgccaatgtagaccggagaccagccactctccagagaaaacaaaaagaatattttgcatttattgagcactattacgattctaggaacgacgaagttcaccaggacacatacaggcagatccacatagacatccctcgcatgagccctgaagcgttgatcctgcagcccaaggtgacggagatttttgaaaggatcttgttcatatgggcgatccgccacccagccagtggatacgttcagggtataaatgatctcgtcactcctttctttgtggtcttcatttgtgaatacatagaggcagaggaggtggacacggtggacgtctccggcgtgcccgcagaggtgctgtgcaacatcgaggccgacacctactggtgcatgagcaagctgctggatggcattcaggacaactacacctttgcccaacctgggattcaaatgaaagtgaaaatgttagaagaactcgtgagccggattgatgagcaagtgcaccggcacctggaccaacacgaagtgagatacctgcagtttgccttccgctggatgaacaacctgctgatgagggaggtgcccctgcgttgtaccatccgcctgtgggacacctaccagtctgaaccggacggcttttctcatttccacttgtacgtgtgcgctgcttttctcgtgagatggaggaaggaaatactagaagaaaaagattttcaagagctgctgctcttcctccagaacctgcccacagcccactgggatgatgaggacatcagcctgttgctggccgaggcctaccgcctcaagtttgcttttgccgacgcccccaatcactacaagaaatgagcccaggcccacccgcagctggcctcactgtcccgggtggcgcgccccacctgcctggctggtggtaggcccctgtgagctggtcccgggctgctaaaaggccttgtgaggtggccccaccctccaggggagctggtgaagatgggccacagacctggtctagggctgacaaagacagggacagcctttgttttctgagataccaaagagagccaggggagggccccgggttcggcggccagaggcaggtcaggggtcccctctccctctccctgcaatgtccttgccaaatgactgcctcgtgctgcccctagtccggggcagcctaggaggccgaccctctttggagtcctgctgtctgggtgccagggccggaacgaggtagtggccatctcatacctactctgaaatgcaaaacttctattctgttgagtgaaagaataaaatgtagacaaaatctagaccg

SEQ ID NO: 179549 - protein, 260 aa, Artificial Sequence
  derived and/or modified sequence
MAESEAETPSTPGEFESKYFEFHGVRLPPFCRGKMEEIANFPVRPSDVWIVTYPKSGTSLLQEVVYLVSQGADPDEIGLMNIDEQLPVLEYPQPGLDIIKELTSPRLIKSHLPYRFLPSDLHNGDSKVIYMARNPKDLVVSYYQFHRSLRTMSYRGTFQEFCRRFMNDKLGYGSWFEHVQEFWEHRMDSNVLFLKYEDMHRDLVTMVEQLARFLGVSCDKAQLEALTEHCHQLVDQCCNAEALPVGRAHCVFARKIFLSW

SEQ ID NO: 179550 - protein, 284 aa, Artificial Sequence
  derived and/or modified sequence
MAESEAETPSTPGEFESKYFEFHGVRLPPFCRGKMEEIANFPVRPSDVWIVTYPKSGTSLLQEVVYLVSQGADPDEIGLMNIDEQLPVLEYPQPGLDIIKELTSPRLIKSHLPYRFLPSDLHNGDSKVIYMARNPKDLVVSYYQFHRSLRTMSYRGTFQEFCRRFMNDKLGYGSWFEHVQEFWEHRMDSNVLFLKYEDMHRDLVTMVEQLARFLGVSCDKAQLEALTEHCHQLVDQCCNAEALPVGRGRVGLWKDIFTVSMNEKFDLVYKQKMGKCDLTFDFYL

SEQ ID NO: 179551 - DNA, 783 bp, Artificial Sequence
  derived and/or modified sequence
atggccgagagcgaggccgagacccccagcacccccggcgagttcgagagcaagtacttcgagttccacggcgtgagactgccccccttctgcagaggcaagatggaggagatcgccaacttccccgtgagacccagcgacgtgtggatcgtgacctaccccaagagcggcaccagcctgctgcaggaggtggtgtacctggtgagccagggcgccgaccccgacgagatcggcctgatgaacatcgacgagcagctgcccgtgctggagtacccccagcccggcctggacatcatcaaggagctgaccagccccagactgatcaagagccacctgccctacagattcctgcccagcgacctgcacaacggcgacagcaaggtgatctacatggccagaaaccccaaggacctggtggtgagctactaccagttccacagaagcctgagaaccatgagctacagaggcaccttccaggagttctgcagaagattcatgaacgacaagctgggctacggcagctggttcgagcacgtgcaggagttctgggagcacagaatggacagcaacgtgctgttcctgaagtacgaggacatgcacagagacctggtgaccatggtggagcagctggccagattcctgggcgtgagctgcgacaaggcccagctggaggccctgaccgagcactgccaccagctggtggaccagtgctgcaacgccgaggccctgcccgtgggcagagcccactgcgtgttcgccagaaagatcttcctgagctggtag

SEQ ID NO: 179552 - DNA, 855 bp, Artificial Sequence
  derived and/or modified sequence
atggccgagagcgaggccgagacccccagcacccccggcgagttcgagagcaagtacttcgagttccacggcgtgagactgccccccttctgcagaggcaagatggaggagatcgccaacttccccgtgagacccagcgacgtgtggatcgtgacctaccccaagagcggcaccagcctgctgcaggaggtggtgtacctggtgagccagggcgccgaccccgacgagatcggcctgatgaacatcgacgagcagctgcccgtgctggagtacccccagcccggcctggacatcatcaaggagctgaccagccccagactgatcaagagccacctgccctacagattcctgcccagcgacctgcacaacggcgacagcaaggtgatctacatggccagaaaccccaaggacctggtggtgagctactaccagttccacagaagcctgagaaccatgagctacagaggcaccttccaggagttctgcagaagattcatgaacgacaagctgggctacggcagctggttcgagcacgtgcaggagttctgggagcacagaatggacagcaacgtgctgttcctgaagtacgaggacatgcacagagacctggtgaccatggtggagcagctggccagattcctgggcgtgagctgcgacaaggcccagctggaggccctgaccgagcactgccaccagctggtggaccagtgctgcaacgccgaggccctgcccgtgggcagaggcagagtgggcctgtggaaggacatcttcaccgtgagcatgaacgagaagttcgacctggtgtacaagcagaagatgggcaagtgcgacctgaccttcgacttctacctgtag

SEQ ID NO: 179553 - DNA, 783 bp, Artificial Sequence
  derived and/or modified sequence
atggcggaatccgaagccgaaacacccagtactcctggcgagtttgagagcaaatacttcgagtttcacggcgtgcgcctgccacccttctgtcgtggcaaaatggaggagatcgccaatttcccagtgcgcccttccgatgtctggatcgttacatacccgaaatccggaacctctctcctccaggaggtcgtttatctcgtttcacagggcgcagatcccgatgaaattgggctcatgaatattgatgaacagttgccagttctggagtacccccaacccggtctcgacattattaaagagctgacttcacccagactcataaaaagccacttaccatacaggttcctgccttcagatctgcataatggtgattccaaggttatttatatggccagaaatccaaaggatctcgttgtctcatattatcagttccaccggtccctgcgaacgatgtcctatagagggactttccaagaattctgccggaggttcatgaacgacaaactgggttacggtagttggttcgaacacgtgcaggaattctgggaacatcgaatggactctaatgtgctttttctgaaatatgaggatatgcatcgagatctcgtgaccatggtcgaacagttggctaggtttcttggtgtgtcgtgtgataaggctcagctcgaggccctgacggaacactgccatcagctcgtcgaccagtgctgtaatgctgaagcattgccggtgggccgtgcccattgtgtgttcgcccggaaaattttcctctcttggtag

SEQ ID NO: 179554 - DNA, 855 bp, Artificial Sequence
  derived and/or modified sequence
atggctgagagcgaggccgagacgccatccacacctggcgagttcgagagtaaatactttgagttccatggcgtgagactaccgcctttttgcaggggcaagatggaagaaattgccaatttccctgtcaggccttccgatgtttggattgtcacttaccctaagagcggcacctcattgctgcaagaagtggtatatctcgtatcgcagggagccgatccagacgagatcggattaatgaacattgacgaacaactgcctgtgttggaatatccacagcccggccttgatatcattaaagaactcacctctccccgtctgataaagtctcatctgccataccgcttcctccccagtgacctgcacaatggggatagcaaagttatttatatggcccgaaatcctaaagacctggtggtcagctattatcaattccaccgctccctgcgcaccatgtcttaccgtggaacattccaagaattttgccggcgattcatgaatgacaaattaggttatgggtcgtggttcgagcatgttcaagagttttgggagcatcgaatggacagtaatgtgctgttcctgaaatacgaagatatgcatagagatctcgtaactatggtggagcagctggctcggtttctcggcgtttcatgcgacaaagcccagctagaggccctgaccgaacattgtcaccaactggtagaccagtgttgtaacgccgaggccctcccagtgggccgtgggcgcgtcggtctgtggaaggacatttttacagtaagcatgaacgagaaatttgatctcgtatacaagcagaaaatgggaaaatgcgacctcacctttgatttctacctttag

SEQ ID NO: 179555 - DNA, 783 bp, Artificial Sequence
  derived and/or modified sequence
atggccgagagcgaggccgagacccccagcaccccaggagaatttgagagcaagtactttgagttccatggagtgcggctgccccccttctgccggggcaagatggaggagatcgccaacttccctgtgcggcccagtgatgtgtggatcgtgacctaccccaagagcggcaccagcctgctgcaggaggtggtgtacctggtgtcccagggcgctgaccctgatgaaattggcctgatgaacattgatgagcagctgcctgtgctggagtacccccagcccggcctggacatcatcaaggagctgaccagccccaggctcatcaagagccacctgccctaccgcttcctgcccagcgacctgcacaatggagacagcaaggtgatctacatggccaggaaccccaaggacctggtggtgtcctactaccagttccacaggagcctgcggaccatgagctaccggggcaccttccaggagttctgccgccgcttcatgaatgacaagctgggctacggctcctggtttgagcacgtgcaggagttctgggagcacaggatggacagcaatgtgctcttcctgaagtatgaggacatgcaccgggacctggtgaccatggtggagcagctggcccgcttcctgggcgtgtcctgtgacaaggcccagctggaggccctgacagagcactgccaccagctggtggaccagtgctgcaatgctgaggccctgcctgtgggccgggcccactgtgtgtttgccaggaagatcttcctgtcctggtag

SEQ ID NO: 179556 - DNA, 855 bp, Artificial Sequence
  derived and/or modified sequence
atggccgagagcgaggccgagacccccagcaccccaggagaatttgagagcaagtactttgagttccatggagtgcggctgccccccttctgccggggcaagatggaggagatcgccaacttccctgtgcggcccagtgatgtgtggatcgtgacctaccccaagagcggcaccagcctgctgcaggaggtggtgtacctggtgtcccagggcgctgaccctgatgaaattggcctgatgaacattgatgagcagctgcctgtgctggagtacccccagcccggcctggacatcatcaaggagctgaccagccccaggctcatcaagagccacctgccctaccgcttcctgcccagcgacctgcacaatggagacagcaaggtgatctacatggccaggaaccccaaggacctggtggtgtcctactaccagttccacaggagcctgcggaccatgagctaccggggcaccttccaggagttctgccgccgcttcatgaatgacaagctgggctacggctcctggtttgagcacgtgcaggagttctgggagcacaggatggacagcaatgtgctcttcctgaagtatgaggacatgcaccgggacctggtgaccatggtggagcagctggcccgcttcctgggcgtgtcctgtgacaaggcccagctggaggccctgacagagcactgccaccagctggtggaccagtgctgcaatgctgaggccctgcctgtgggccggggccgggtgggcctgtggaaggacatcttcaccgtgtccatgaatgagaagtttgacctggtgtacaagcagaagatgggcaaatgtgacctgacctttgacttctacctgtag

SEQ ID NO: 179557 - DNA, 783 bp, Artificial Sequence
  derived and/or modified sequence
atggccgagagcgaggccgagacccccagcacccccggcgagttcgaatctaagtatttcgagttccatggggtccggctcccgccattttgtcggggaaagatggaggagattgcgaactttcctgtgcggccgtccgacgtgtggatcgtgacttacccgaaatccggcaccagtctgctgcaggaagttgtgtacctggtctctcagggagccgaccccgatgagatagggttgatgaacattgatgagcaactgccggtgctggaatacccccagcccggccttgatattataaaggagctaacaagcccacgccttattaagagtcatctcccctatcgcttccttccttccgacctacataacggcgactcaaaagtcatttacatggctcggaatccaaaggatctagttgtcagttactaccagttccatcggtcactgcggactatgagctaccgggggacatttcaggaattttgtaggcgattcatgaacgacaaactggggtatggctcgtggttcgagcacgtccaggaattctgggagcacaggatggattctaatgtcctgttcttaaagtatgaggacatgcacagggatctggttactatggtggagcagctcgcaaggtttctgggtgtttcttgtgataaggcccagcttgaagcgctcacagagcattgtcatcaattggtagatcaatgctgcaacgccgaggcactgcccgttggacgtgcccattgtgtctttgctcgcaaaatctttctctcttggtag

SEQ ID NO: 179558 - DNA, 855 bp, Artificial Sequence
  derived and/or modified sequence
atggccgagagcgaggccgagacccccagcacccccggcgagttcgaatccaagtatttcgaattccacggcgtacggttgccccctttttgcaggggcaaaatggaggaaatagcaaatttccccgtccggccctcggatgtctggatagtcacctatcctaaatccggcacttctctactacaggaagtagtgtacttggtgtcacagggcgcagatccggacgaaattggcttaatgaatatcgatgaacagttaccagtcctcgagtacccgcagccaggattagatattattaaggaattaacctcccctcgtctcatcaaatctcacctgccatatcggttcctcccctccgacttgcataacggggactctaaggtgatatatatggctcgcaaccctaaagatttggtcgtgagttattatcagttccaccgctccttacgtaccatgtcgtatcgcgggacattccaggagttctgcagacgattcatgaacgataaactcgggtacggctcatggtttgagcatgtgcaagagttctgggagcatcgtatggatagcaacgtcctcttcctgaaatatgaggatatgcaccgagacttagtcacgatggttgagcaactagcacgttttcttggcgtgagctgcgacaaagctcagctagaggccctgaccgagcattgtcaccagttggtggaccaatgctgcaatgccgaggcgttgcccgtaggaagggggagagtagggctgtggaaggatatttttacagtctctatgaatgagaaatttgacttggtgtataagcagaaaatgggaaagtgcgatctgacctttgacttctacttgtag

SEQ ID NO: 179559 - DNA, 783 bp, Artificial Sequence
  derived and/or modified sequence
atggccgaaagtgaggccgaaaccccctcgacaccaggcgaattcgaaagtaagtacttcgaatttcatggagtacgcctgccaccattctgtcgtggcaagatggaagaaatcgctaacttcccagttcggcctagcgacgtttggatagtcacataccccaagtcagggactagtctcctacaggaagtggtatacctcgtctcacagggggcagatcccgacgaaatcggtctgatgaatatagacgagcagttacccgtattggagtacccccagcccggacttgacatcataaaagagctgacgtctccgcgactgattaaatcccacctcccgtatagatttctgccatccgaccttcacaacggggatagtaaagtaatctatatggccagaaacccaaaagacttggtggtctcgtactaccagttccacagatcactcagaactatgagttatagagggacctttcaggaattctgtcgaagatttatgaatgataagctgggatacggctcttggtttgagcacgtacaggaattctgggaacaccgtatggactcaaacgtcctgtttctcaagtacgaggatatgcatcgggaccttgtgacaatggtggagcagctggctcggttcctaggtgttagctgtgataaggcccagctggaggcactgaccgagcattgtcaccagctggtggaccagtgctgtaacgccgaagcacttcccgtgggccgtgcacactgtgtcttcgctcgaaaaatctttctctcctggtag

SEQ ID NO: 179560 - DNA, 855 bp, Artificial Sequence
  derived and/or modified sequence
atggccgagagtgaggctgagacaccctccacacctggagaatttgagtcaaaatatttcgaattccacggggttaggctccctccattttgccgcggaaaaatggaagagatcgcaaatttccctgttcgaccctcagatgtctggatcgtgacttatcccaaaagtgggaccagcttgctccaggaggtcgtctatctggtgtctcagggggcagaccccgacgagatagggctaatgaacatcgacgaacagctcccggtcttagaatatcctcagccaggtctggacatcattaaggagctaacgtctccccgactgattaagtcccatttgccttaccggtttctcccaagcgatttgcacaatggagactctaaggtgatctacatggcccgaaaccctaaggacctagtggttagttactaccagttccacaggagcctgaggactatgagctaccgtgggacgtttcaggaattttgtcgcagattcatgaatgataaactgggatacggtagttggttcgaacacgtccaggaattttgggagcatagaatggactccaacgtgctgtttctgaaatatgaggatatgcatcgggacctcgtaacgatggtagaacagcttgctagattcctgggagtttcgtgcgacaaagcacaattagaggccctgacagagcactgtcatcagctcgttgaccagtgttgtaatgccgaagcattgcctgttgggagaggcagagtggggctgtggaaagacatctttacagtctcaatgaacgaaaaattcgatttggtatataagcagaagatggggaaatgcgatctgaccttcgacttctatctgtag

SEQ ID NO: 179561 - DNA, 919 bp, Artificial Sequence
  derived and/or modified sequence
atgacgtcacgcctgcggagctgccgccgcgcgccggtggggcgcgagcgtgtgcggggcgcgggcgcgggcgcgggcgcgggcgcgtgcgggctgcgagccgggaggcggcggcggcgacggcgacggcggcggcatggcggagagcgaggccgagacccccagcaccccgggggagttcgagagcaagtacttcgagttccatggcgtgcggctgccgcccttctgccgcgggaagatggaggagatcgccaacttcccggtgcggcccagcgacgtgtggatcgtcacctaccccaagtccggcaccagcttgctgcaggaggtggtctacttggtgagccagggcgctgaccccgatgagatcggcttgatgaacatcgacgagcagctcccggtcctggagtacccacagccgggcctggacatcatcaaggaactgacctctccccgcctcatcaagagccacctgccctaccgctttctgccctctgacctccacaatggagactccaaggtcatctatatggctcgcaaccccaaggatctggtggtgtcttattatcagttccaccgctctctgcggaccatgagctaccgaggcacctttcaagaattctgccggaggtttatgaatgataagctgggctacggctcctggtttgagcacgtgcaggagttctgggagcaccgcatggactcgaacgtgctttttctcaagtatgaagacatgcatcgggacctggtgacgatggtggagcagctggccagattcctgggggtgtcctgtgacaaggcccagctggaagccctgacggagcactgccaccagctggtggaccagtgctgcaacgctgaggccctgcccgtgggccgggcacattgcgtctttgctcggaagatcttcttgagttggtga

SEQ ID NO: 179562 - DNA, 2468 bp, Artificial Sequence
  derived and/or modified sequence
cggagctgccgccgcgcgccggtggggcgcgagcgtgtgcggggcgcgggcgcgggcgcgggcgcgggcgcgtgcgggctgcgagccgggaggcggcggcggcgacggcgacggcggcggcatggcggagagcgaggccgagacccccagcaccccgggggagttcgagagcaagtacttcgagttccatggcgtgcggctgccgcccttctgccgcgggaagatggaggagatcgccaacttcccggtgcggcccagcgacgtgtggatcgtcacctaccccaagtccggcaccagcttgctgcaggaggtggtctacttggtgagccagggcgctgaccccgatgagatcggcttgatgaacatcgacgagcagctcccggtcctggagtacccacagccgggcctggacatcatcaaggaactgacctctccccgcctcatcaagagccacctgccctaccgctttctgccctctgacctccacaatggagactccaaggtcatctatatggctcgcaaccccaaggatctggtggtgtcttattatcagttccaccgctctctgcggaccatgagctaccgaggcacctttcaagaattctgccggaggtttatgaatgataagctgggctacggctcctggtttgagcacgtgcaggagttctgggagcaccgcatggactcgaacgtgctttttctcaagtatgaagacatgcatcgggacctggtgacgatggtggagcagctggccagattcctgggggtgtcctgtgacaaggcccagctggaagccctgacggagcactgccaccagctggtggaccagtgctgcaacgctgaggccctgcccgtgggccggggaagagttgggctgtggaaggacatcttcaccgtctccatgaatgagaagtttgacttggtgtataaacagaagatgggaaagtgtgacctcacgtttgacttttatttataataacagaaacaacaacctgcatgctcacaatacccagacagtctactagccaaaagtcctgtatgcattcatttattccttgctggacaaactctggaagcagcgtgtgaaacagcgggggaagggaagagcggcgtgagcggagggagtgtgatgattcccaaccgaaagcagctgtctcgcctttagaacgtgcagcctctccatgtctgattacaaacagtctccacattgcagttccaatggcctggaccgtaaggataaagcctgtaatatatgcaactagaatgtctgccttttcaaccccgtattattgtattttatagagcttttcactggaaatctacataaatgtcagtaaaccaaataaaagttcatttccaaggggaatcaggagcgagccacacccgaatggtagaaagatctcagggttaactctttatttttgtagttttattatctaaggcacagccattctgttctcacttggttctgagatagtggtgagaacagaggatgagttgggtctgttggggggaatctggacacttgtttattctgacggagttcacttcttcagaaccttcctgaaatgagcagaaattgttcactaggtcttcagaatggacgtccttctgccagagacttccagcgggcggctccaaaggcccaatgcagaggagcccgcggagcatgtgctgagggaagtctgcctggtgaggctggcaggtgggagtctaatgcagtcaggagcatttgcatgcagtgggtggagagtcggccaccaaaggaccgagttgcgctcggaatttgagctgaattccacagccttactttgtttcctgaagtgatagcctactaatgctggcaagcagatgcttaatagtaaatttctaaaatccccgggtctttatcattcagtttgttctgtgcacctgaggcgctcagccgtgggaggaccattttgcgagtgtagccctgtttcactcggatcaggttggcacggccgcctgcgtgtctgtccacctcatccctccgtgtatctgagggagtaaaggtgaggtctttattgcttcactgcctaattttctcacccacattcgctgaagcgatggagagtcgggggccagtagccagccaaccccgtggggaccggggttgtctgtcatttatgtggctggaaagcacccaaagtggtggtcaggagggtcgctgctgtggaaggggtctccgttcttggtgctgtatttgaaacgggtgtagagagaagcttgtgtttttgtttgtaatggggagaagcgtggccaggcaggtggcacgtggcatcgcatggtgggctcggcagcaccttgcctgtgtttctgtgagggaggctgctttctgtgaaatttcatttatatttttctatttttagtactgtatggatgttactgagcactacacatgatccttctgtgcttgcttgcatctttaataaagacatgttcccggc

SEQ ID NO: 179563 - protein, 436 aa, Artificial Sequence
  derived and/or modified sequence
MVNLESMHTDIKMSGDVADSTDARSTLSQVEPGNDRNGLDFNRQIKTEDLSDSLQQTLSHRPCHLSQGPAMMSGNQMSGLNASPCQDMASLHPLQQLVLVPGHLQSVSQFLLSQTQPGQQGLQPNLLPFPQQQSGLLLPQTGPGLASQAFGHPGLPGSSLEPHLEASQHLPVPKHLPSSGGADEPSDLEELEKFAKTFKQRRIKLGFTQGDVGLAMGKLYGNDFSQTTISRFEALNLSFKNMCKLKPLLEKWLNDAESSPSDPSVSTPSSYPSLSEVFGRKRKKRTSIETNIRLTLEKRFQDNPKPSSEEISMIAEQLSMEKEVVRVWFCNRRQKEKRINCPVATPIKPPVYNSRLVSPSGSLGPLSVPPVHSTMPGTVTSSCSPGNNSRPSSPGSGLHASSPTASQNNSKAAVNSASSFNSSGSWYRWNHSTYLH

SEQ ID NO: 179564 - DNA, 1311 bp, Artificial Sequence
  derived and/or modified sequence
atggtaaaccttgagtccatgcacaccgacataaagatgagcggcgacgtcgctgatagcaccgacgcacgatccaccctgagccaggtggagcccgggaacgaccgaaatggtctggactttaaccgccagattaagacagaagatctctccgacagcctccagcaaaccctgtcgcaccggccttgccatctgtcacaaggccctgcaatgatgtcagggaatcagatgtctggactgaacgccagcccatgtcaggacatggccagcctgcatcctctgcagcagctggttctcgtaccgggccacctgcagtctgtttcccagtttctccttagccaaacacagcccggccaacaggggctccagcccaatctgttaccattcccacagcagcagagcggtctgctgctgccccagaccggacctgggttggcttcacaggcattcggccacccagggcttccaggaagcagccttgagccccacctggaagcttcccagcacctgcccgtacctaagcatctgccttcctccggaggggccgacgagcccagtgacctcgaggagctagagaagttcgccaaaacttttaagcaacggcggatcaaattagggttcacacaaggggatgtgggcttggccatggggaaactgtacggtaatgactttagtcaaaccacaattagccggtttgaagcattgaatcttagcttcaaaaatatgtgtaagctgaaacccctgctggagaaatggttgaacgacgcagagtcatctcccagcgacccctctgtgagtaccccatcttcctacccgtcactttctgaggtctttggacggaaacggaaaaaacgaacctcaatcgagactaatattcgtttgacacttgagaagaggttccaggacaaccctaaacctagtagcgaggagatctccatgattgctgagcagctctctatggagaaagaggtagtcagggtgtggttttgtaatcggagacagaaagagaagaggattaactgtccagtcgccactccaatcaagccacctgtgtataactcaaggcttgtgtccccttcaggatccctgggacctctgagtgttcctccagtccatagtacaatgccaggaaccgtgacgagcagctgttctcccggaaacaacagtaggccatcaagtcccggatccggactgcatgcctcatctcccaccgcttcccaaaataattcaaaagctgcagtcaattcggccagcagcttcaattcttcagggtcctggtataggtggaatcacagtacttacctgcactag

SEQ ID NO: 179565 - DNA, 1311 bp, Artificial Sequence
  derived and/or modified sequence
atggtgaacctggagagcatgcacacagacatcaagatgtctggagatgtggccgacagcacagatgcccggagcaccctgagccaggtggagcctggaaatgacagaaatggcctggacttcaaccggcagatcaagacagaggacctgagtgacagcctgcagcagaccctgagccaccggccctgccacctgagccagggccctgccatgatgagcggcaaccagatgagcggcctgaatgccagcccctgccaggacatggccagcctgcaccccctgcagcagctggtgctggtgcccggccacctgcagagcgtgtcccagttcctgctgagccagacccagcccggccagcagggcctgcagcccaacctgctgcccttcccccagcagcagagcggcctgctgctgccccagacaggccctggcctggccagccaggccttcggccaccctggcctgcccggcagcagcctggagccccacctggaggccagccagcacctgcctgtgcccaagcacctgcccagcagtggaggagcagatgagcccagcgacctggaggagctggagaagtttgccaagaccttcaagcagaggcgcatcaagctgggcttcacccagggagatgtgggcctggccatgggcaagctgtatggaaatgacttcagccagaccaccatcagcagatttgaggccctgaacctgtccttcaagaacatgtgcaagctgaagcccctgctggagaagtggctgaatgatgctgagagcagccccagcgaccccagcgtgtccacccccagcagctaccccagcctgtctgaggtgtttggaaggaagaggaagaagaggaccagcattgagaccaacatccggctgaccctggagaagcgcttccaggacaaccccaagcccagcagcgaggagatctccatgattgctgagcagctgtccatggagaaggaggtggtgcgggtgtggttctgcaacagacggcagaaggagaagaggatcaactgccctgtggccacccccatcaagccccctgtgtacaacagccggctggtgagccccagcggcagcctgggccccctgtctgtgccccctgtgcacagcaccatgcctggcaccgtgaccagcagctgcagccctggcaacaacagccggcccagcagccctggcagcggcctgcacgccagcagccccacagccagccagaacaacagcaaggctgctgtgaacagcgccagcagcttcaacagcagcggctcctggtaccgctggaaccacagcacctacctgcactag

SEQ ID NO: 179566 - DNA, 1311 bp, Artificial Sequence
  derived and/or modified sequence
atggtgaacctggagagcatgcacaccgacatcaagatgagcggcgacgttgctgacagtacagacgctcggagcacactctctcaagttgaacctggcaatgatcgcaacggccttgatttcaacaggcagataaagacagaagacctctctgatagtttacagcagaccctttcccaccgcccctgtcacctaagccaaggtccggccatgatgagtgggaatcagatgagtgggctcaatgcaagtccctgccaggatatggcaagccttcatcctctccagcagctggtgctcgttcccgggcacctccagagtgtgagccaattcctgctgtctcaaacacaaccgggccagcagggactgcagcccaacctactccccttcccacagcagcaatcaggcctgctgttaccccagacgggcccaggtctggcgtcccaggccttcggccaccccggccttcctggttccagcctggaaccccacctcgaagcaagccagcacctccctgttcccaagcatttgccttcctctgggggagctgatgagccttcagatcttgaggaactcgaaaagtttgccaaaacatttaaacagaggcgaatcaagctgggatttacccagggggacgtagggttggccatgggcaagctttacggcaacgacttcagtcagacaaccatcagtcggtttgaggccttaaacctgtcgttcaaaaacatgtgtaaattgaagcctctactcgagaaatggctgaacgatgccgaaagttcaccatcagatcccagcgtgagcaccccatcgtcctacccctccttgagcgaagtcttcgggaggaaacggaagaaaagaacaagcattgaaactaacattagactgaccttggaaaagaggtttcaggataatcccaagccaagctcagaggagattagtatgattgcggagcagctttcaatggagaaggaggttgttagggtttggttttgtaacagaaggcagaaagaaaagcgaattaactgtccggtggctacccctattaaaccccctgtctacaatagtagactcgtgtccccatccggatccctcggtcctctctctgtcccgcctgtgcattcaaccatgcccggaacagtgaccagctcatgcagccctggcaataacagtcggccatccagtcccgggtccggactgcacgcatcaagtcccaccgcgtcgcagaacaattcaaaagctgcggtcaatagcgcctcatccttcaatagttctggcagctggtatcgctggaaccacagtacatatctgcactag

SEQ ID NO: 179567 - DNA, 3013 bp, Artificial Sequence
  derived and/or modified sequence
gcgacagtggcggcgacggctccggcagcggctcccgcggcggcggcggccgggaactggaggaaggagaccctggcttcgcaggggccccggctggggcagaggcgaggggcctgggggggcgctggctttggccccgcctggggcaggatggtgaatctggagtccatgcacacagatatcaagatgagtggggatgtagccgattccacggatgctcgcagcactctcagccaggtggagccaggaaatgatcgaaatggcctagatttcaacaggcagattaaaaccgaagatctcagtgactccctgcagcagaccctctcccatcggccatgccacctgagtcaaggacctgccatgatgtccggaaaccaaatgtctgggctaaatgccagcccatgtcaggacatggcttccctccatccgctccagcagcttgtgctggttcccggccacttacagtctgtatcccagttcctgctatctcagacccagcctgggcagcaaggtctgcagccaaatctcctcccctttccacagcaacaaagcggtctcctcctcccacagactgggccgggactggcatcccaggcatttgggcaccctgggctgccaggatcctctttagaaccccacctggaagcatcccagcatctcccagtgcccaagcatctacccagctctggaggggccgatgagcccagtgacctcgaggagctggagaagtttgccaagaccttcaagcagaggcgcattaagctgggcttcacacagggagatgtggggctggcgatgggaaagctgtatggcaacgacttcagccagaccaccatctcacgatttgaggccctcaacctgagcttcaagaacatgtgcaagctcaagcccctgctggagaagtggctgaatgatgcagagtcctctccgtcagacccctcagtgagcacgcccagctcctaccccagcctcagtgaagtatttggtaggaagagaaagaaacggaccagcatcgagaccaacatccgcctgactctggagaagaggtttcaagataacccaaaacccagctcggaggagatctccatgattgcagagcagttgtccatggagaaggaggtggtgagggtctggttctgcaaccgacgccaaaaggagaagcgaatcaactgccctgtggccacacccatcaaaccacctgtctacaactcccggctggtatctccctcagggtctctgggccccctctctgtccctcctgtccacagtaccatgcctggaacagtaacgtcatcctgttcccctgggaacaacagcaggccttcatctcctggctcaggactccacgccagcagccccactgcatctcaaaataactccaaagcagcagtgaactccgcctccagttttaactcttcaggatcttggtaccgatggaatcattccacctacctccactgagaccaaaaagtttctcctactccagctggccctgtattccccctggaaggaagggaatcatgccttctatatacagacagattgccttcagaagagtggaagaaaatctccactatcaatgaacccagactcttgtcttcttcaagagcaagggcctccggagatccaaactgtgattgaaccaagtgcagactcctaatgctcttgaaatacacagcccctcctaggagcttaccattttcaccttccttgcctatgcccttgccttctagttccaaatattttagccagcttcactgtggcaatagtctttcagagaaaagacttcttgctgttattctccaactcatccgtgggcttctggggacagccatttggctggggtgccaaacaccagaaggggagataatagttttgactctgaacttggccacaacccctgaactgatcccaaaatctgtgaaaagatttgaatctgatatctccaccaaagccttgatgttttctctgtacagctaagttttctgatggaatcttcatctcaccccattttctttttaacctcgcccccttttctacaatcaaatccattcattattgcgccctccaggtcccctcctttttgcagaaggtgtaaaagagctgcccttggtgggtgccctgggcatgttgcaacgcctgctggtgcccttctgtctgtccacgtctgcctagggctcaggagtgcttgttctttcccttcctccctgtgtttctctttatcctgtcccctctcctttctcctggcagcagaaaaggaagaacacaagagcaaacacacaacaatgatggtggcaaagtacctgtatatagccctttcccattttttgcattatgttcttaactccttaatgtggaattttccagcaaaatgtttaactcaggtgtgatttttgaaaatgtctctgtaatattttatcttctttaaaaaaaagggggggaaataccaaagtgtgaaatactgtgctaccttccagagttcccacatgggctgggatttttttttctttttcttttttttttttttttttgagacagtcttgctccagcccaggctggagtgcagtggcatgatcttggctcactgcatgctctgccacttgggttcaagcgattctcctgcctcagcctctcaagtagcgggattacaggcgcccaccaccaaaaattagcccagctaatttttgtatttttagtagagatggggtttcaccatgttggtcaggctggtcttgaactcctgacctcctgatccacccacctcagcgtcccgaagtgctgggattacaggtgtgagccaccgcgcctggcctgggctgggaatctttgttgacttctttgggaacattatctctagagtctgcttttttgtgggccagtttgtagagatgtaacatgaagccattccagaaatggtaacttaaaaaaaaaaagactacatgtctaggaaactgttgagattcaaaggaatctcactgttcctaaataaatgtgtatagtgattatgaaaagt

SEQ ID NO: 179568 - DNA, 1311 bp, Artificial Sequence
  derived and/or modified sequence
atggtgaacttggaatccatgcacacagatattaagatgtcgggtgacgtcgcggactcaaccgatgcacgttctacactgtcccaggttgaaccaggtaacgatcgtaacggactagacttcaaccggcaaatcaaaaccgaggatttaagcgattccctgcagcagaccctctcacacaggccgtgtcatctgagtcagggacccgctatgatgtctggaaaccagatgtcagggcttaatgcttcaccatgccaggatatggcctccctgcatcctctgcaacagctcgtgctggtccctggtcacctgcagtcagtgtctcaatttctcctgagtcaaacgcagcccggtcagcaggggttgcaacctaacctcctcccctttccccagcagcagagtgggctcttacttcctcagacgggcccaggcctggcatcccaggcgtttggccatcccggtctccccggatcgtctttggaaccacatctggaggcttcccaacacctgccagtacctaaacacctcccttctagcgggggtgccgatgaaccttctgatttagaggagttggagaagttcgctaaaaccttcaaacagaggaggatcaaactgggttttacgcagggtgatgttggcttggctatggggaaactctacgggaacgacttctcacagaccacaatcagcaggttcgaagctctgaacttgagcttcaaaaatatgtgcaagctgaagcccttgctggagaaatggctaaatgacgctgaaagctcgcccagtgatcctagcgtaagcaccccatcaagctatccctcactgagcgaagtgttcggacggaagcgtaaaaagaggacgagcattgagaccaatattaggttgacgctggaaaaacggtttcaggacaatcccaagccgtcctccgaagaaattagcatgatagccgaacagctgagtatggagaaggaggtggtaagagtgtggttctgcaatcggaggcaaaaggagaagcgaatcaactgtccagtggctacgcctatcaaaccaccagtgtataatagtcgcctcgtgtccccctccgggtcactgggaccactctccgttccccctgtgcatagtactatgcctggaaccgtgacttcgtcgtgctctcctggcaataacagccgcccatcctccccgggttcaggcctccatgctagctctccgactgcatcccaaaataattctaaagcggcagtgaattctgctagttcctttaatagctctgggagctggtaccggtggaaccactccacctacctacattag

SEQ ID NO: 179569 - DNA, 1311 bp, Artificial Sequence
  derived and/or modified sequence
atggtgaacctggagagcatgcacaccgacatcaagatgagcggcgacgtggccgacagcaccgacgccagaagcaccctgagccaggtggagcccggcaacgacagaaacggcctggacttcaacagacagatcaagaccgaggacctgagcgacagcctgcagcagaccctgagccacagaccctgccacctgagccagggccccgccatgatgagcggcaaccagatgagcggcctgaacgccagcccctgccaggacatggccagcctgcaccccctgcagcagctggtgctggtgcccggccacctgcagagcgtgagccagttcctgctgagccagacccagcccggccagcagggcctgcagcccaacctgctgcccttcccccagcagcagagcggcctgctgctgccccagaccggccccggcctggccagccaggccttcggccaccccggcctgcccggcagcagcctggagccccacctggaggccagccagcacctgcccgtgcccaagcacctgcccagcagcggcggcgccgacgagcccagcgacctggaggagctggagaagttcgccaagaccttcaagcagagaagaatcaagctgggcttcacccagggcgacgtgggcctggccatgggcaagctgtacggcaacgacttcagccagaccaccatcagcagattcgaggccctgaacctgagcttcaagaacatgtgcaagctgaagcccctgctggagaagtggctgaacgacgccgagagcagccccagcgaccccagcgtgagcacccccagcagctaccccagcctgagcgaggtgttcggcagaaagagaaagaagagaaccagcatcgagaccaacatcagactgaccctggagaagagattccaggacaaccccaagcccagcagcgaggagatcagcatgatcgccgagcagctgagcatggagaaggaggtggtgagagtgtggttctgcaacagaagacagaaggagaagagaatcaactgccccgtggccacccccatcaagccccccgtgtacaacagcagactggtgagccccagcggcagcctgggccccctgagcgtgccccccgtgcacagcaccatgcccggcaccgtgaccagcagctgcagccccggcaacaacagcagacccagcagccccggcagcggcctgcacgccagcagccccaccgccagccagaacaacagcaaggccgccgtgaacagcgccagcagcttcaacagcagcggcagctggtacagatggaaccacagcacctacctgcactag

SEQ ID NO: 179570 - protein, 219 aa, Artificial Sequence
  derived and/or modified sequence
MNSSKSSETQCTERGCFSSQMFLWTVAGIPILFLSACFITRCVVTFRIFQTCDEKKFQLPENFTELSCYNYGSGSVKNCCPLNWEYFQSSCYFFSTDTISWALSLKNCSAMGAHLVVINSQEEQEFLSYKKPKMREFFIGLSDQVVEGQWQWVDGTPLTKSLSFWDVGEPNNIATLEDCATMRDSSNPRQNWNDVTCFLNYFRICEMVGINPLNKGKSL

SEQ ID NO: 179571 - DNA, 660 bp, Artificial Sequence
  derived and/or modified sequence
atgaactcttctaagtcgtccgaaacccagtgtactgagcgagggtgcttttcctcccagatgtttctgtggacggtggctggaattcccatactgtttcttagcgcctgtttcatcactcggtgcgtggtcacttttcgcattttccaaacatgtgatgagaagaaatttcaattgcctgagaatttcaccgagctgtcttgctacaactatggctccggctccgtgaagaattgttgccctcttaactgggagtactttcaatcctcatgttattttttcagcaccgatacaattagttgggcactcagcttgaagaactgttcagcgatgggggcacatctagtggtgattaattcgcaggaagaacaagaattcctgtcatacaagaaacccaaaatgagagaatttttcattggcctctctgaccaagttgtcgaaggacagtggcagtgggtcgatgggactccactcactaaatccctcagcttttgggatgtgggcgagccgaacaatatcgcaacgctcgaagactgcgctactatgcgtgattcaagcaatccacgccagaactggaacgatgtcacttgtttcctcaactatttcaggatatgcgaaatggtcggaatcaaccctctgaacaagggcaaatccctgtag

SEQ ID NO: 179572 - DNA, 660 bp, Artificial Sequence
  derived and/or modified sequence
atgaacagcagcaagagcagcgagacccagtgcacagagcggggctgcttcagcagccagatgttcctgtggacagtggccggcatccccatcctcttcctgagcgcctgcttcatcacccgctgtgtggtgaccttccgcatcttccagacctgtgatgagaagaagttccagctgcctgagaacttcacagagctgagctgctacaactacggcagcggctctgtgaagaactgctgccccctgaactgggagtacttccagagcagctgctacttcttcagcacagacaccatctcctgggccctgagcctgaagaactgcagcgccatgggcgcccacctggtggtgatcaacagccaggaggagcaggagttcctgagctacaagaagcccaagatgagggagttcttcatcggcctgagtgaccaggtggtggagggccagtggcagtgggtggatggcacccccctgaccaagagcctgtccttctgggatgtgggggagcccaacaacatcgccaccctggaggactgtgccaccatgagggacagcagcaacccccggcagaactggaatgatgtgacctgcttcctgaactacttccgcatctgtgagatggtgggcatcaaccccctgaacaagggcaagagcctgtag

SEQ ID NO: 179573 - DNA, 660 bp, Artificial Sequence
  derived and/or modified sequence
atgaacagcagcaagagcagcgagacccagtgcaccgagcggggctgcttctcctctcagatgtttctttggactgtggctggcatccctattctgtttctgagcgcctgctttatcactcgctgtgtggtgaccttccgcattttccagacttgcgatgaaaagaagttccagctgcccgagaacttcactgagctgtcatgctacaactacgggtccggaagcgtgaagaactgctgcccattaaactgggaatatttccagagctcttgctattttttttccaccgatacaattagctgggcgctgtcgttaaaaaattgttctgccatgggcgcacatctggtggttattaacagccaggaggagcaggagtttctgtcttacaaaaagcccaagatgcgggagtttttcatcggcctcagcgatcaggtggtcgaaggccaatggcagtgggttgacgggactccccttactaagagcctgagcttctgggacgtgggtgagcctaataatatcgccaccctggaggactgtgctaccatgcgtgattcgtcaaacccacgtcaaaattggaacgatgtcacttgctttcttaactactttaggatttgcgagatggtcggcattaatccccttaataaagggaaatcactttag

SEQ ID NO: 179574 - DNA, 660 bp, Artificial Sequence
  derived and/or modified sequence
atgaactccagcaaatcctccgaaacacagtgcaccgagcggggttgtttctcctcgcagatgttcctgtggactgtcgccggaatcccaatactgtttctctctgcttgctttatcactcgttgcgtcgtgacatttagaatttttcaaacttgcgatgagaagaaatttcaactgcctgagaactttaccgagctgtcctgctacaattatggtagcggatctgtgaagaactgttgccctttaaattgggagtacttccagagttcttgctatttcttttccacggacacgatcagttgggcattgagcctcaagaactgctccgctatgggggcacacctggttgtgatcaattcacaggaggaacaagagtttctttcttacaaaaaacctaaaatgcgagagttctttattggcctgagtgaccaagtagtggaggggcagtggcagtgggtcgatggtacaccacttacaaaatcattatcattctgggatgtcggggagccgaacaacatcgccacattggaggactgcgcaacaatgcgtgattcttccaatccacgccaaaactggaacgacgtgacctgtttcctcaattactttagaatctgcgaaatggttggcattaatccgcttaataaggggaagtcactatag

SEQ ID NO: 179575 - DNA, 2159 bp, Artificial Sequence
  derived and/or modified sequence
aatattctacatctatcggagctgaacttcctaaaagacaaagtgtttatctttcaagattcattctccctgaatcttaccaacaaaacactcctgaggagaaagaaagagagggagggagagaaaaagagagagagagaaacaaaaaaccaaagagagagaaaaaatgaattcatctaaatcatctgaaacacaatgcacagagagaggatgcttctcttcccaaatgttcttatggactgttgctgggatccccatcctatttctcagtgcctgtttcatcaccagatgtgttgtgacatttcgcatctttcaaacctgtgatgagaaaaagtttcagctacctgagaatttcacagagctctcctgctacaattatggatcaggttcagtcaagaattgttgtccattgaactgggaatattttcaatccagctgctacttcttttctactgacaccatttcctgggcgttaagtttaaagaactgctcagccatgggggctcacctggtggttatcaactcacaggaggagcaggaattcctttcctacaagaaacctaaaatgagagagttttttattggactgtcagaccaggttgtcgagggtcagtggcaatgggtggacggcacacctttgacaaagtctctgagcttctgggatgtaggggagcccaacaacatagctaccctggaggactgtgccaccatgagagactcttcaaacccaaggcaaaattggaatgatgtaacctgtttcctcaattattttcggatttgtgaaatggtaggaataaatcctttgaacaaaggaaaatctctttaagaacagaaggcacaactcaaatgtgtaaagaaggaagagcaagaacatggccacacccaccgccccacacgagaaatttgtgcgctgaacttcaaaggacttcataagtatttgttactctgatataaataaaaataagtagttttaaatgttataattcatgttactggctgaagtgcattttctctctacgttagtctcaggtcctcttcccagaatttacaaagcaattcactaccttttgctacatttgcctcattttttagtgttcgtatgaaagtacagggacacggagccaagacagagtctagcaaagaaggggattttggaaggtgccttccaaaaatctcctgaatccgggctctgtagcaggtcctcttctttctagcttctgacaagtctgtcttctcttcttggtttcataccgttcttatctcctgcccaagcatatatcgtctctttactcccctgtataatgagtaagaagcttcttcaagtcatgaaacttattcctgctcagaataccggtgtggcctttctggctacaggcctccactgcaccttcttagggaagggcatgccagccatcagctccaaacaggctgtaaccaagtccacccatccctggggcttcctttgctctgccttattttcaattgactgaatggatctcaccagattttgtatctattgctcagctaggacccgagtccaatagtcaatttattctaagcgaacattcatctccacactttcctgtctcaagcccatccattatttcttaacttttattttagctttcgggggtacatgttaaaggctttttatataggtaaactcatgtcgtggaggtttgttgtacagattatttcatcacccaggtattaagcccagtgcctaatattgtttttttcggctcctctccctcctcctaccttccgccctcaagtagactccagtgtctgttattcccttctttgtgtttatgaattctcatcatttagctcccacttataagtgaggacatgcagtatttggttttctgttcccatgtttgctaaggataatggtctccagttctaccgatgttcccacaaaagacataatcttcttttttaaggctgcttagtattccatggtatctatgtatcacattttctctatccaatctattgttgactcacatttagattgattccatgtttttgctattgtgaatagtgctgcaatgaacattcgtgtgcatgtgtctttatggtagaaagatttatatttctctgagtatgtatccagtaatagcccattcatttattgcataaaattctaccaatac

SEQ ID NO: 179576 - DNA, 660 bp, Artificial Sequence
  derived and/or modified sequence
atgaacagcagcaagagcagcgagacccagtgcaccgagagaggctgcttcagcagccagatgttcctgtggaccgtggccggcatccccatcctgttcctgagcgcctgcttcatcaccagatgcgtggtgaccttcagaatcttccagacctgcgacgagaagaagttccagctgcccgagaacttcaccgagctgagctgctacaactacggcagcggcagcgtgaagaactgctgccccctgaactgggagtacttccagagcagctgctacttcttcagcaccgacaccatcagctgggccctgagcctgaagaactgcagcgccatgggcgcccacctggtggtgatcaacagccaggaggagcaggagttcctgagctacaagaagcccaagatgagagagttcttcatcggcctgagcgaccaggtggtggagggccagtggcagtgggtggacggcacccccctgaccaagagcctgagcttctgggacgtgggcgagcccaacaacatcgccaccctggaggactgcgccaccatgagagacagcagcaaccccagacagaactggaacgacgtgacctgcttcctgaactacttcagaatctgcgagatggtgggcatcaaccccctgaacaagggcaagagcctgtag

SEQ ID NO: 179577 - protein, 239 aa, Artificial Sequence
  derived and/or modified sequence
MATSGRLSFTVRSLLDLPEQDAQHLPRREPEPRAPQPDPCAAWLDSERGHYPSSDESSLETSPPDSSQRPSARPASPGSDAEKRKKRRVLFSKAQTLELERRFRQQRYLSAPEREQLASLLRLTPTQVKIWFQNHRYKLKRARAPGAAESPDLAASAELHAAPGLLRRVVVPVLVRDGQPCGGGGGGEVGTAAAQEKCGAPPAAACPLPGYPAFGPGSALGLFPAYQHLASPALVSWNW

SEQ ID NO: 179578 - DNA, 1857 bp, Artificial Sequence
  derived and/or modified sequence
ccggacctcggctttcaaagcggcctgggtgggaagagctgtttatataaacagagattccgctgtaaatgcgctaatatcccggctgccagcgcatggcgagcgcctcccacgcccatccgtaggagcggcgtcccggccgcccctccgttcccagcctgccctgcccccgcctccttcccctcctcggccatggccacctctggacgcctgagcttcaccgtgcgcagccttctagatttacccgagcaggacgcgcaacacctgccgaggcgggagccagaaccacgcgccccccagcccgacccctgcgccgcctggctggattcggagcgcggccactacccttcctcggacgagagcagcctggagaccagcccgccagactcgtcgcagcggccgtccgctaggcccgcgtctccgggctcggacgccgagaaaaggaagaagcggcgggtgctattctccaaggcgcagacgctggagttggagcggcgcttccggcagcagcggtacctgtctgcgcccgagcgcgagcagctggcgagcctgcttcgcctcacgcccacgcaggtcaagatctggttccagaatcatcgctacaagctgaagcgcgctcgcgctccaggggcggcggagtcgcctgacctggcagcatccgccgagctgcacgccgcgcccggcctgctgcgtcgcgtggtggtgccggtgcttgttcgcgacgggcagccgtgcggcggcggcggcggtggcgaggtgggaaccgccgcggcccaggagaagtgcggcgcccctccagccgccgcctgccctctgccgggctaccctgccttcggtcccggctcggcgcttggcctcttccccgcctaccagcacttagcatcccccgccctggtctcctggaactggtgaggccgcagggcggcacctggggctaccctcgactttggagcgcgctctgcgattggagcagggccggagccgaacgcctggaacgctctccgtccgcctccctgcagccccatctccttgggcgccagggtccctggcgcgccctcatcagccgtcgcgcaagcacacacgagggacgtgtgccagagccccctccctcaccttccctccaccgccagccccagagttagattttatgcttgggccttatttgtatatttttaaatagcgatttgtataggaagcaagttatttttttaaaaaatagagtatttttcctcgtagttcgagaataaaatgtgtggggttgggtcccctgcgcgcctgcggggaacgtaggcgggagtcgtgccccccagaccggtgttcgcatcgctggctcgccccttgactggctaagtggggcccggccccagctggatcgaagggcgggttgcagtcccgacacggctttaggaagatacctgggggatggaggggtggtgatgtcagggttgggcgcgggaagaaaaggagaggaggaagctgaggcaactttgggattcttgtcagcgggaggcgtcactggccccagagtgactccgactctccgctgggctcccagagctgctggcgtttcgaataccgaaaagtcaaccctgtggaccacgacagggcagaaggagtttctccggagatgagccggcgaggccaggtgcggggcgcgctgcaccggagcagcccaggccgggccgcaagctgtttccagagtgcaggagccaagtgctcggggaccctttgaaaagtgcctggggacctgaagagcaccggggaatttgtaacccctatttaagcctgcaagtgcctaagttaaaaaaaaaaaaaaaaaaaaaaaaaaaaaaaaaaaaaaaaaaaaaaaaaaaaaaa

SEQ ID NO: 179579 - DNA, 720 bp, Artificial Sequence
  derived and/or modified sequence
atggcgacaagcggtcggctgtcattcactgtgagatcactccttgacctgccggaacaagacgcacagcatcttccaagacgcgagccagagcccagagccccgcagcccgatccttgcgcagcctggctcgattcagaacgtggacattatccatcttctgacgaatcaagcttggagacttccccacctgactcttcccagcgcccttccgcacggcccgcgtcgcccgggagtgatgctgagaagagaaagaaacgccgagtgctgtttagtaaagctcagacccttgagctagaacgcagatttaggcagcaacggtacctttctgctccggaaagggagcaactggcttctcttcttaggttgacaccgacacaagtgaaaatttggttccaaaaccatcgatacaagttaaaacgggctagggcccctggcgcagctgaatcccccgacctggccgccagtgccgaacttcacgcggcaccaggactcctaagacgcgtcgtggttccagtgctcgtgagggacggccagccctgcggcggaggtgggggaggcgaggtaggaactgccgctgctcaggaaaagtgcggcgctccacctgcagctgcctgcccgctgcccggttacccggccttcgggcctggatcggcactcggcttgtttccagcctatcaacacttggcgagtcccgctctagtgtcctggaactggtag

SEQ ID NO: 179580 - DNA, 720 bp, Artificial Sequence
  derived and/or modified sequence
atggccaccagcggccgcctgtccttcaccgtgcgcagcctgctggacctgcctgagcaggatgcccagcacctgccccggcgggagcctgagccccgggccccccagcctgacccctgtgccgcctggctggacagcgagcggggccactaccccagcagtgatgagagcagcctggagaccagccccccagacagcagccagaggccttctgcccggcctgccagccctggcagtgatgctgagaagaggaagaagagaagagtgctcttcagcaaggcccagaccctggagctggagcggcgcttccggcagcagcgctacctgagcgcccctgagcgggagcagctggccagcctgctgcggctgacccccacccaggtgaagatctggttccagaaccaccgctacaagctgaagagggcccgggcccctggagctgctgagagcccagacctggccgccagcgctgagctgcatgctgcccctggcctgctgcggcgggtggtggtgcctgtgctggtgagagatggccagccctgtggcggcggcggcggcggggaggtgggcacagctgctgcccaggagaagtgtggggcccctcctgctgctgcctgccccctgcccggctacccagccttcggccctggcagcgccctgggcctcttccctgcctaccagcacctggccagccctgccctggtgtcctggaactggtag

SEQ ID NO: 179581 - DNA, 720 bp, Artificial Sequence
  derived and/or modified sequence
atggccaccagcggccggctgagcttcaccgtgcggagcctgctggatctgcccgagcaggatgctcaacatctgccaagacgcgaaccagagcctcgtgccccccaacctgacccatgcgctgcttggctcgattccgaacgaggtcattacccatctagcgacgagtcctccttggagacgagtccaccagatagttctcagcggccttctgcgagacctgcaagtcctggatctgacgccgaaaagcgtaaaaagcgaagggtgctcttttccaaggctcagaccctggaattggaaagacgcttccgacaacagcgatatctcagtgcccccgagcgcgaacagctggcctcattgcttcgcctcacaccaacacaggtcaaaatctggttccagaatcaccggtacaagctgaaacgagcacgagccccaggggctgctgagagcccagacctcgccgcaagcgccgagctgcatgcggcaccaggcctcttacggcgcgtagtggtgcccgttctggttcgcgacggacagccttgtggtggggggggcggaggagaggttggcaccgctgccgcacaagagaaatgtggagctccccccgcagccgcctgccccctccccggttaccctgccttcggtcccgggagcgcacttggtctctttcccgcttaccagcatctcgcttctcccgctctcgtcagctggaattggtag

SEQ ID NO: 179582 - DNA, 1829 bp, Artificial Sequence
  derived and/or modified sequence
attcaggtacttaacaccctggagacccggacctcggctttcaaagcggcctgggtgggaagagctgtttatataaacagagattccgctgtaaatgcgctaatatcccggctgccagcgcatggcgagcgcctcccacgcccatccgtaggagcggcgtcccggccgcccctccgttcccagcctgccctgcccccgcctccttcccctcctcggccatggccacctctggacgcctgagcttcaccgtgcgcagccttctagatttacccgagcaggacgcgcaacacctgccgaggcgggagccagaaccacgcgccccccagcccgacccctgcgccgcctggctggattcggagcgcggccactacccttcctcggacgagagcagcctggagaccagcccgccagactcgtcgcagcggccgtccgctaggcccgcgtctccgggctcggacgccgagaaaaggaagaagcggcgggtgctattctccaaggcgcagacgctggagttggagcggcgcttccggcagcagcggtacctgtctgcgcccgagcgcgagcagctggcgagcctgcttcgcctcacgcccacgcaggtcaagatctggttccagaatcatcgctacaagctgaagcgcgctcgcgctccaggggcggcggagtcgcctgacctggcagcatccgccgagctgcacgccgcgcccggcctgctgcgtcgcgtggtggtgccggtgcttgttcgcgacgggcagccgtgcggcggcggcggcggtggcgaggtgggaaccgccgcggcccaggagaagtgcggcgcccctccagccgccgcctgccctctgccgggctaccctgccttcggtcccggctcggcgcttggcctcttccccgcctaccagcacttagcatcccccgccctggtctcctggaactggtgaggccgcagggcggcacctggggctaccctcgactttggagcgcgctctgcgattggagcagggccggagccgaacgcctggaacgctctccgtccgcctccctgcagccccatctccttgggcgccagggtccctggcgcgccctcatcagccgtcgcgcaagcacacacgagggacgtgtgccagagccccctccctcaccttccctccaccgccagccccagagttagattttatgcttgggccttatttgtatatttttaaatagcgatttgtataggaagcaagttatttttttaaaaaatagagtatttttcctcgtagttcgagaataaaatgtgtggggttgggtcccctgcgcgcctgcggggaacgtaggcgggagtcgtgccccccagaccggtgttcgcatcgctggctcgccccttgactggctaagtggggcccggccccagctggatcgaagggcgggttgcagtcccgacacggctttaggaagatacctgggggatggaggggtggtgatgtcagggttgggcgcgggaagaaaaggagaggaggaagctgaggcaactttgggattcttgtcagcgggaggcgtcactggccccagagtgactccgactctccgctgggctcccagagctgctggcgtttcgaataccgaaaagtcaaccctgtggaccacgacagggcagaaggagtttctccggagatgagccggcgaggccaggtgcggggcgcgctgcaccggagcagcccaggccgggccgcaagctgtttccagagtgcaggagccaagtgctcggggaccctttgaaaagtgcctggggacctgaagagcaccggggaatttgtaacccctatttaagcctgcaagtgcctaagtta

SEQ ID NO: 179583 - DNA, 720 bp, Artificial Sequence
  derived and/or modified sequence
atggccacatcagggcgtttgtcttttacagtccgttctctgttggatttgcctgagcaggatgcacaacacctgccacggagggaaccggagccaagagccccacagccagatccatgcgccgcatggctcgacagcgaaagaggccactatcccagctccgacgagtcctcccttgaaacatcccctcccgatagtagtcagcgcccatctgccaggccagcctctccaggaagcgacgccgagaagcgaaaaaagcggagggtgttgttcagcaaagcacagacccttgaactggaacgtcggtttagacaacaacgttacctctcagcgccagaaagggaacagttagccagcctgcttcgtctgaccccaacgcaggtcaagatttggttccagaatcatcgctacaaactgaagagggcgagggccccaggcgctgccgagagtcccgacctggccgcatctgcggagcttcacgcggcaccagggctgcttcgtcgcgtcgtggtccccgtgctggtgcgcgatggccaaccatgtggcggaggaggtggaggagaggttggtactgcagccgcacaagaaaagtgcggagcccctcctgctgccgcatgcccactgcctggctatcccgcattcggaccaggctctgcactgggtctgtttccagcctaccaacatcttgcatcccccgcactcgtgagctggaactggtag

SEQ ID NO: 179584 - DNA, 720 bp, Artificial Sequence
  derived and/or modified sequence
atggccaccagcggcagactgagcttcaccgtgagaagcctgctggacctgcccgagcaggacgcccagcacctgcccagaagagagcccgagcccagagccccccagcccgacccctgcgccgcctggctggacagcgagagaggccactaccccagcagcgacgagagcagcctggagaccagcccccccgacagcagccagagacccagcgccagacccgccagccccggcagcgacgccgagaagagaaagaagagaagagtgctgttcagcaaggcccagaccctggagctggagagaagattcagacagcagagatacctgagcgcccccgagagagagcagctggccagcctgctgagactgacccccacccaggtgaagatctggttccagaaccacagatacaagctgaagagagccagagcccccggcgccgccgagagccccgacctggccgccagcgccgagctgcacgccgcccccggcctgctgagaagagtggtggtgcccgtgctggtgagagacggccagccctgcggcggcggcggcggcggcgaggtgggcaccgccgccgcccaggagaagtgcggcgccccccccgccgccgcctgccccctgcccggctaccccgccttcggccccggcagcgccctgggcctgttccccgcctaccagcacctggccagccccgccctggtgagctggaactggtag

SEQ ID NO: 179585 - protein, 386 aa, Artificial Sequence
  derived and/or modified sequence
MGQREMWRLMSRFNAFKRTNTILHHLRMSKHTDAAEEVLLEKKGCTGVITLNRPKFLNALTLNMIRQIYPQLKKWEQDPETFLIIIKGAGGKAFCAGGDIRVISEAEKAKQKIAPVFFREEYMLNNAVGSCQKPYVALIHGITMGGGVGLSVHGQFRVATEKCLFAMPETAIGLFPDVGGGYFLPRLQGKLGYFLALTGFRLKGRDVYRAGIATHFVDSEKLAMLEEDLLALKSPSKENIASVLENYHTESKIDRDKSFILEEHMDKINSCFSANTVEEIIENLQQDGSSFALEQLKVINKMSPTSLKITLRQLMEGSSKTLQEVLTMEYRLSQACMRGHDFHEGVRAVLIDKDQSPKWKPADLKEVTEEDLNNHFKSLGSSDLKF

SEQ ID NO: 179586 - protein, 38 aa, Artificial Sequence
  derived and/or modified sequence
  misc_feature (1)..(1): Xaa can be any naturally occurring amino acid
XLIDKDQSPKWKPADLKEVTEEDLNNHFKSLGSSDLKF

SEQ ID NO: 179587 - DNA, 1161 bp, Artificial Sequence
  derived and/or modified sequence
atgggtcagcgcgagatgtggagactgatgtcaagatttaatgcttttaaaaggaccaacactatcctgcatcacctgcggatgtcaaaacatactgacgccgccgaggaagtgctgctggagaaaaagggctgtaccggagtcatcacacttaatcgaccaaagttcctaaatgctctgacgctcaacatgatccgacaaatctacccccagttgaaaaaatgggagcaggatccagaaacgttcctaatcatcataaagggtgccggcggcaaggcattctgcgcgggaggggacatccgcgtcatttctgaagccgagaaggccaaacaaaagatagcaccagtgttcttccgcgaagagtacatgctcaacaacgccgtcggttcatgccagaaaccatacgtggcattgatccacgggatcacaatgggaggtggagttgggctctccgtccacggccagtttcgggtcgctaccgaaaagtgcctgttcgcaatgcccgaaaccgccattggtctgtttcccgacgtcgggggcgggtattttctgcctaggctccaaggaaaacttggctattttctcgcacttactggctttcgattgaagggacgcgacgtctatcgggccggtatagccacccacttcgtggactccgaaaaactggctatgctggaagaggatctgcttgcccttaaatcaccctctaaggagaacatcgcaagcgtcctggagaactatcataccgagtccaagatcgacagagataaatcgttcatcttggaggaacatatggataagatcaattcctgtttctccgcgaataccgttgaagagattatagaaaatcttcagcaggatggctcgtcattcgcacttgagcagttaaaagttatcaacaagatgagtcccactagtctgaagattaccctccggcagctgatggaaggatcttctaagaccctacaggaagttcttacaatggagtatagacttagtcaggcatgtatgaggggacacgattttcacgagggcgttcgagccgtgttgatcgataaagatcaatctcccaaatggaaaccggcagacctgaaggaggtcaccgaggaagacctgaacaaccacttcaaatcactgggatcctccgaccttaaattttag

SEQ ID NO: 179588 - DNA, 1161 bp, Artificial Sequence
  derived and/or modified sequence
atgggccagcgggagatgtggaggctgatgagccgcttcaatgccttcaagaggaccaacaccatcctgcaccacctgaggatgagcaagcacacagatgctgctgaggaggtgctgctggagaagaagggctgcaccggggtcatcaccctgaaccggcccaagttcctgaatgccctgaccctgaacatgatccggcagatctacccccagctgaagaagtgggagcaggaccctgagaccttcctgatcatcatcaagggagctgggggcaaggccttctgtgccggcggggacatccgggtcatcagcgaggccgagaaggccaagcagaagatcgcccctgtgttcttccgggaggagtacatgctgaacaatgctgtgggcagctgccagaagccctacgtggccctgatccacggcatcaccatgggcggcggcgtgggcctgtctgtgcacggccagttccgggtggccacagagaagtgcctgtttgccatgcctgagacagccatcggcctcttcccagatgtgggcggcggctacttcctgccccggctgcagggcaagctgggctacttcctggccctgaccggcttccggctgaagggcagagatgtgtaccgggccggcatcgccacccactttgtggacagcgagaagctggccatgctggaggaggacctgctggccctgaagagccccagcaaggagaacatcgcctctgtgctggagaactaccacacagagagcaagattgaccgggacaagagcttcatcctggaggagcacatggacaagatcaacagctgcttcagcgccaacacagtggaggagatcatcgagaacctgcagcaggacggcagcagctttgccctggagcagctgaaggtgatcaacaagatgagccccaccagcctgaagatcaccctgcggcagctgatggagggcagcagcaagaccctgcaggaggtgctgaccatggagtaccgcctgagccaggcctgcatgaggggccatgacttccatgaaggagtgcgggctgtgctgattgacaaggaccagagccccaagtggaagccagctgacctgaaggaggtgacagaggaggacctgaacaaccacttcaagagcctgggcagcagtgacctgaagttctag

SEQ ID NO: 179589 - DNA, 1161 bp, Artificial Sequence
  derived and/or modified sequence
atgggccagcgggagatgtggcggctgatgagccggttcaacgcctttaaacgaaccaatacaatcctccatcacttacgcatgtccaaacatacggacgcagccgaagaggtcttgctggagaagaaggggtgcaccggggtcatcacactgaaccgaccgaagtttctgaacgccttgaccttgaacatgatccggcaaatctatccacaacttaagaagtgggaacaggatcctgagacctttctgattattattaagggcgccggaggaaaagcgttctgtgccggaggtgatattagagttattagcgaggccgagaaggccaaacaaaaaattgcacccgtgttcttccgcgaggagtatatgctcaacaacgccgttggatcatgtcagaagccctacgttgctctgatccatggcatcacgatgggtggcggcgtgggactttcggttcacggacagttccgggtggcgacagagaagtgtctcttcgcaatgcccgaaactgccatagggctttttcctgatgtcggtggcggttacttccttcctcggctgcagggaaaactgggatatttcctggctctcaccgggtttaggttaaagggcagagacgtgtacagggcagggatagccacacacttcgtagattccgaaaagctcgccatgctggaggaagacctgcttgcattgaagtctccctcaaaggagaacatcgcctcggtgcttgaaaactatcataccgagtcaaaaattgatcgagataagtccttcattctggaagagcacatggataaaattaatagctgcttcagcgccaacaccgttgaagagattatcgagaacctacagcaggatggttcatccttcgccctcgaacagcttaaggttatcaataagatgtcccctacctccttgaaaataaccctcagacagctcatggaaggctcaagcaagactttgcaagaggtgctcacgatggagtaccgtttgtctcaggcttgcatgcgaggacacgatttccacgaaggagtgagggccgtgcttatcgataaagaccagtcccccaagtggaagcctgcagacctcaaggaggtgaccgaggaagatttgaacaaccacttcaagtcccttggctcaagtgacctcaagttttag

SEQ ID NO: 179590 - DNA, 1161 bp, Artificial Sequence
  derived and/or modified sequence
atggggcagagagagatgtggagactgatgtcaagatttaatgctttcaagagaacaaataccatcctgcaccacctgcggatgagcaaacacaccgacgccgctgaagaggtgttgcttgagaaaaaagggtgtactggagttatcacgctaaacagacccaagttccttaatgctctgaccctgaacatgataaggcagatttatccacaactgaagaagtgggaacaagaccctgaaacctttttgatcattataaagggggcagggggaaaagccttctgcgcaggcggtgatatccgggtaatctctgaggcggaaaaggccaagcagaagattgcccctgtcttttttagagaagagtatatgttaaataatgcagttgggtcatgccagaaaccctatgtggcacttattcatggtatcaccatgggcggtggtgtgggcctcagcgtgcacggccaattccgagtcgcgacggagaagtgcctgttcgccatgcccgaaaccgccatcggtttgtttcccgacgttggcggaggatactttttaccaaggctgcaagggaaactgggctattttttggccctcaccggcttcagactgaaaggtagggatgtgtatagagcaggtatcgccactcactttgtagatagcgaaaaattagccatgcttgaagaggatttgctggcgcttaagagccctagcaaagaaaacatcgctagtgtcctcgagaactatcatacggagagcaagatagatagagacaagagctttatacttgaagagcatatggacaagatcaacagctgtttctctgccaataccgtggaggagatcattgaaaatcttcagcaggacggatcttcatttgctttggagcagctcaaggtgatcaataaaatgtcacctaccagccttaagatcaccctccgccagctgatggaaggttcatctaagactctccaagaggtgctgactatggaatatcgtctgagccaggcatgtatgagaggacatgacttccatgagggtgtgagggccgtcctgatcgacaaagaccaatctccaaaatggaaaccagccgacttgaaagaggtgacggaagaagacttgaacaaccactttaagagcctgggatcgtccgacctgaagttctag

SEQ ID NO: 179591 - DNA, 1939 bp, Artificial Sequence
  derived and/or modified sequence
cctgcgaatccgccctagtccgttctatcctccctcttcccgctccgcctcagctcgctctccgccttctccctggcccggtccccgatcccttcctctccctcaactatttcctccaggcgtcgttcttgccccgcccttccccgtcgcgtagcggaaacggtcgctctggcttcctggaggacttgtcatctgtgcccggcggcgcaggacggcggtgggcggggctcacgcgaggcgctggaacggtccgggagattctcgctctgctgctttagcttcggagtgtttggcgatggggcagcgcgagatgtggaggctcatgtcgaggtttaatgcattcaaaaggactaataccatactgcaccatttgagaatgtccaagcacacagatgcagcagaagaggtgctattggaaaaaaaaggttgcacgggagtcataacactaaacagaccaaagttcctcaatgcactgactcttaatatgattcggcagatttatccacagctaaagaagtgggaacaagatcctgaaactttcctgatcattataaagggagcaggaggaaaggctttctgtgccgggggtgatatcagagtgatctcggaagctgaaaaggcaaaacagaagatagctccagttttcttcagagaagaatatatgctgaataatgctgttggttcttgccagaaaccttatgttgcacttattcatggaattacaatgggtgggggagttggtctctcagtccatgggcaatttcgagtggctacagaaaagtgtctttttgctatgccagaaactgcaataggactgttccctgatgtgggtggaggttatttcttgccacgactccaaggaaaacttggttacttccttgcattaacaggattcagactaaaaggaagagatgtgtacagagcaggaattgctacacactttgtagattctgaaaagttggccatgttagaggaagatttgttagccttgaaatctccttcaaaagaaaatattgcatctgtcttagaaaattaccatacagagtctaagattgatcgagacaagtcttttatacttgaggaacacatggacaaaataaacagttgtttttcagccaatactgtggaagaaattattgaaaacttacagcaagatggttcatcttttgccctagagcaattgaaggtaattaataaaatgtctccaacatctctaaagatcacactaaggcaactcatggaggggtcttcaaagaccttgcaagaagtactaactatggagtatcggctaagtcaagcttgtatgagaggtcatgactttcatgaaggcgttagagctgttttaattgataaagaccagagtccaaaatggaaaccagctgatctaaaagaagttactgaggaagatttgaataatcactttaagtctttgggaagcagtgatttgaaattttgaggtgacaggcttttaaggtatattttgtagcatgggttggcaatctacagcatgtgggccaaatccagcctgctgcctgtttttatataccctgtaagctaagaatggtttccgcatttttaaatggttgggaaaagaaatcaaagactaataattcatgacgtgaaaattatcagaattcacaaataaagctttattggaactagctatactcatctgtttatatattatctgtggctgctttgaaatgagtagttgcaatagagatggtaaagcctacaaagcctaattatttactgtctggtttttgtcagaaaaaagtttgtcaatccttgttttagaagatggaaaaatgtgaagatctttggagattctcttgagtggtatatctaattgaaatgggatcttcgtttggcttgtatgttgatgaaatcaacttaggtatacaatataaaaaataaagaccctgaaaattgttttgga

SEQ ID NO: 179592 - DNA, 1161 bp, Artificial Sequence
  derived and/or modified sequence
atgggccagagagagatgtggagactgatgagcagattcaacgccttcaagagaaccaacaccatcctgcaccacctgagaatgagcaagcacaccgacgccgccgaggaggtgctgctggagaagaagggctgcaccggcgtgatcaccctgaacagacccaagttcctgaacgccctgaccctgaacatgatcagacagatctacccccagctgaagaagtgggagcaggaccccgagaccttcctgatcatcatcaagggcgccggcggcaaggccttctgcgccggcggcgacatcagagtgatcagcgaggccgagaaggccaagcagaagatcgcccccgtgttcttcagagaggagtacatgctgaacaacgccgtgggcagctgccagaagccctacgtggccctgatccacggcatcaccatgggcggcggcgtgggcctgagcgtgcacggccagttcagagtggccaccgagaagtgcctgttcgccatgcccgagaccgccatcggcctgttccccgacgtgggcggcggctacttcctgcccagactgcagggcaagctgggctacttcctggccctgaccggcttcagactgaagggcagagacgtgtacagagccggcatcgccacccacttcgtggacagcgagaagctggccatgctggaggaggacctgctggccctgaagagccccagcaaggagaacatcgccagcgtgctggagaactaccacaccgagagcaagatcgacagagacaagagcttcatcctggaggagcacatggacaagatcaacagctgcttcagcgccaacaccgtggaggagatcatcgagaacctgcagcaggacggcagcagcttcgccctggagcagctgaaggtgatcaacaagatgagccccaccagcctgaagatcaccctgagacagctgatggagggcagcagcaagaccctgcaggaggtgctgaccatggagtacagactgagccaggcctgcatgagaggccacgacttccacgagggcgtgagagccgtgctgatcgacaaggaccagagccccaagtggaagcccgccgacctgaaggaggtgaccgaggaggacctgaacaaccacttcaagagcctgggcagcagcgacctgaagttctag

SEQ ID NO: 179593 - protein, 4579 aa, Artificial Sequence
  derived and/or modified sequence
METKENRWVPVTVLPGCVGCRTVAALASWTVRDVKERIFAETGFPVSEQRLWRGGRELSDWIKIGDLTSKNCHLFVNLQSKGLKGGGRFGQTTPPLVDFLKDILRRYPEGGQILKELIQNAEDAGATEVKFLYDETQYGTETLWSKDMAPYQGPALYVYNNAVFTPEDWHGIQEIARSRKKDDPLKVGRFGIGFNSVYHITDVPCIFSGDQIGMLDPHQTLFGPHESGQCWNLKDDSKEISELSDQFAPFVGIFGSTKETFINGNFPGTFFRFPLRLQPSQLSSNLYNKQKVLELFESFRADADTVLLFLKSVQDVSLYVREADGTEKLVFRVTSSESKALKHERPNSIKILGTAISNYCKKTPSNNITCVTYHVNIVLEEESTKDAQKTSWLVCNSVGGRGISSKLDSLADELKFVPIIGIAMPLSSRDDEAKGATSDFSGKAFCFLPLPPGEESSTGLPVHISGFFGLTDNRRSIKWRELDQWRDPAALWNEFLVMNVVPKAYATLILDSIKRLEMEKSSDFPLSVDVIYKLWPEASKVKVHWQPVLEPLFSELLQNAVIYSISCDWVRLEQVYFSELDENLEYTKTVLNYLQSSGKQIAKVPGNVDAAVQLTAASGTTPVRKVTPAWVRQVLRKCAHLGCAEEKLHLLEFVLSDQAYSELLGLELLPLQNGNFVPFSSSVSDQDVIYITSAEYPRSLFPSLEGRFILDNLKPHLVAALKEAAQTRGRPCTQLQLLNPERFARLIKEVMNTFWPGRELIVQWYPFDENRNHPSVSWLKMVWKNLYIHFSEDLTLFDEMPLIPRTILEEGQTCVELIRLRIPSLVILDDESEAQLPEFLADIVQKLGGFVLKKLDASIQHPLIKKYIHSPLPSAVLQIMEKMPLQKLCNQITSLLPTHKDALRKFLASLTDSSEKEKRIIQELAIFKRINHSSDQGISSYTKLKGCKVLHHTAKLPADLRLSISVIDSSDEATIRLANMLKIEQLKTTSCLKLVLKDIENAFYSHEEVTQLMLWVLENLSSLKNENPNVLEWLTPLKFIQISQEQMVSAGELFDPDIEVLKDLFCNEEGTYFPPSVFTSPDILHSLRQIGLKNEASLKEKDVVQVAKKIEALQVGACPDQDVLLKKAKTLLLVLNKNHTLLQSSEGKMTLKKIKWVPACKERPPNYPGSLVWKGDLCNLCAPPDMCDVGHAILIGSSLPLVESIHVNLEKALGIFTKPSLSAVLKHFKIVVDWYSSKTFSDEDYYQFQHILLEIYGFMHDHLNEGKDSFRALKFPWVWTGKKFCPLAQAVIKPIHDLDLQPYLHNVPKTMAKFHQLFKVCGSIEELTSDHISMVIQKIYLKSDQDLSEQESKQNLHLMLNIIRWLYSNQIPASPNTPVPIHHSKNPSKLIMKPIHECCYCDIKVDDLNDLLEDSVEPIILVHEDIPMKTAEWLKVPCLSTRLINPENMGFEQSGQREPLTVRIKNILEEYPSVSDIFKELLQNADDANATECSFLIDMRRNMDIRENLLDPGMAACHGPALWSFNNSQFSDSDFVNITRLGESLKRGEVDKVGKFGLGFNSVYHITDIPIIMSREFMIMFDPNINHISKHIKDKSNPGIKINWSKQQKRLRKFPNQFKPFIDVFGCQLPLTVEAPYSYNGTLFRLSFRTQQEAKVSEVSSTCYNTADIYSLVDEFSLCGHRLIIFTQSVKSMYLKYLKIEETNPSLAQDTVIIKKKSCSSKALNTPVLSVLKEAAKLMKTCSSSNKKLPSDEPKSSCILQITVEEFHHVFRRIADLQSPLFRGPDDDPAALFEMAKSGQSKKPSDELSQKTVECTTWLLCTCMDTGEALKFSLSESGRRLGLVPCGAVGVQLSEIQDQKWTVKPHIGEVFCYLPLRIKTGLPVHINGCFAVTSNRKEIWKTDTKGRWNTTFMRHVIVKAYLQVLSVLRDLATSGELMDYTYYAVWPDPDLVHDDFSVICQGFYEDIAHGKGKELTKVFSDGSTWVSMKNVRFLDDSILKRRDVGSAAFKIFLKYLKKTGSKNLCAVELPSSVKLGFEEAGCKQILLENTFSEKQFFSEVFFPNIQEIEAELRDPLMIFVLNEKVDEFSGVLRVTPCIPCSLEGHPLVLPSRLIHPEGRVAKLFDIKDGRFPYGSTQDYLNPIILIKLVQLGMAKDDILWDDMLERAVSVAEINKSDHVAACLRSSILLSLIDEKLKIRDPRAKDFAAKYQTIRFLPFLTKPAGFSLDWKGNSFKPETMFAATDLYTAEHQDIVCLLQPILNENSHSFRGCGSVSLAVKEFLGLLKKPTVDLVINQLKEVAKSVDDGITLYQENITNACYKYLHEALMQNEITKMSIIDKLKPFSFILVENAYVDSEKVSFHLNFEAAPYLYQLPNKYKNNFRELFETVGVRQSCTVEDFALVLESIDQERGTKQITEENFQLCRRIISEGIWSLIREKKQEFCEKNYGKILLPDTNLMLLPAKSLCYNDCPWIKVKDTTVKYCHADIPREVAVKLGAVPKRHKALERYASNVCFTTLGTEFGQKEKLTSRIKSILNAYPSEKEMLKELLQNADDAKATEICFVFDPRQHPVDRIFDDKWAPLQGPALCVYNNQPFTEDDVRGIQNLGKGTKEGNPYKTGQYGIGFNSVYHITDCPSFISGNDILCIFDPHARYAPGATSISPGRMFRDLDADFRTQFSDVLDLYLGTHFKLDNCTMFRFPLRNAEMAKVSEISSVPASDRMVQNLLDKLRSDGAELLMFLNHMEKISICEIDKSTGALNVLYSVKGKITDGDRLKRKQFHASVIDSVTKKRQLKDIPVQQITYTMDTEDSEGNLTTWLICNRSGFSSMEKVSKSVISAHKNQDITLFPRGGVAACITHNYKKPHRAFCFLPLSLETGLPFHVNGHFALDSARRNLWRDDNGVGVRSDWNNSLMTALIAPAYVELLIQLKKRYFPGSDPTLSVLQNTPIHVVKDTLKKFLSFFPVNRLDLQPDLYCLVKALYNCIHEDMKRLLPVVRAPNIDGSDLHSAVIITWINMSTSNKTRPFFDNLLQDELQHLKNADYNITTRKTVAENVYRLKHLLLEIGFNLVYNCDETANLYHCLIDADIPVSYVTPADIRSFLMTFSSPDTNCHIGKLPCRLQQTNLKLFHSLKLLVDYCFKDAEENEIEVEGLPLLITLDSVLQTFDAKRPKFLTTYHELIPSRKDLFMNTLYLKYSNILLNCKVAKVFDISSFADLLSSVLPREYKTKSCTKWKDNFASESWLKNAWHFISESVSVKEDQEETKPTFDIVVDTLKDWALLPGTKFTVSANQLVVPEGDVLLPLSLMHIAVFPNAQSDKVFHALMKAGCIQLALNKICSKDSAFVPLLSCHTANIESPTSILKALHYMVQTSTFRAEKLVENDFEALLMYFNCNLNHLMSQDDIKILKSLPCYKSISGRYVSIGKFGTCYVLTKSIPSAEVEKWTQSSSSAFLEEKIHLKELYEVIGCVPVDDLEVYLKHLLPKIENLSYDAKLEHLIYLKNRLSSAEELSEIKEQLFEKLESLLIIHDANSRLKQAKHFYDRTVRVFEVMLPEKLFIPNDFFKKLEQLIKPKNHVTFMTSWVEFLRNIGLKYILSQQQLLQFAKEISVRANTENWSKETLQNTVDILLHHIFQERMDLLSGNFLKELSLIPFLCPERAPAEFIRFHPQYQEVNGTLPLIKFNGAQVNPKFKQCDVLQLLWTSCPILPEKATPLSIKEQEGSDLGPQEQLEQVLNMLNVNLDPPLDKVINNCRNICNITTLDEEMVKTRAKVLRSIYEFLSAEKREFRFQLRGVAFVMVEDGWKLLKPEEVVINLEYESDFKPYLYKLPLELGTFHQLFKHLGTEDIISTKQYVEVLSRIFKNSEGKQLDPNEMRTVKRVVSGLFRSLQNDSVKVRSDLENVRDLALYLPSQDGRLVKSSILVFDDAPHYKSRIQGNIGVQMLVDLSQCYLGKDHGFHTKLIMLFPQKLRPRLLSSILEEQLDEETPKVCQFGALCSLQGRLQLLLSSEQFITGLIRIMKHENDNAFLANEEKAIRLCKALREGLKVSCFEKLQTTLRVKGFNPIPHSRSETFAFLKRFGNAVILLYIQHSDSKDINFLLALAMTLKSATDNLISDTSYLIAMLGCNDIYRIGEKLDSLGVKYDSSEPSKLELPMPGTPIPAEIHYTLLMDPMNVFYPGEYVGYLVDAEGGDIYGSYQPTYTYAIIVQEVEREDADNSSFLGKIYQIDIGYSEYKIVSSLDLYKFSRPEESSQSRDSAPSTPTSPTEFLTPGLRSIPPLFSGRESHKTSSKHQSPKKLKVNSLPEILKEVTSVVEQAWKLPESERKKIIRRLYLKWHPDKNPENHDIANEVFKHLQNEINRLEKQAFLDQNADRASRRTFSTSASRFQSDKYSFQRFYTSWNQEATSHKSERQQQNKEKCPPSAGQTYSQRFFVPPTFKSVGNPVEARRWLRQARANFSAARNDLHKNANEWVCFKCYLSTKLALIAADYAVRGKSDKDVKPTALAQKIEEYSQQLEGLTNDVHTLEAYGVDSLKTRYPDLLPFPQIPNDRFTSEVAMRVMECTACIIIKLENFMQQKV

SEQ ID NO: 179594 - DNA, 13740 bp, Artificial Sequence
  derived and/or modified sequence
atggagaccaaggagaacagatgggtgcccgtgaccgtgctgcccggctgcgtgggctgcagaaccgtggccgccctggccagctggaccgtgagagacgtgaaggagagaatcttcgccgagaccggcttccccgtgagcgagcagagactgtggagaggcggcagagagctgagcgactggatcaagatcggcgacctgaccagcaagaactgccacctgttcgtgaacctgcagagcaagggcctgaagggcggcggcagattcggccagaccaccccccccctggtggacttcctgaaggacatcctgagaagataccccgagggcggccagatcctgaaggagctgatccagaacgccgaggacgccggcgccaccgaggtgaagttcctgtacgacgagacccagtacggcaccgagaccctgtggagcaaggacatggccccctaccagggccccgccctgtacgtgtacaacaacgccgtgttcacccccgaggactggcacggcatccaggagatcgccagaagcagaaagaaggacgaccccctgaaggtgggcagattcggcatcggcttcaacagcgtgtaccacatcaccgacgtgccctgcatcttcagcggcgaccagatcggcatgctggacccccaccagaccctgttcggcccccacgagagcggccagtgctggaacctgaaggacgacagcaaggagatcagcgagctgagcgaccagttcgcccccttcgtgggcatcttcggcagcaccaaggagaccttcatcaacggcaacttccccggcaccttcttcagattccccctgagactgcagcccagccagctgagcagcaacctgtacaacaagcagaaggtgctggagctgttcgagagcttcagagccgacgccgacaccgtgctgctgttcctgaagagcgtgcaggacgtgagcctgtacgtgagagaggccgacggcaccgagaagctggtgttcagagtgaccagcagcgagagcaaggccctgaagcacgagagacccaacagcatcaagatcctgggcaccgccatcagcaactactgcaagaagacccccagcaacaacatcacctgcgtgacctaccacgtgaacatcgtgctggaggaggagagcaccaaggacgcccagaagaccagctggctggtgtgcaacagcgtgggcggcagaggcatcagcagcaagctggacagcctggccgacgagctgaagttcgtgcccatcatcggcatcgccatgcccctgagcagcagagacgacgaggccaagggcgccaccagcgacttcagcggcaaggccttctgcttcctgcccctgccccccggcgaggagagcagcaccggcctgcccgtgcacatcagcggcttcttcggcctgaccgacaacagaagaagcatcaagtggagagagctggaccagtggagagaccccgccgccctgtggaacgagttcctggtgatgaacgtggtgcccaaggcctacgccaccctgatcctggacagcatcaagagactggagatggagaagagcagcgacttccccctgagcgtggacgtgatctacaagctgtggcccgaggccagcaaggtgaaggtgcactggcagcccgtgctggagcccctgttcagcgagctgctgcagaacgccgtgatctacagcatcagctgcgactgggtgagactggagcaggtgtacttcagcgagctggacgagaacctggagtacaccaagaccgtgctgaactacctgcagagcagcggcaagcagatcgccaaggtgcccggcaacgtggacgccgccgtgcagctgaccgccgccagcggcaccacccccgtgagaaaggtgacccccgcctgggtgagacaggtgctgagaaagtgcgcccacctgggctgcgccgaggagaagctgcacctgctggagttcgtgctgagcgaccaggcctacagcgagctgctgggcctggagctgctgcccctgcagaacggcaacttcgtgcccttcagcagcagcgtgagcgaccaggacgtgatctacatcaccagcgccgagtaccccagaagcctgttccccagcctggagggcagattcatcctggacaacctgaagccccacctggtggccgccctgaaggaggccgcccagaccagaggcagaccctgcacccagctgcagctgctgaaccccgagagattcgccagactgatcaaggaggtgatgaacaccttctggcccggcagagagctgatcgtgcagtggtaccccttcgacgagaacagaaaccaccccagcgtgagctggctgaagatggtgtggaagaacctgtacatccacttcagcgaggacctgaccctgttcgacgagatgcccctgatccccagaaccatcctggaggagggccagacctgcgtggagctgatcagactgagaatccccagcctggtgatcctggacgacgagagcgaggcccagctgcccgagttcctggccgacatcgtgcagaagctgggcggcttcgtgctgaagaagctggacgccagcatccagcaccccctgatcaagaagtacatccacagccccctgcccagcgccgtgctgcagatcatggagaagatgcccctgcagaagctgtgcaaccagatcaccagcctgctgcccacccacaaggacgccctgagaaagttcctggccagcctgaccgacagcagcgagaaggagaagagaatcatccaggagctggccatcttcaagagaatcaaccacagcagcgaccagggcatcagcagctacaccaagctgaagggctgcaaggtgctgcaccacaccgccaagctgcccgccgacctgagactgagcatcagcgtgatcgacagcagcgacgaggccaccatcagactggccaacatgctgaagatcgagcagctgaagaccaccagctgcctgaagctggtgctgaaggacatcgagaacgccttctacagccacgaggaggtgacccagctgatgctgtgggtgctggagaacctgagcagcctgaagaacgagaaccccaacgtgctggagtggctgacccccctgaagttcatccagatcagccaggagcagatggtgagcgccggcgagctgttcgaccccgacatcgaggtgctgaaggacctgttctgcaacgaggagggcacctacttcccccccagcgtgttcaccagccccgacatcctgcacagcctgagacagatcggcctgaagaacgaggccagcctgaaggagaaggacgtggtgcaggtggccaagaagatcgaggccctgcaggtgggcgcctgccccgaccaggacgtgctgctgaagaaggccaagaccctgctgctggtgctgaacaagaaccacaccctgctgcagagcagcgagggcaagatgaccctgaagaagatcaagtgggtgcccgcctgcaaggagagaccccccaactaccccggcagcctggtgtggaagggcgacctgtgcaacctgtgcgccccccccgacatgtgcgacgtgggccacgccatcctgatcggcagcagcctgcccctggtggagagcatccacgtgaacctggagaaggccctgggcatcttcaccaagcccagcctgagcgccgtgctgaagcacttcaagatcgtggtggactggtacagcagcaagaccttcagcgacgaggactactaccagttccagcacatcctgctggagatctacggcttcatgcacgaccacctgaacgagggcaaggacagcttcagagccctgaagttcccctgggtgtggaccggcaagaagttctgccccctggcccaggccgtgatcaagcccatccacgacctggacctgcagccctacctgcacaacgtgcccaagaccatggccaagttccaccagctgttcaaggtgtgcggcagcatcgaggagctgaccagcgaccacatcagcatggtgatccagaagatctacctgaagagcgaccaggacctgagcgagcaggagagcaagcagaacctgcacctgatgctgaacatcatcagatggctgtacagcaaccagatccccgccagccccaacacccccgtgcccatccaccacagcaagaaccccagcaagctgatcatgaagcccatccacgagtgctgctactgcgacatcaaggtggacgacctgaacgacctgctggaggacagcgtggagcccatcatcctggtgcacgaggacatccccatgaagaccgccgagtggctgaaggtgccctgcctgagcaccagactgatcaaccccgagaacatgggcttcgagcagagcggccagagagagcccctgaccgtgagaatcaagaacatcctggaggagtaccccagcgtgagcgacatcttcaaggagctgctgcagaacgccgacgacgccaacgccaccgagtgcagcttcctgatcgacatgagaagaaacatggacatcagagagaacctgctggaccccggcatggccgcctgccacggccccgccctgtggagcttcaacaacagccagttcagcgacagcgacttcgtgaacatcaccagactgggcgagagcctgaagagaggcgaggtggacaaggtgggcaagttcggcctgggcttcaacagcgtgtaccacatcaccgacatccccatcatcatgagcagagagttcatgatcatgttcgaccccaacatcaaccacatcagcaagcacatcaaggacaagagcaaccccggcatcaagatcaactggagcaagcagcagaagagactgagaaagttccccaaccagttcaagcccttcatcgacgtgttcggctgccagctgcccctgaccgtggaggccccctacagctacaacggcaccctgttcagactgagcttcagaacccagcaggaggccaaggtgagcgaggtgagcagcacctgctacaacaccgccgacatctacagcctggtggacgagttcagcctgtgcggccacagactgatcatcttcacccagagcgtgaagagcatgtacctgaagtacctgaagatcgaggagaccaaccccagcctggcccaggacaccgtgatcatcaagaagaagagctgcagcagcaaggccctgaacacccccgtgctgagcgtgctgaaggaggccgccaagctgatgaagacctgcagcagcagcaacaagaagctgcccagcgacgagcccaagagcagctgcatcctgcagatcaccgtggaggagttccaccacgtgttcagaagaatcgccgacctgcagagccccctgttcagaggccccgacgacgaccccgccgccctgttcgagatggccaagagcggccagagcaagaagcccagcgacgagctgagccagaagaccgtggagtgcaccacctggctgctgtgcacctgcatggacaccggcgaggccctgaagttcagcctgagcgagagcggcagaagactgggcctggtgccctgcggcgccgtgggcgtgcagctgagcgagatccaggaccagaagtggaccgtgaagccccacatcggcgaggtgttctgctacctgcccctgagaatcaagaccggcctgcccgtgcacatcaacggctgcttcgccgtgaccagcaacagaaaggagatctggaagaccgacaccaagggcagatggaacaccaccttcatgagacacgtgatcgtgaaggcctacctgcaggtgctgagcgtgctgagagacctggccaccagcggcgagctgatggactacacctactacgccgtgtggcccgaccccgacctggtgcacgacgacttcagcgtgatctgccagggcttctacgaggacatcgcccacggcaagggcaaggagctgaccaaggtgttcagcgacggcagcacctgggtgagcatgaagaacgtgagattcctggacgacagcatcctgaagagaagagacgtgggcagcgccgccttcaagatcttcctgaagtacctgaagaagaccggcagcaagaacctgtgcgccgtggagctgcccagcagcgtgaagctgggcttcgaggaggccggctgcaagcagatcctgctggagaacaccttcagcgagaagcagttcttcagcgaggtgttcttccccaacatccaggagatcgaggccgagctgagagaccccctgatgatcttcgtgctgaacgagaaggtggacgagttcagcggcgtgctgagagtgaccccctgcatcccctgcagcctggagggccaccccctggtgctgcccagcagactgatccaccccgagggcagagtggccaagctgttcgacatcaaggacggcagattcccctacggcagcacccaggactacctgaaccccatcatcctgatcaagctggtgcagctgggcatggccaaggacgacatcctgtgggacgacatgctggagagagccgtgagcgtggccgagatcaacaagagcgaccacgtggccgcctgcctgagaagcagcatcctgctgagcctgatcgacgagaagctgaagatcagagaccccagagccaaggacttcgccgccaagtaccagaccatcagattcctgcccttcctgaccaagcccgccggcttcagcctggactggaagggcaacagcttcaagcccgagaccatgttcgccgccaccgacctgtacaccgccgagcaccaggacatcgtgtgcctgctgcagcccatcctgaacgagaacagccacagcttcagaggctgcggcagcgtgagcctggccgtgaaggagttcctgggcctgctgaagaagcccaccgtggacctggtgatcaaccagctgaaggaggtggccaagagcgtggacgacggcatcaccctgtaccaggagaacatcaccaacgcctgctacaagtacctgcacgaggccctgatgcagaacgagatcaccaagatgagcatcatcgacaagctgaagcccttcagcttcatcctggtggagaacgcctacgtggacagcgagaaggtgagcttccacctgaacttcgaggccgccccctacctgtaccagctgcccaacaagtacaagaacaacttcagagagctgttcgagaccgtgggcgtgagacagagctgcaccgtggaggacttcgccctggtgctggagagcatcgaccaggagagaggcaccaagcagatcaccgaggagaacttccagctgtgcagaagaatcatcagcgagggcatctggagcctgatcagagagaagaagcaggagttctgcgagaagaactacggcaagatcctgctgcccgacaccaacctgatgctgctgcccgccaagagcctgtgctacaacgactgcccctggatcaaggtgaaggacaccaccgtgaagtactgccacgccgacatccccagagaggtggccgtgaagctgggcgccgtgcccaagagacacaaggccctggagagatacgccagcaacgtgtgcttcaccaccctgggcaccgagttcggccagaaggagaagctgaccagcagaatcaagagcatcctgaacgcctaccccagcgagaaggagatgctgaaggagctgctgcagaacgccgacgacgccaaggccaccgagatctgcttcgtgttcgaccccagacagcaccccgtggacagaatcttcgacgacaagtgggcccccctgcagggccccgccctgtgcgtgtacaacaaccagcccttcaccgaggacgacgtgagaggcatccagaacctgggcaagggcaccaaggagggcaacccctacaagaccggccagtacggcatcggcttcaacagcgtgtaccacatcaccgactgccccagcttcatcagcggcaacgacatcctgtgcatcttcgacccccacgccagatacgcccccggcgccaccagcatcagccccggcagaatgttcagagacctggacgccgacttcagaacccagttcagcgacgtgctggacctgtacctgggcacccacttcaagctggacaactgcaccatgttcagattccccctgagaaacgccgagatggccaaggtgagcgagatcagcagcgtgcccgccagcgacagaatggtgcagaacctgctggacaagctgagaagcgacggcgccgagctgctgatgttcctgaaccacatggagaagatcagcatctgcgagatcgacaagagcaccggcgccctgaacgtgctgtacagcgtgaagggcaagatcaccgacggcgacagactgaagagaaagcagttccacgccagcgtgatcgacagcgtgaccaagaagagacagctgaaggacatccccgtgcagcagatcacctacaccatggacaccgaggacagcgagggcaacctgaccacctggctgatctgcaacagaagcggcttcagcagcatggagaaggtgagcaagagcgtgatcagcgcccacaagaaccaggacatcaccctgttccccagaggcggcgtggccgcctgcatcacccacaactacaagaagccccacagagccttctgcttcctgcccctgagcctggagaccggcctgcccttccacgtgaacggccacttcgccctggacagcgccagaagaaacctgtggagagacgacaacggcgtgggcgtgagaagcgactggaacaacagcctgatgaccgccctgatcgcccccgcctacgtggagctgctgatccagctgaagaagagatacttccccggcagcgaccccaccctgagcgtgctgcagaacacccccatccacgtggtgaaggacaccctgaagaagttcctgagcttcttccccgtgaacagactggacctgcagcccgacctgtactgcctggtgaaggccctgtacaactgcatccacgaggacatgaagagactgctgcccgtggtgagagcccccaacatcgacggcagcgacctgcacagcgccgtgatcatcacctggatcaacatgagcaccagcaacaagaccagacccttcttcgacaacctgctgcaggacgagctgcagcacctgaagaacgccgactacaacatcaccaccagaaagaccgtggccgagaacgtgtacagactgaagcacctgctgctggagatcggcttcaacctggtgtacaactgcgacgagaccgccaacctgtaccactgcctgatcgacgccgacatccccgtgagctacgtgacccccgccgacatcagaagcttcctgatgaccttcagcagccccgacaccaactgccacatcggcaagctgccctgcagactgcagcagaccaacctgaagctgttccacagcctgaagctgctggtggactactgcttcaaggacgccgaggagaacgagatcgaggtggagggcctgcccctgctgatcaccctggacagcgtgctgcagaccttcgacgccaagagacccaagttcctgaccacctaccacgagctgatccccagcagaaaggacctgttcatgaacaccctgtacctgaagtacagcaacatcctgctgaactgcaaggtggccaaggtgttcgacatcagcagcttcgccgacctgctgagcagcgtgctgcccagagagtacaagaccaagagctgcaccaagtggaaggacaacttcgccagcgagagctggctgaagaacgcctggcacttcatcagcgagagcgtgagcgtgaaggaggaccaggaggagaccaagcccaccttcgacatcgtggtggacaccctgaaggactgggccctgctgcccggcaccaagttcaccgtgagcgccaaccagctggtggtgcccgagggcgacgtgctgctgcccctgagcctgatgcacatcgccgtgttccccaacgcccagagcgacaaggtgttccacgccctgatgaaggccggctgcatccagctggccctgaacaagatctgcagcaaggacagcgccttcgtgcccctgctgagctgccacaccgccaacatcgagagccccaccagcatcctgaaggccctgcactacatggtgcagaccagcaccttcagagccgagaagctggtggagaacgacttcgaggccctgctgatgtacttcaactgcaacctgaaccacctgatgagccaggacgacatcaagatcctgaagagcctgccctgctacaagagcatcagcggcagatacgtgagcatcggcaagttcggcacctgctacgtgctgaccaagagcatccccagcgccgaggtggagaagtggacccagagcagcagcagcgccttcctggaggagaagatccacctgaaggagctgtacgaggtgatcggctgcgtgcccgtggacgacctggaggtgtacctgaagcacctgctgcccaagatcgagaacctgagctacgacgccaagctggagcacctgatctacctgaagaacagactgagcagcgccgaggagctgagcgagatcaaggagcagctgttcgagaagctggagagcctgctgatcatccacgacgccaacagcagactgaagcaggccaagcacttctacgacagaaccgtgagagtgttcgaggtgatgctgcccgagaagctgttcatccccaacgacttcttcaagaagctggagcagctgatcaagcccaagaaccacgtgaccttcatgaccagctgggtggagttcctgagaaacatcggcctgaagtacatcctgagccagcagcagctgctgcagttcgccaaggagatcagcgtgagagccaacaccgagaactggagcaaggagaccctgcagaacaccgtggacatcctgctgcaccacatcttccaggagagaatggacctgctgagcggcaacttcctgaaggagctgagcctgatccccttcctgtgccccgagagagcccccgccgagttcatcagattccacccccagtaccaggaggtgaacggcaccctgcccctgatcaagttcaacggcgcccaggtgaaccccaagttcaagcagtgcgacgtgctgcagctgctgtggaccagctgccccatcctgcccgagaaggccacccccctgagcatcaaggagcaggagggcagcgacctgggcccccaggagcagctggagcaggtgctgaacatgctgaacgtgaacctggacccccccctggacaaggtgatcaacaactgcagaaacatctgcaacatcaccaccctggacgaggagatggtgaagaccagagccaaggtgctgagaagcatctacgagttcctgagcgccgagaagagagagttcagattccagctgagaggcgtggccttcgtgatggtggaggacggctggaagctgctgaagcccgaggaggtggtgatcaacctggagtacgagagcgacttcaagccctacctgtacaagctgcccctggagctgggcaccttccaccagctgttcaagcacctgggcaccgaggacatcatcagcaccaagcagtacgtggaggtgctgagcagaatcttcaagaacagcgagggcaagcagctggaccccaacgagatgagaaccgtgaagagagtggtgagcggcctgttcagaagcctgcagaacgacagcgtgaaggtgagaagcgacctggagaacgtgagagacctggccctgtacctgcccagccaggacggcagactggtgaagagcagcatcctggtgttcgacgacgccccccactacaagagcagaatccagggcaacatcggcgtgcagatgctggtggacctgagccagtgctacctgggcaaggaccacggcttccacaccaagctgatcatgctgttcccccagaagctgagacccagactgctgagcagcatcctggaggagcagctggacgaggagacccccaaggtgtgccagttcggcgccctgtgcagcctgcagggcagactgcagctgctgctgagcagcgagcagttcatcaccggcctgatcagaatcatgaagcacgagaacgacaacgccttcctggccaacgaggagaaggccatcagactgtgcaaggccctgagagagggcctgaaggtgagctgcttcgagaagctgcagaccaccctgagagtgaagggcttcaaccccatcccccacagcagaagcgagaccttcgccttcctgaagagattcggcaacgccgtgatcctgctgtacatccagcacagcgacagcaaggacatcaacttcctgctggccctggccatgaccctgaagagcgccaccgacaacctgatcagcgacaccagctacctgatcgccatgctgggctgcaacgacatctacagaatcggcgagaagctggacagcctgggcgtgaagtacgacagcagcgagcccagcaagctggagctgcccatgcccggcacccccatccccgccgagatccactacaccctgctgatggaccccatgaacgtgttctaccccggcgagtacgtgggctacctggtggacgccgagggcggcgacatctacggcagctaccagcccacctacacctacgccatcatcgtgcaggaggtggagagagaggacgccgacaacagcagcttcctgggcaagatctaccagatcgacatcggctacagcgagtacaagatcgtgagcagcctggacctgtacaagttcagcagacccgaggagagcagccagagcagagacagcgcccccagcacccccaccagccccaccgagttcctgacccccggcctgagaagcatcccccccctgttcagcggcagagagagccacaagaccagcagcaagcaccagagccccaagaagctgaaggtgaacagcctgcccgagatcctgaaggaggtgaccagcgtggtggagcaggcctggaagctgcccgagagcgagagaaagaagatcatcagaagactgtacctgaagtggcaccccgacaagaaccccgagaaccacgacatcgccaacgaggtgttcaagcacctgcagaacgagatcaacagactggagaagcaggccttcctggaccagaacgccgacagagccagcagaagaaccttcagcaccagcgccagcagattccagagcgacaagtacagcttccagagattctacaccagctggaaccaggaggccaccagccacaagagcgagagacagcagcagaacaaggagaagtgcccccccagcgccggccagacctacagccagagattcttcgtgccccccaccttcaagagcgtgggcaaccccgtggaggccagaagatggctgagacaggccagagccaacttcagcgccgccagaaacgacctgcacaagaacgccaacgagtgggtgtgcttcaagtgctacctgagcaccaagctggccctgatcgccgccgactacgccgtgagaggcaagagcgacaaggacgtgaagcccaccgccctggcccagaagatcgaggagtacagccagcagctggagggcctgaccaacgacgtgcacaccctggaggcctacggcgtggacagcctgaagaccagataccccgacctgctgcccttcccccagatccccaacgacagattcaccagcgaggtggccatgagagtgatggagtgcaccgcctgcatcatcatcaagctggagaacttcatgcagcagaaggtgtag

SEQ ID NO: 179595 - DNA, 13740 bp, Artificial Sequence
  derived and/or modified sequence
atggagacgaaggaaaaccgatgggtgcctgtcaccgtgctgccagggtgtgtggggtgccggaccgtggcagcgttggccagctggacagtgagggacgtgaaagagagaatcttcgcggagactgggttccccgtgagcgaacagaggctttggagaggcgggcgggaactgtcagattggatcaagatcggggacctgacttccaagaattgccatctctttgtgaacctccaatcaaagggcctgaagggcgggggtagattcggacagaccaccccgcctctggttgacttcctcaaagacatcctccggcgctacccggagggaggacagattctaaaggagctaattcagaatgcagaagacgccggcgcaacagaggttaagtttctgtatgacgagacgcagtacggtacagaaacactctggtccaaggatatggcaccataccaagggcccgccctgtatgtttacaataacgcagtgtttacccccgaggactggcatggtatccaagagatcgcccggagtcgcaagaaagatgatccgttgaaggtgggtcgctttggcatcgggtttaactcagtataccacatcactgacgtaccatgcatctttagcggcgatcagattggtatgctggaccctcaccagacccttttcggacctcacgagtccggacagtgctggaatcttaaagacgattctaaggagatttccgaactaagcgatcagttcgcaccatttgtcggaattttcggttccactaaggaaacattcatcaatggaaatttccccggcaccttctttcggttccctctacggcttcaaccaagccagctctcaagcaacttgtataacaaacagaaagtgctggaactgttcgagagcttccgagctgacgcagatactgtgctgctgtttctgaagagcgttcaagatgtgagcctctacgtgagggaggccgatggcaccgagaaactggtgttccgtgtcacctcttctgaatccaaggctctaaaacatgagcgccccaatagtatcaagattctcggaacagctatttccaattattgtaagaagactcccagcaataatattacatgcgtgacctatcacgtaaatattgttttggaggaggaatcaacaaaagatgctcagaagaccagctggttggtgtgcaactctgttggcggaagggggatttcgtctaagctcgacagcctcgccgatgaactgaagtttgtgcctataatcggcatagctatgcccctctccagcagggacgatgaggccaagggcgcgaccagcgacttcagtggcaaagccttttgctttctccccctgcctcccggcgaagagagcagcactggtctgcctgtacacatctcagggttctttggcctcacagataataggcggagtataaaatggcgcgaactcgaccagtggcgggatcccgcagcactctggaatgagtttctcgtgatgaatgtggtgccaaaggcatacgctacactgattctggattccatcaagcgcctcgaaatggaaaaatcaagtgactttccactcagcgtggatgtcatttataaactatggcccgaagcgtctaaggtgaaggtgcattggcagcccgtcctcgagcctttgttctctgaattgctgcagaacgccgtgatttacagcatcagttgcgactgggtaagactggagcaggtgtacttttcagaacttgatgaaaatctagagtacacgaagaccgtgctgaactacctgcagagctccggcaaacagatcgccaaagtccctggaaatgtggatgccgccgtgcagctgacggccgcttctggtacgactcctgtaagaaaagtcacacctgcgtgggtacggcaggtacttaggaaatgtgctcatctgggctgcgcagaagagaagctgcacctgctggagttcgtgctctctgaccaggcatattcagagctccttgggctggagctactaccccttcagaatggtaatttcgtgcctttctcctcaagtgtaagcgaccaagacgtaatatatatcacttctgctgagtaccctagaagcctgtttccctccctggaaggcagatttattctcgataacttaaagccacacctggttgccgcactcaaggaggccgcccagactagagggaggccgtgcacccagctccagctgctcaaccccgagcgctttgcacggctgatcaaagaggtgatgaatactttctggcctggaagagaactcattgtgcagtggtatccctttgatgaaaaccgcaatcatccaagtgtctcgtggttgaagatggtatggaaaaatttgtacatccacttttctgaagacctgaccctgtttgacgagatgccactcatccccagaaccatactggaggagggccagacatgtgtggaactgatccggctgcgcataccaagtttagtgatcctggacgatgaatctgaagcccaactgccagagtttctggccgacatcgttcagaaactgggcggctttgtcctcaaaaaactggacgcctcaatccagcatcctttaataaagaaatacattcacagtcccctcccttctgcagtgctgcagatcatggagaaaatgcccctccagaagctctgtaatcagatcacaagcctgttaccaactcacaaggacgcgctccgtaagttcctggcatccctcacagactcctcagagaaagaaaaacgcataatccaagaactagccatatttaagagaatcaatcactcctcggaccaggggatttcttcgtatacaaaactgaagggatgtaaagtactccaccataccgctaaactgcccgccgatttgcgcctttccatctccgtaatcgattcatctgacgaagcaaccatcagactggccaatatgctcaaaatcgagcagctcaaaaccaccagttgcctgaagctggtgctgaaggatatcgaaaacgccttttattctcatgaagaggtaactcaactgatgctttgggtcctggagaatcttagttcgttaaagaatgagaatcctaatgtgctcgagtggctaactccactcaagtttattcaaatcagccaggaacagatggtatcggcgggtgagttgtttgaccctgacattgaagtgcttaaggatctgttctgtaacgaggaaggaacgtattttccaccctctgtgtttacctccccagatatcctccactctctgagacagattggtctgaagaacgaggcatctttgaaagaaaaagacgtagtccaggtcgccaagaagattgaggccctacaggtaggcgcctgcccagaccaggacgtgctgctcaaaaaagccaagacgctactccttgtcttgaataagaaccataccttacttcagtcatcggaggggaaaatgacgctgaagaagatcaaatgggttcccgcttgcaaggaacgaccaccaaattatcccggttctctggtgtggaagggagacctgtgcaatctgtgcgctccgccggacatgtgcgacgtggggcacgctatcctgataggatctagcctcccccttgtggagagtatccatgtgaatcttgaaaaagctttgggtatctttacaaagccctccctgtccgcggtgctgaaacacttcaaaatagtggtagactggtacagtagcaagacttttagcgatgaggattactatcagttccagcacattcttctcgagatctatgggtttatgcacgaccaccttaacgagggcaaagactctttccgtgcccttaagttcccctgggtctggactgggaagaaattctgcccattagcacaggcagttattaagccaatccacgatctcgatctgcagccctatcttcacaatgtcccaaaaacaatggccaaattccaccagctcttcaaggtctgcggctctattgaggaactaacctccgaccatatcagtatggtgattcagaaaatttacctgaagagcgaccaagatctgagcgagcaagagagcaaacagaatctccatctgatgttgaacatcattcggtggctgtatagtaaccagatcccagcgtcaccaaacaccccagttccgatccaccatagtaaaaaccccagtaagctaataatgaagcccatccatgagtgttgctactgtgatatcaaagtggacgacctgaacgatctcctggaggattccgttgaacctattattctagtgcacgaggacattccaatgaagactgccgagtggctcaaggtcccttgtctctctaccagactcattaaccccgagaacatgggtttcgaacagagtgggcagagggagccactgactgtaaggattaagaatatcctggaggagtacccctccgtgagcgacattttcaaggagctcctccagaacgccgatgatgctaacgcaacagaatgctcctttcttattgacatgagacggaatatggacattagggagaatttgttggatcccgggatggctgcatgtcacggccctgctctgtggagctttaataactcccagttcagcgatagcgatttcgtcaacatcacccgtctgggagagtccctgaaaagaggggaggtcgataaagttggcaagtttggattaggcttcaatagcgtttatcacattacagatattcccatcatcatgagccgcgagttcatgatcatgttcgaccccaatatcaatcatatcagtaagcatattaaggataaatcaaacccgggcattaaaattaactggtctaagcagcagaagcgattgaggaaattccctaaccagttcaaacctttcattgatgtgttcggttgtcaactgcctttaacagtggaggcaccatatagctacaacggcactctctttaggttgagctttaggacccagcaggaggcaaaggtcagtgaagtctcctcgacatgttacaatactgcagatatatacagcttggtggatgagttcagtctctgcgggcataggcttatcatctttacacagtccgtgaaatctatgtacctgaagtacctaaaaattgaggagactaatccgagcctcgcccaagataccgtcattatcaaaaaaaagtcatgctcttctaaagcgttaaacactccggtcctctcagtgttgaaggaagccgccaaactgatgaagacatgctcatctagcaacaagaagctgccctctgacgagcctaaatcctcgtgcattttacagatcaccgtggaggagttccaccacgtattcagacggatcgcagatttacagtctcctctcttccggggccccgacgatgatcctgccgctctgttcgaaatggcaaagtcgggacagagtaaaaaaccttcagatgaactgtcacagaaaactgtggagtgtaccacatggctcttgtgtacttgtatggacaccggcgaggcccttaaattcagcctatcggagtccgggagacggctcggcctcgtgccttgcggagcggttggtgtacagctgagcgagatccaagaccaaaaatggacagtgaagcctcacatcggcgaagtgttttgttatctgcccctccgcatcaaaaccggattaccggttcatatcaacgggtgctttgctgtgacttcaaatagaaaagaaatctggaaaacagatacaaaggggagatggaacactacgttcatgcgtcacgttattgttaaggcatacctgcaggtgctttccgttctgagagacctggctacctctggggaactcatggattacacatactacgccgtgtggccagatcctgacttggtccacgacgatttttccgtcatctgtcaaggtttttatgaggatatcgctcacggcaaggggaaggaactgactaaggtttttagcgacgggtcaacgtgggtgtccatgaaaaacgtccgcttcctcgatgactcaatcctgaagaggcgggatgtggggtctgcagccttcaagatttttctcaaatatttgaaaaagaccggctcaaaaaatctctgtgccgttgaactgccttcaagtgtaaagcttggctttgaggaggcaggctgcaaacagattctcttggagaacaccttcagtgagaagcaatttttctcggaggtattcttccctaatatacaggaaattgaagcagaactgcgggatccactcatgatcttcgttctgaacgaaaaagtggacgagtttagtggtgttcttcgggtgaccccatgcatcccatgctcccttgagggccatccattagtcctcccttcccggttgattcatcccgaaggcagggtggccaagctatttgacatcaaagatggacggtttccgtacggaagcacacaagactaccttaaccccatcatcctaatcaagctggttcaactcggcatggcgaaagacgatatactgtgggacgacatgctggaacgggccgtctctgtagctgagattaataaatccgatcacgtggccgcttgcctgaggtcttctatcctcctgtccctgatcgacgaaaagctgaagatccgggacccaagggccaaggattttgccgcaaagtatcagaccatccggttcctcccatttctgacaaaaccagctggcttttccctggattggaagggtaatagctttaaacctgaaacaatgtttgccgcaactgacctttacactgccgagcatcaagacatagtgtgcctgctgcagcccatcctgaatgaaaatagccacagcttccgaggatgcggctcagtgtccctcgcagtaaaagaattcctgggtcttctgaagaaaccaaccgtggacttggtgattaaccagcttaaagaagtggccaagtccgtggacgacggcattacactgtatcaagagaatatcaccaatgcctgctacaagtatttacatgaggctctgatgcagaacgaaattactaagatgtcaattatcgataaactgaaaccattctcctttatcctggtggaaaatgcttatgtggattcagagaaagtatccttccatttaaattttgaggcagccccatatctgtatcaactaccaaataaatacaaaaacaattttcgcgaactgttcgaaactgtgggggtgcggcagtcctgcacagtggaggatttcgccctagtattggaaagtatcgatcaggagcgaggaacgaaacaaatcactgaggagaactttcaactttgccgacggattataagcgaagggatctggtctttaatcagggaaaaaaaacaagaattttgcgaaaaaaactacggaaagatattacttccggatactaatctcatgcttctgcctgctaaatccctgtgctataacgactgtccttggatcaaggtgaaggatacaactgtgaaatattgtcacgcagatattccacgggaagtggccgtgaagttgggagctgtccctaaacgccataaggccctggaaagatacgcttctaacgtgtgttttacaacactcggcaccgagttcggtcagaaggagaagctgacctcacggattaagtcaattctgaacgcatacccttccgagaaggaaatgttgaaggagctcctgcagaatgcggatgatgccaaagccacagaaatctgttttgtcttcgatccacggcaacacccagttgacaggattttcgatgacaagtgggcccctttacagggaccagctctgtgcgtttataataaccagccctttactgaggatgatgtgcgcggaattcagaatctcgggaagggaacgaaggaaggaaatccctataagacggggcagtacggcatcggctttaattcagtatatcatatcacagactgccctagcttcattagcggcaatgatatcctttgtattttcgatccgcatgctcgctacgcgcccggagcaactagcatctcaccggggcgaatgtttcgcgacctggatgcagactttcgaactcagttctccgacgtactggatctctacctgggaacccactttaagctagataactgtaccatgtttagatttcccctgagaaacgcagagatggcaaaggtctcagaaatttcttccgtccctgcctccgaccggatggtccagaatttgcttgataaactgaggtccgatggcgccgaactgttgatgtttctgaaccacatggagaaaatctctatatgcgagattgataagagcacaggcgccctaaacgtgctgtatagcgtgaagggaaagataacagacggagaccgtctgaaaaggaagcaatttcacgcatccgttatcgacagcgtaaccaagaagcggcagctgaaggatatacccgtccaacaaatcacttacactatggatacagaggattctgaaggtaacctcaccacttggttgatttgcaatcgctccggttttagctccatggaaaaggttagtaagtccgtgatctctgcacataaaaatcaggacataaccttgtttccccggggaggcgtcgcggcatgtataacgcacaactacaagaaaccccatagagctttctgtttcttgcctctgagcctggagaccggcctgccctttcatgtgaacgggcactttgctctggattctgccaggagaaacctgtggcgggatgacaatggcgttggcgtgcgatcggactggaacaactcccttatgaccgctttgatcgcccctgcatatgtggaattgctgatccagctcaagaaacgatacttcccaggaagtgatccgacccttagcgttttgcagaatacccctatccacgtagtaaaggataccctcaagaagttcctgtctttctttcccgtaaataggttagatctgcagccagacctgtattgcctagtgaaggctttatacaactgtatccatgaggatatgaagcggctgctacccgtagtgcgggcgccaaatatagatggaagcgacttgcacagcgctgtcattataacctggataaacatgagtaccagtaacaagacccgaccgtttttcgacaatctcctgcaggatgagctgcaacatctgaagaatgccgactataacatcactactaggaaaaccgttgctgagaacgtgtatagactcaagcacctcctcctagagatcggattcaatctggtctataattgtgacgaaactgccaatttgtaccactgcttaatcgacgcagatattccagttagttacgtcacccccgcagatatccggagctttctgatgaccttcagcagtcccgacaccaactgccacattgggaaactgccgtgtcggcttcagcagactaatctaaagctgtttcactcactgaaacttctcgttgattactgttttaaggatgctgaggaaaacgaaattgaagttgaagggttacctctcctaattacgcttgactcagtgcttcagacattcgatgccaagaggccaaagtttctgacaacataccacgaactgatcccctcgagaaaggacctctttatgaataccttatacctgaagtactccaatatcctgctgaactgcaaggtagccaaggtatttgatatctcaagttttgcggatcttctgagctccgtactaccccgggagtataaaaccaagagttgtaccaaatggaaagataatttcgcttctgagtcctggctgaaaaatgcttggcattttatctccgaatccgtctccgtaaaagaggatcaggaggagacaaaacccacttttgacatagtcgtggatactcttaaagactgggcactgcttccaggtaccaagttcacagtatcagctaaccagttggtggtgcccgagggcgatgtgctgcttccactgagcctaatgcatattgctgttttcccgaacgctcagagcgacaaggtgtttcatgccctgatgaaagctggatgcatccagctcgcccttaataagatttgtagcaaggatagcgcattcgtaccgttactaagctgtcacaccgctaacattgagtcaccaactagtattctcaaggccctgcattacatggtacagacctctaccttcagagccgaaaagctggtggagaatgactttgaggcgctgctgatgtactttaactgtaatttaaatcacttaatgagccaggacgatatcaaaatcttgaaaagcctgccttgttataagtccatttctgggagatacgtctcgatcggtaaattcggaacctgttacgtactcaccaagtcaattcctagcgccgaggtggaaaagtggactcagtcttcttcctctgccttcttggaggagaaaattcatttgaaagagttatatgaggtcatagggtgcgtacccgtcgatgacctagaagtttacttaaagcacctgcttccaaaaatcgagaatctcagctatgacgccaaactggaacatcttatctatctgaaaaaccggttatcctcagcagaagagctctcagaaatcaaagaacagctattcgagaagctggagagtttattgatcatccatgacgcgaatagcaggctcaagcaggcaaagcatttctatgacagaactgttagggttttcgaagtgatgctgcccgagaagctcttcatcccaaatgatttctttaaaaaactagaacagttgattaagcccaagaaccacgtcacctttatgactagttgggtcgaattcttgcggaacattggtcttaagtatatattatctcaacagcagctgctgcagttcgccaaggagatctcagtgagggccaacactgagaactggtctaaagagaccctgcagaacacagtggacatcctgttgcatcatatttttcaggagcgaatggatcttctatccggtaatttcctcaaagagctgtctctgataccattcctgtgccccgagcgcgccccagccgaatttatacgttttcacccccagtatcaggaggtgaacggtacattgcccttgatcaaatttaatggagcgcaggtgaatcccaagtttaaacaatgtgacgtattacaactgctgtggacgtcgtgcccgatcctccctgaaaaggccactccgctttctattaaggaacaggaaggttctgacctggggccacaggaacagctagaacaagtactcaatatgctcaatgtcaatctcgacccccctctggacaaggtgatcaataactgccgcaacatttgtaacatcacaactttggatgaagaaatggtaaaaaccagagcaaaggttctaaggagcatatacgagttcctcagtgctgagaaaagagagtttcgtttccagctgcggggagtcgcctttgtaatggttgaagatgggtggaagctactcaaacctgaggaggtggtgattaaccttgagtatgagagcgacttcaaaccctatctctacaagctgcctttggaactggggacctttcatcagctgtttaagcacctgggaactgaggacattatctccacgaaacagtatgtggaagtgctctctcggatcttcaagaactctgaaggtaagcagctggaccctaacgagatgcgtacagtgaaaagggtggtgtccgggctgtttcgctctctgcagaatgatagcgtcaaggtgcggagcgacctggaaaacgtgcgagacctcgcattgtatcttccatcccaggacgggaggctggtgaagtccagcatccttgtgtttgacgatgctccgcattacaaaagccgcattcagggaaacattggggtacagatgcttgtcgacctgtcacagtgttatcttggaaaggatcacgggtttcacaccaagctgataatgctgttccctcagaagctgagaccacgccttttgtcctctatcttggaagagcagcttgatgaggagacccccaaggtgtgtcagtttggcgctctgtgctctctgcagggacgactgcagctgcttctcagtagcgagcagttcattaccgggctcatcagaatcatgaaacacgaaaacgataatgcattcttagctaatgaggagaaggcaattcgcctgtgcaaggctctcagagaaggcctgaaggtttcttgctttgagaagttacagaccacgctgcgggttaagggattcaacccaattccacactcccgaagtgagacttttgcatttttaaagaggttcgggaacgccgtcatactactctacattcaacactccgacagcaaagatatcaatttcctgctggcactggccatgacattgaaatcagccacagataatctgattagcgatacgagctatctaatcgctatgctgggctgcaatgatatataccgaatcggtgagaaactcgatagtctcggagtgaaatacgactcaagcgaaccttccaagctggagttacccatgccaggtacccctattccagcagagattcactatacattgttgatggatcctatgaacgtgttctatcctggggagtatgttggatacctagttgatgctgaggggggcgacatctatgggagttaccagcccacttatacatacgccattatcgtacaggaagttgagcgcgaagatgccgacaattcatctttccttggaaagatttaccagatcgatattggctactccgagtataagattgtgtcatctctagacctgtacaaattcagccggcccgaggaatcctctcagtccagggactcagccccatctactccgacttctccaaccgagtttctgacacccggactccggtccatccctcctctgttcagcggccgagagtcccacaagacttcatccaaacatcaatcccccaaaaaactgaaagtaaactcattaccagagattctcaaagaggtgacgtccgtcgtggaacaggcgtggaaactgcccgagtctgaacgcaagaaaatcataaggagactttacctgaagtggcaccccgacaaaaatcctgagaaccatgatattgccaatgaagtattcaagcacctgcagaacgagattaacaggctcgaaaagcaagcctttcttgaccagaacgccgatcgggccagtcgaagaaccttcagcacgagcgctagtaggtttcaaagtgacaaatatagcttccagagattctatacatcttggaaccaggaggccactagccacaaaagtgagaggcagcagcagaacaaagagaagtgtcccccgagtgccggccagacatacagtcagcgtttcttcgtgcctccaactttcaagagtgtgggcaatcccgtggaagccagaaggtggctgagacaggctcgggctaatttctctgctgcaagaaacgatttacacaaaaacgctaacgagtgggtgtgcttcaaatgttatttatccactaaactagcgctgattgcagctgattacgccgtgaggggaaaatcagataaagatgtgaagcctactgccctggcacagaaaatagaagagtattctcaacaactcgagggcctgaccaatgatgtccatacgcttgaagcctatggcgtggactcactcaagaccagataccccgatctactcccttttcctcagatccccaatgaccggtttaccagtgaagtagcgatgagagtgatggagtgcaccgcgtgtataatcatcaagctggagaactttatgcaacagaaagtctag

SEQ ID NO: 179596 - DNA, 13740 bp, Artificial Sequence
  derived and/or modified sequence
atggagaccaaggagaaccggtgggtacctgtcaccgtgctgccagggtgcgtgggttgccgcaccgttgcagctcttgcctcttggaccgtcagggatgtgaaggagaggattttcgccgagactggtttccccgtgtctgaacagcggttatggaggggaggccgggagctgagcgactggattaagattggcgatcttacatcgaagaactgtcacctattcgtaaacctgcaaagtaagggcctgaagggcggcgggcggtttggtcaaaccacccctcctctggtcgactttttgaaggatatcctgaggaggtaccctgagggcggccagatactaaaggaactgattcagaatgcagaagatgccggagctaccgaggtaaaattcctttatgatgaaactcagtacgggaccgagactctgtggtccaaggatatggcaccgtatcagggcccggcactgtacgtgtataataacgccgtcttcactcctgaagattggcatgggatacaggagatcgccagaagcagaaagaaggacgatcccctgaaggttggccgctttgggataggattcaactctgtttaccatatcactgatgtgccatgtatatttagtggagaccaaatcggaatgctcgaccctcaccagacgctctttggaccccatgagtcaggtcagtgctggaacttgaaggacgacagcaaggaaatcagtgagttatctgaccagttcgctccattcgtgggaatattcggctccaccaaagaaactttcataaatggaaacttccccggcaccttctttagatttcccctgaggctgcagccaagtcaactctcttcgaacctctacaacaagcagaaagtgctggagttgtttgaatcttttcgcgccgatgcagacaccgtcttactgtttttgaagagtgtgcaggacgtgtcgctatatgtccgagaggcggacgggactgagaaactggtcttccgagtgacttcatcagaaagtaaggctctgaaacatgaaagacctaactccatcaagatcctcggaaccgccataagcaactactgcaagaaaacaccgtcaaacaatataacctgtgtgacctatcacgtgaacattgtgcttgaggaggagagcaccaaggacgcccagaaaacctcatggctcgtgtgcaattctgtgggagggcggggtatctccagcaaattggactcgctggccgacgagctgaaattcgtgcctatcatcggcattgccatgccactatcaagtcgggacgatgaggccaagggggctacatccgacttctccgggaaggctttttgtttccttccattaccgcccggagaggagtcttccaccggattaccagtgcatatatctggattctttggcctgaccgacaatcgtcggagcattaagtggcgtgagttggatcaatggagggatcctgcagcattatggaacgagttccttgtgatgaatgtggtacccaaggcatacgctacacttattttagattctataaagagattggaaatggaaaagtcgtctgacttcccactgagcgttgacgtaatatataaactgtggcctgaggcttcaaaggtgaaggtacactggcagcccgttcttgagcctctatttagtgagctcctgcagaatgccgtcatatacagcatttcatgtgactgggtgcgcctggagcaggtgtatttttctgaacttgatgaaaacctggagtatacgaaaaccgtactcaactaccttcagagctctggaaagcagatagctaaggtaccaggcaatgtggatgcagctgtgcaacttacagcggcctcagggaccacacccgtgcgtaaggtgactcccgcctgggtgcgccaggtgctgagaaaatgcgcccatcttgggtgcgcagaagaaaagctccatctcctcgaatttgtcctctccgatcaggcttactctgagctcctcggactggaattgctgccactgcaaaacggcaacttcgtgccattttctagcagcgtctcagaccaggacgtcatctacattacatccgcagaatacccgcgatcgctgttcccctcactggagggccggttcatcttagacaatttaaaaccccatcttgtggccgccctgaaggaagccgcccaaacccggggaaggccttgtacccagttacaactccttaatcccgagcgctttgctcgccttataaaagaggtgatgaataccttctggcccggacgggaactaatcgtacagtggtaccccttcgacgaaaaccgtaatcaccccagcgtgtcatggctgaaaatggtgtggaaaaacctgtatatacatttctccgaggatctaacgctgttcgatgagatgcccctcatccctagaaccattctggaggagggacagacttgtgttgaattgattcgcctgcggatcccatccctggtcatcctcgacgacgaaagcgaggcccaactgcccgaattcctggccgacatcgtgcagaagctgggaggcttcgtcctgaaaaaactggacgcatcaatccagcatcctctgataaagaaatacatccattcaccactgcctagcgctgttttgcagataatggaaaagatgccgttacaaaagctttgtaaccagatcacgtctctgttgcctacacacaaggacgccctccgcaaattccttgccagcctgactgactcctctgagaaggaaaagcgcatcatccaggagttggctattttcaagaggatcaatcattcaagtgatcaaggaatttcttcttacacaaaactaaaggggtgcaaggtgctccaccacaccgcgaaactcccggcagaccttcggctttccatctcagtgattgattcctctgatgaagcaaccatcagattagctaacatgttgaagattgaacagctgaaaaccactagttgcctcaaactagtccttaaagacatcgagaatgcattctactcccacgaggaagtcacccaattaatgctgtgggtgcttgagaatctgagttctctgaagaacgagaatccgaacgtgctggaatggctgactccattgaagttcatccagatcagccaggagcaaatggtgtcagcaggcgaactgttcgatcccgacatcgaagtgctgaaagatctattttgtaatgaagagggtacgtactttcccccgagcgtatttacctcacccgatattctgcatagcctacgtcagataggattaaaaaacgaagcgagtctcaaagaaaaggacgtggtgcaggtggccaaaaagatcgaggcgcttcaggtaggtgcctgccccgaccaggatgtattattaaaaaaggccaagacactgctgctcgtcctgaacaagaatcacactctgctgcagtcatctgaaggcaaaatgacgcttaagaaaattaagtgggtacccgcctgcaaggaacgcccgcccaactaccccggttcactggtctggaagggggatctctgtaacctttgtgctccacctgacatgtgtgacgttggccatgcaatattgatcgggagtagtctgccactggtcgaaagcatccacgtaaatctcgaaaaagcactaggaattttcacaaagccctccttaagtgctgtgctaaagcatttcaagattgttgtggattggtattctagcaagaccttctcggatgaggattactatcagttccagcacatactactcgagatctacgggtttatgcatgatcaccttaacgaaggtaaggatagcttccgcgcactgaagttcccctgggtctggactggcaagaagttttgtcctttagctcaggccgtaattaagccaattcatgatttggacctgcaaccctatctgcataatgtgccgaagactatggcaaagttccatcagttgttcaaggtgtgtgggtccatcgaggagctgacaagcgatcacatcagcatggttatccagaaaatttacctgaagagcgaccaagatctgagtgagcaggagagcaagcaaaacctccacctcatgttgaacattatccgatggctctacagcaaccagatccccgcatcccctaacaccccagtgcccatccaccatagcaaaaacccttctaaactgattatgaaaccgatacacgaatgctgctattgcgatatcaaagtggacgacctcaacgaccttttagaggactccgtggaacccatcattctagtccacgaggatattcccatgaagaccgctgagtggctcaaggtgccctgtctgtctacgaggctgatcaatcccgagaatatggggttcgagcaatccggccagagggagcctttgactgttagaataaaaaatatcttagaggaataccccagcgtcagcgacattttcaaagagctgctccaaaacgcggatgatgcaaatgctactgaatgctcctttctgatagacatgcggcggaacatggatattcgggaaaatttactggaccccgggatggcagcctgtcatggcccagcactgtggtccttcaataactcccagttttctgactctgatttcgtgaacattacaaggctgggggaatcacttaagagaggtgaggtggacaaggtaggcaaattcggcctcggattcaacagcgtgtaccacataacagatattcctatcatcatgtctcgagaattcatgatcatgttcgatcctaacattaatcacattagcaagcatatcaaggataaaagcaatcctgggataaaaattaactggagcaaacaacagaagcgactccgcaagtttccaaaccaatttaagcccttcattgacgtatttgggtgccagcttccactgactgtggaggctccatactcctataatggaactctgttccgccttagcttccgtacgcagcaggaagcaaaggttagtgaggtctccagcacttgttacaatacagcagacatatacagtttagtagatgagttcagcctgtgtgggcataggcttataatttttacacagtccgtcaagtccatgtatctcaagtatctcaagatcgaggaaacgaacccctccctggctcaggatactgttatcatcaaaaagaagagttgctcctctaaagccctcaacaccccggttctttcagtattgaaagaagccgccaagctaatgaaaacctgttcttcttccaataagaagctgccctctgacgaaccgaagagctcttgcattctacagatcaccgtggaagaattccaccacgtctttaggagaatcgcagatctccaaagcccgctcttccggggcccggatgacgatcccgcggctctgtttgagatggccaaaagcggccagagtaaaaaaccctcggatgaactttctcaaaaaactgttgagtgcaccacttggcttctgtgcacctgcatggatacaggcgaagcactaaaattttcgctgtctgaatctgggaggagactcgggctcgtcccttgcggcgctgtcggcgtccagctgagcgagatccaggatcagaagtggactgtaaagcctcacataggcgaggtgttctgctacctgccactccgtatcaaaacaggtctgccggtgcacattaacggctgcttcgccgtgactagcaaccggaaagaaatatggaagacggacaccaagggacgctggaatacaacctttatgcggcacgtaattgtaaaggcctatctgcaggtcctctctgttttgagggatcttgccacaagcggggagttgatggattatacgtactatgcagtctggcccgatcctgacctggttcatgacgatttcagtgtgatctgtcaggggttctatgaggacatcgcccacgggaaaggtaaggaactgacaaaagtattttctgacgggagcacatgggtttcaatgaaaaacgtcaggttccttgacgatagtattctgaaaaggagagacgtgggatctgctgctttcaagatcttccttaagtatttaaagaagaccgggtctaaaaacttgtgtgctgtagaactgccctcctcggttaaattgggcttcgaggaagcgggttgtaagcagattctgttggagaatactttttccgagaagcagttcttttctgaggttttttttcctaatatacaggaaatagaggctgaactccgggatccgctaatgattttcgtcttgaacgaaaaggtcgacgagttcagtggtgtgctccgggtcaccccatgtattccatgtagtttagaaggccatcctctagtcctgccttcccgactgatacacccggagggccgagtcgctaaactattcgacataaaggacgggcgatttccatacggcagcactcaagactacctcaatcctatcattctcatcaagcttgtacaattgggaatggcaaaggacgatattctgtgggatgacatgctagagagagccgtatcggtcgctgagattaataaatccgaccatgttgcagcctgccttcggagctccattctactcagccttatcgacgaaaagctgaagataagagatcctagggccaaggactttgctgccaaatatcagaccattcgctttctgccctttctgacaaagccagccgggttttctcttgactggaaggggaacagttttaagccggagacaatgtttgcggcgacagacttgtatacagcagaacaccaggacatagtgtgtctgctccagcctatattgaatgagaattcacattctttccgaggctgtgggagcgtctccttggcagtcaaagagtttctgggcttgctaaagaaacccaccgttgatctcgtgatcaaccagctgaaggaagtggcgaagagcgtggatgatggaattactctgtaccaggagaatatcacaaatgcctgctataagtatctgcatgaagcgttgatgcagaatgagattaccaagatgtccataattgataaactaaagcctttctcattcatactggtggagaacgcttatgtcgatagcgaaaaggtgtctttccacctgaactttgaggccgccccctatttatatcagcttccgaataaatataagaataatttccgtgagctcttcgagaccgtcggggtccgacagagttgcaccgtagaagattttgcccttgtcctggaatccatcgaccaggaacgcgggactaagcaaatcaccgaggaaaactttcaactgtgtagaaggattataagcgagggaatttggtctctaatcagggagaagaaacaggaattctgcgagaagaactacggaaaaatcctcctgccggatactaatctgatgttacttcccgcgaagtccctgtgctataacgattgtccttggatcaaggtgaaggataccaccgtgaagtactgccacgccgacattccaagggaggttgctgtgaaactgggcgccgtgccaaagcgtcataaggctctggaacgctacgcatcgaatgtgtgtttcacaacacttgggacggagtttggccagaaagagaagttgactagccggattaaatccatcctgaacgcgtacccgtccgagaaggagatgctcaaagaacttctccagaatgccgacgacgctaaggcaactgagatttgcttcgtatttgaccccagacagcaccccgttgaccggatcttcgatgataagtgggcacctctgcaggggcccgccctgtgcgtctacaataaccagccgttcactgaggatgacgtgcgaggtatccaaaacctggggaagggaactaaagaaggtaatccttataagaccgggcagtacgggattgggttcaacagtgtgtaccacattactgactgtccttcgttcatctcaggcaacgatattctttgcatattcgacccacacgctcgctatgcgccaggggccaccagcattagccccggtcggatgttcagagacctggatgccgacttcaggacccagttttctgatgtgctcgatctttacctgggtacccacttcaagttggacaactgcacgatgtttcgttttcctttgcggaacgccgaaatggccaaagtgtctgagatctcaagcgtgcccgccagcgaccgcatggtgcagaacctcctggacaaattgcggagcgacggggccgagctgctgatgttccttaatcacatggaaaaaatctcaatttgtgaaatcgacaaatccacaggggcccttaatgttttgtacagcgtcaaaggaaaaattacagacggagacaggttgaagaggaagcagttccatgcctccgtgattgacagcgtgactaaaaagcggcaacttaaagacattcccgtccagcaaattacttatacaatggacaccgaggactccgaggggaatctcacgacatggctgatttgcaaccgatctggcttctcttcgatggagaaggtgagcaagtcagttatttctgcccacaaaaatcaggacattacactttttccacgtgggggggttgcagcgtgtataacccacaactataagaagcctcaccgcgccttttgctttctgccgctgagccttgagactggcctgccattccacgtgaacggtcactttgcccttgattccgctcgacgcaatctgtggcgggacgacaacggagtgggagtgagaagtgattggaacaactccctgatgacagcccttatcgccccagcctatgtggaactgctaatacagttgaagaaacgatacttccctggttccgatcctaccctctccgtcctccagaatacacctattcacgtggtgaaggacactttgaagaaatttctctccttctttcccgtaaataggctcgatttgcagccagacctgtattgtctcgtcaaggcactatataattgtatccacgaagacatgaagcggcttctccctgtcgttagggcaccgaacatcgacggttcggatctgcattccgccgtcataatcacatggatcaacatgagtaccagcaataagactagaccgttcttcgacaacctgctgcaggacgagctgcaacacctgaagaacgcagactataatattaccactcggaaaactgtggccgaaaacgtttacaggctgaaacatcttttattggagattggctttaatctcgtttacaattgcgatgaaactgctaacctttaccattgcctgatagatgccgatataccagtcagttatgtaacgccagcagacatcaggtcttttctcatgactttttcttcccctgacacgaactgccacatcggaaagctcccctgcagactacagcagacaaatcttaagctcttccacagcctaaaactcttagtggactactgtttcaaggatgcagaggaaaacgagattgaagttgagggactgcctctgctcatcaccctggactccgttcttcagacattcgacgcgaagcggcccaagtttctcacaacataccatgagttgatcccatcaaggaaggacctgttcatgaatacattatacttgaagtacagtaacatccttctaaattgcaaggttgcaaaggtcttcgacattagttcttttgctgacctgttgtcaagtgtgttgccccgcgagtacaagaccaaatcctgcaccaagtggaaggacaatttcgccagcgaatcatggctgaagaacgcttggcacttcatctctgagagcgtcagcgttaaggaggaccaggaggaaaccaagccaaccttcgacatcgtggtcgatactcttaaggactgggcactattgcccggcactaaatttacggtatctgctaatcaactggtggtccctgaaggtgacgttctcctgccactttccctgatgcacatcgcggtgtttcccaacgctcaatccgataaggtattccatgcgctcatgaaggccgggtgtattcagctggccctgaataagatttgctcaaaggactcggctttcgtgccgctcctttcctgtcatactgcaaacatcgagagtcccactagtattctgaaggccctccactatatggtccaaacctcaaccttccgcgccgagaaactagtcgaaaatgatttcgaggccctcctgatgtacttcaattgtaacctgaatcacctgatgagtcaggacgacattaagatcctcaagagtctgccctgttacaagtccatatccggtcgttacgtcagcataggtaagttcggtacctgctatgtgctgacgaaatctatcccctcggctgaagttgagaaatggacacaaagttcgagtagcgcattcctggaagaaaaaattcacctgaaggagctgtacgaggtgattgggtgcgtgcctgtcgatgatctggaggtttatctcaaacacctgcttcccaagattgagaacttgagctatgacgcaaaattagagcacctgatctacctgaaaaataggctgtccagcgctgaggagctttccgagattaaagagcaactgttcgagaagctggaaagcctcctgatcattcatgacgccaatagcagacttaaacaggcgaagcacttttacgatcggacagtaagggtgtttgaggtaatgctacccgaaaagctattcatccccaatgacttctttaaaaaattagagcaactaattaagccaaaaaatcacgtcacattcatgactagctgggtggaattcctccgcaacatcggactcaagtatattctgtcgcagcagcaactgcttcagttcgccaaagaaatatccgtccgtgcgaatactgaaaactggagtaaggaaacattacagaatactgtggatatcctgcttcatcatatctttcaggagaggatggacctgctcagtggaaattttcttaaggaactgtctctgatcccctttttgtgtccagagcgggcccccgccgagtttattaggttccacccccagtaccaagaggtcaacggcacattgcctctgatcaagttcaacggggcgcaggtgaaccccaagttcaaacaatgtgatgtactgcagcttctgtggacctcctgcccaatactccccgagaaggccacacctctttccatcaaagagcaggaaggctccgacctggggccccaagagcagctggagcaagtgctgaatatgttgaacgttaatttggatccaccactggacaaagtgattaacaactgtcgtaacatctgcaacatcacaactctcgacgaagagatggtcaaaaccagggctaaagtgctgagatctatctacgagtttttatcagccgagaaacgtgaatttagatttcagctgcgcggtgttgcctttgttatggtagaagacggctggaaactcctgaaacctgaagaagtagttataaatctcgagtacgaatctgattttaaaccatatctctacaaactgccattggaacttggcaccttccatcagctgttcaaacacctgggaactgaagatatcatttctacaaagcagtatgtggaggtcctcagtaggattttcaaaaatagtgaaggaaaacagctggatcccaatgaaatgaggacagtgaagagggtcgtaagcggcctttttcgctccctacaaaatgatagtgtgaaggttaggtctgacctggaaaacgttagagatctggccctgtatttgccttcacaagacggtagacttgtgaaatcctctatcctagtgtttgatgacgcaccccactataagagccgcattcaagggaatattggagtgcagatgctcgtggacctgtctcagtgctacctgggcaaggatcacggcttccatactaaactgattatgctcttccctcagaagctgcgccccagactcctgtcatcgatcctagaagagcaactggacgaggaaacccctaaagtctgccagtttggcgcactttgttcacttcagggacgcctacaactgctgctgagctctgaacagttcattaccggattaatcaggatcatgaaacatgagaatgacaatgcattcctggccaacgaagagaaagcgattcggctgtgcaaggccctccgagaaggcctgaaggtttcttgcttcgagaagctgcaaactaccctgagagtcaagggcttcaacccgattcctcattcacggtcggaaactttcgcattcttgaagcggttcggtaatgccgtgatacttctgtacatacaacacagcgatagtaaagacattaactttctcctggcgttggccatgacactaaaaagcgccacagacaatttaattagcgatacctcttacctaatagctatgcttggatgcaacgacatctacagaatcggcgagaaactggattccttgggagtaaaatacgatagttccgaacccagtaagttggaactccctatgcccggcacccccatccccgcggagatacactatacactgctgatggatcccatgaacgttttttacccaggggagtacgtgggttacctggtggacgcggagggcggagatatatacgggtcctatcaaccaacgtacacttacgcaattatcgttcaggaggtggaaagggaggacgctgacaacagttcttttctcgggaaaatctaccagattgatatcgggtactccgaatacaagatcgtgtcaagtctagacctgtataaatttagccgccctgaggagagcagccagagcagagatagcgctccttctactccaacctctccaaccgagttcctcacacctggcttaagatccatccctcctctgttctcaggacgggagtcacacaaaacctcgtccaagcaccagagtccaaagaagctcaaggttaactctctgccagaaattcttaaagaggtcaccagcgtcgtggaacaggcctggaaattacccgagagtgagagaaagaagattatccgcagactgtatctcaagtggcacccagacaagaatccagaaaaccatgatattgcaaatgaggtctttaagcacctgcagaatgagatcaatcgccttgaaaagcaggcttttttggaccagaacgccgacagagcctcacgtcgcacctttagcacgtctgcatctaggttccagtccgataagtattcattccagcgcttttatacctcctggaatcaggaggccaccagccataagtccgagaggcagcagcagaacaaagagaagtgtccacccagcgccggccagacgtattcccagaggttcttcgtacccccaacattcaaatccgtgggtaatcctgtcgaggcgaggagatggctcagacaggccagagccaatttctcagccgcaagaaatgatcttcacaagaatgccaacgagtgggtgtgttttaagtgttacttgtccaccaagctggccctgattgcagctgactacgcagtgcgggggaagtctgataaggacgtaaaaccaaccgcactggcccagaagatcgaggagtattcccaacagttggaaggactgactaatgatgtgcacaccctagaagcctacggagtagatagccttaaaactcgttatccggatcttctgccttttcctcagatcccaaatgacagattcacctctgaagtggcaatgagggtcatggaatgcacggcatgcatcattatcaagctcgaaaactttatgcagcagaaggtctag

SEQ ID NO: 179597 - DNA, 13740 bp, Artificial Sequence
  derived and/or modified sequence
atggagaccaaggaaaatcgctgggtgcctgtgacagtgctgcccggctgtgtgggctgcaggacagtggccgccctggcctcctggacagtgagagatgtgaaggagcgcatctttgctgagaccggcttccctgtgtctgagcagaggctgtggaggggcggccgggagctgagtgactggatcaagatcggggacctgaccagcaagaactgccacctgtttgtgaacctgcagagcaagggcctgaagggcggcggccgcttcggccagaccaccccacccctggtggacttcctgaaggacatcctgcggcgctacccagagggcggccagatcctgaaggagctgatccagaatgcagaagatgctggggccacagaggtgaagttcctgtatgatgagacccagtatggaacagagaccctgtggagcaaggacatggccccctaccagggccctgccctgtatgtgtacaacaatgctgtgttcaccccagaggactggcacggcatccaggagatcgcccggagcaggaagaaggatgaccccctgaaggtgggccgcttcggcatcggcttcaacagcgtgtaccacatcacagatgtgccctgcatcttcagcggggaccagatcggcatgctggacccccaccagaccctgtttggcccccatgaaagtggccagtgctggaacctgaaggatgacagcaaggagatcagcgagctgagtgaccagtttgccccctttgtgggcatcttcggcagcaccaaggagaccttcatcaatggaaacttccctggcaccttcttccgcttccccctgcggctgcagcccagccagctgagcagcaacctgtacaacaagcagaaggtgctggagctgtttgagagcttccgggcagatgctgacacagtgctgctcttcctgaagtctgtgcaggatgtgtccctgtatgtgcgggaggctgatggaacagagaagctggtgttccgggtgaccagcagcgagagcaaggccctgaagcatgagcggcccaacagcatcaagatcctgggcacagccatcagcaactactgcaagaagacccccagcaacaacatcacctgtgtgacctaccacgtgaacatcgtgctggaggaggagagcaccaaggatgcccagaagacctcctggctggtgtgcaacagcgtgggcggccggggcatcagcagcaagctggacagcctggctgatgagctgaagtttgtgcccatcatcggcatcgccatgcccctgagcagcagagatgatgaggccaagggggccaccagtgacttcagcggcaaggccttctgcttcctgcccctgcccccaggagaggagagcagcacaggcctgcctgtgcacatcagcggcttcttcggcctgacagacaacagaagaagcatcaagtggagggagctggaccagtggagggaccctgctgccctgtggaatgagttcctggtgatgaatgtggtgcccaaggcctatgccaccctcatcctggacagcatcaagaggctggagatggagaagagcagtgacttccccctgtctgtggatgtgatctacaagctgtggccagaggccagcaaggtgaaggtgcactggcagcctgtgctggagcccctcttcagcgagctgctgcagaatgctgtgatctacagcatcagctgtgactgggtgcggctggagcaggtgtacttcagcgagctggatgagaacctggagtacaccaagacagtgctgaactacctgcagagcagcggcaagcagatcgccaaggtgcctggaaatgtggatgctgctgtgcagctgacagctgccagcggcaccacccctgtgaggaaggtgaccccagcctgggtgcggcaggtgctgaggaaatgtgcccacctgggctgtgccgaggagaagctgcacctgctggagtttgtgctgagtgaccaggcctacagcgagctgctgggcctggagctgctgcccctgcagaatggaaactttgtgcccttcagcagctctgtgtctgaccaggatgtgatctacatcaccagcgctgagtaccccaggagcctcttccccagcctggagggccgcttcatcctggacaacctgaagccccacctggtggccgccctgaaggaggccgcccagacccggggccggccctgcacccagctgcagctgctgaaccctgagagatttgcccggctcatcaaggaggtgatgaacaccttctggccaggccgggagctgattgtgcagtggtacccctttgatgaaaatagaaaccaccccagcgtgtcctggctgaagatggtgtggaagaacctgtacatccacttcagcgaggacctgaccctgtttgatgagatgcccctcatccccaggaccatcctggaggagggccagacctgtgtggagctgatccggctgcgcatccccagcctggtgatcctggatgatgagagcgaggcccagctgcctgagttcctggccgacatcgtgcagaagctgggcggctttgtgctgaagaagctggatgccagcatccagcaccccctcatcaagaagtacatccacagccccctgcccagcgctgtgctgcagatcatggagaagatgcccctgcagaagctgtgcaaccagatcaccagcctgctgcccacccacaaggatgccctgaggaagttcctggccagcctgacagacagcagcgagaaggagaagaggatcatccaggagctggccatcttcaagaggatcaaccacagcagtgaccagggcatcagcagctacaccaagctgaagggctgcaaggtgctgcaccacacagccaagctgcctgctgacctgcggctgagcatctctgtgattgacagcagtgatgaggccaccatccggctggccaacatgctgaagattgagcagctgaagaccaccagctgcctgaagctggtgctgaaggacattgaaaatgccttctacagccatgaggaggtgacccagctgatgctgtgggtgctggagaacctgagcagcctgaagaatgaaaaccccaacgtgctggagtggctgacccccctgaagttcatccagatcagccaggagcagatggtgtctgctggggagctgtttgatcctgacatcgaggtgctgaaggacctcttctgcaatgaggagggcacctacttcccccccagcgtcttcaccagcccagacatcctgcacagcctgcggcagatcggcctgaagaatgaggccagcctgaaggagaaggatgtggtgcaggtggccaagaagattgaggccctgcaggtgggcgcctgcccagaccaggatgtgctgctgaagaaggccaagaccctgctgctggtgctgaacaagaaccacaccctgctgcagagcagcgagggcaagatgaccctgaagaagatcaagtgggtgcctgcctgcaaggagcggccccccaactacccaggcagcctggtgtggaagggggacctgtgcaacctgtgtgcccccccagacatgtgtgatgtgggccacgccatcctgattggcagcagcctgcccctggtggagagcatccacgtgaacctggagaaggccctgggcatcttcaccaagcccagcctgtctgctgtgctgaagcacttcaagatcgtggtggactggtacagcagcaagaccttcagtgatgaggactactaccagttccagcacatcctgctggagatctacggcttcatgcatgaccacctgaatgaaggcaaggacagcttccgggccctgaagttcccctgggtgtggacaggcaagaagttctgccccctggcccaggccgtcatcaagcccatccatgacctggacctgcagccctacctgcacaacgtgcccaagaccatggccaagttccaccagctgttcaaggtgtgtggcagcattgaggagctgaccagtgaccacatctccatggtgatccagaagatctacctgaagagtgaccaggacctgtctgagcaggagagcaagcagaacctgcacctgatgctgaacatcatccgctggctgtacagcaaccagatcccagccagccccaacacccctgtgcccatccaccacagcaagaaccccagcaagctgatcatgaagcccatccacgagtgctgctactgtgacatcaaggtggatgacctgaatgacctgctggaggacagcgtggagcccatcatcctggtgcatgaggacatccccatgaagacagctgagtggctgaaggtgccctgcctgagcaccaggctcatcaaccctgagaacatgggctttgagcagagcggccagcgggagcccctgactgtgcgcatcaagaacatcctggaggagtaccccagcgtgtctgacatcttcaaggagctgctgcagaatgctgatgatgccaatgccacagagtgcagcttcctgattgacatgagaagaaacatggacatccgggagaacctgctggaccccggcatggccgcctgccacggccctgccctgtggagcttcaacaacagccagttcagtgacagcgactttgtgaacatcacccggctgggggagagcctgaagagaggagaggtggacaaggtgggcaagtttggcctgggcttcaacagcgtgtaccacatcacagacatccccatcatcatgagccgggagttcatgatcatgtttgaccccaacatcaaccacatcagcaagcacatcaaggacaagagcaaccctggcatcaagatcaactggagcaagcagcagaagaggctgaggaagttccccaaccagttcaagcccttcattgatgtgtttggctgccagctgcccctgactgtggaggccccctacagctacaacggcaccctcttccggctgtccttccgcacccagcaggaggccaaggtgtctgaggtgagcagcacctgctacaacacagctgacatctacagcctggtggatgagttcagcctgtgtggccacaggctcatcatcttcacccagagcgtgaagtccatgtacctgaagtacctgaagattgaggagaccaaccccagcctggcccaggacaccgtcatcatcaagaagaagagctgcagcagcaaggccctgaacacccctgtgctgtctgtgctgaaggaggccgccaagctgatgaagacctgcagcagcagcaacaagaagctgcccagtgatgagcccaagagcagctgcatcctgcagatcaccgtggaggagttccaccacgtgttcagaagaattgctgacctgcagagccccctcttccggggcccagatgatgatcctgctgccctgtttgagatggccaagagcggccagagcaagaagcccagtgatgagctgagccagaagacagtggagtgcaccacctggctgctgtgcacctgcatggacaccggggaggccctgaagttcagcctgtctgagagcggccgccgcctgggcctggtgccctgtggggctgtgggcgtgcagctgtctgagatccaggaccagaagtggacagtgaagccccacatcggggaggtgttctgctacctgcccctgcgcatcaagacaggcctgcctgtgcacatcaatggctgctttgctgtgaccagcaacaggaaggagatctggaagacagacaccaagggccgctggaacaccaccttcatgagacatgtgattgtgaaggcctacctgcaggtgctgtctgtgctgcgggacctggccaccagcggggagctgatggactacacctactatgctgtgtggccagaccctgacctggtgcatgatgacttcagcgtcatctgccagggcttctatgaagatattgcccacggcaagggcaaggagctgaccaaggtgttcagtgatggcagcacctgggtgtccatgaagaatgtgcgcttcctggatgacagcatcctgaagagaagagatgtgggcagcgctgccttcaagatcttcctgaagtacctgaagaagacaggcagcaagaacctgtgtgctgtggagctgcccagctctgtgaagctgggctttgaggaggccggctgcaagcagatcctgctggagaacaccttcagcgagaagcagttcttcagcgaggtgttcttccccaacatccaggagattgaggccgagctgcgggaccccctgatgatctttgtgctgaatgagaaggtggatgagttctctggagtgctgcgggtgaccccctgcatcccctgcagcctggagggccaccccctggtgctgcccagccgcctcatccaccctgagggccgggtggccaagctgtttgacatcaaggatggccgcttcccctacggcagcacccaggactacctgaaccccatcatcctgatcaagctggtgcagctgggcatggccaaggatgacatcctgtgggatgacatgctggagagagctgtgtctgtggccgagatcaacaagagtgaccacgtggccgcctgcctgcggagcagcatcctgctgagcctgattgatgagaagctgaagatccgggacccccgggccaaggactttgctgccaagtaccagaccatccgcttcctgcccttcctgaccaagccagctggcttcagcctggactggaagggcaacagcttcaagccagagaccatgtttgctgccacagacctgtacacagctgagcaccaggacatcgtgtgcctgctgcagcccatcctgaatgaaaacagccacagcttccggggctgcggctctgtgtccctggccgtgaaggagttcctgggcctgctgaagaagcccaccgtggacctggtgatcaaccagctgaaggaggtggccaagtctgtggatgatggcatcaccctgtaccaggagaacatcaccaatgcctgctacaagtacctgcacgaggccctgatgcagaatgagatcaccaagatgagcatcatcgacaagctgaagcccttctccttcatcctggtggagaatgcctacgtggacagcgagaaggtgtccttccacctgaactttgaagctgccccctacctgtaccagctgcccaacaagtacaagaacaacttccgggagctgtttgagaccgtgggcgtgcggcagagctgcaccgtggaggactttgccctggtgctggagagcattgaccaggagcggggcaccaagcagatcacagaggagaacttccagctgtgccgccgcatcatcagcgagggcatctggagcctcatccgggagaagaagcaggagttctgtgagaagaactacggcaagatcctgctgcctgacaccaacctgatgctgctgcctgccaagagcctgtgctacaatgactgcccctggatcaaggtgaaggacaccaccgtgaagtactgccacgccgacatcccccgggaggtggccgtgaagctgggcgctgtgcccaagaggcacaaggccctggagagatatgccagcaatgtgtgcttcaccaccctgggcacagaatttggccagaaggagaagctgaccagccgcatcaagagcatcctgaatgcctaccccagcgagaaggagatgctgaaggagctgctgcagaatgctgatgatgccaaggccacagagatctgctttgtgtttgacccccggcagcaccctgtggaccgcatctttgatgacaagtgggcccccctgcagggccctgccctgtgtgtgtacaacaaccagcccttcacagaagatgatgtgcggggcatccagaacctgggcaagggcaccaaggagggcaacccctacaagacaggccagtatggcatcggcttcaacagcgtgtaccacatcacagactgccccagcttcatctctggaaatgacatcctgtgcatctttgacccccacgcccgctatgcccctggggccaccagcatcagccctggccgcatgttccgggacctggatgctgacttccgcacccagttcagtgatgtgctggacctgtacctgggcacccacttcaagctggacaactgcaccatgttccgcttccccctgagaaatgctgagatggccaaggtgtctgagatcagctctgtgcctgccagtgacaggatggtgcagaacctgctggacaagctgcggagtgatggagctgagctgctgatgttcctgaaccacatggagaagatcagcatctgtgaaattgacaagagcactggagccctgaatgtgctgtacagcgtgaagggcaagatcacagatggagaccggctgaagaggaagcagttccacgcctctgtgattgattctgtgaccaagaagaggcagctgaaggacatccctgtgcagcagatcacctacaccatggacacagaagattctgagggcaacctgaccacctggctgatctgcaacagaagtggcttcagctccatggagaaggtgtccaagagcgtcatcagcgcccacaagaaccaggacatcaccctcttcccccggggcggcgtggccgcctgcatcacccacaactacaagaagccccaccgggccttctgcttcctgcccctgagcctggagaccggcctgcccttccacgtgaatggccactttgccctggacagcgcccggaggaacctgtggagagatgacaatggagtgggcgtgcggagtgactggaacaacagcctgatgacagccctgattgccccagcctacgtggagctgctgatccagctgaagaagcgctacttccctggcagtgaccccaccctgtctgtgctgcagaacacccccatccacgtggtgaaggacaccctgaagaagttcctgtccttcttccctgtgaaccggctggacctgcagcctgacctgtactgcctggtgaaggccctgtacaactgcatccacgaggacatgaagaggctgctgcctgtggtgcgggcccccaacattgatggcagtgacctgcacagcgctgtgatcatcacctggatcaacatgagcaccagcaacaagacccggcccttctttgacaacctgctgcaggatgagctgcagcacctgaagaatgctgactacaacatcaccaccaggaagacagtggctgaaaatgtgtaccgcctgaagcacctgctgctggagatcggcttcaacctggtgtacaactgtgatgaaacagccaacctgtaccactgcctgattgatgctgacatccctgtgtcctatgtgaccccagctgacatccgctccttcctgatgaccttcagcagcccagacaccaactgccacatcggcaagctgccctgccgcctgcagcagaccaacctgaagctgttccacagcctgaagctgctggtggactactgcttcaaggatgctgaagaaaatgaaattgaggtggagggcctgcccctgctgatcaccctggacagcgtgctgcagacctttgatgccaagaggcccaagttcctgaccacctaccacgagctgatccccagcaggaaggacctcttcatgaacaccctgtacctgaagtacagcaacatcctgctgaactgcaaggtggccaaggtgtttgacatcagcagctttgctgacctgctgagctctgtgctgccccgggagtacaagaccaagagctgcaccaagtggaaggacaactttgccagcgagagctggctgaagaatgcctggcacttcatcagcgagagcgtgtctgtgaaggaggaccaggaggagaccaagcccacctttgacatcgtggtggacaccctgaaggactgggccctgctgcccggcaccaagttcaccgtgtctgccaaccagctggtggtgcctgaaggagatgtgctgctgcccctgagcctgatgcacatcgctgtgttccccaatgcccagagcgacaaggtgttccacgccctgatgaaggccggctgcatccagctggccctgaacaagatctgcagcaaggacagcgcctttgtgcccctgctgagctgccacacagccaacatcgagagccccaccagcatcctgaaggccctgcactacatggtgcagaccagcaccttccgggcagagaagctggtggagaatgactttgaggccctgctgatgtacttcaactgcaacctgaaccacctgatgagccaggatgacatcaagatcctgaagagcctgccctgctacaagagcatcagcggccgctacgtgtccatcggcaagtttggcacctgctacgtgctgaccaagagcatccccagcgctgaggtggagaagtggacccagagcagcagcagcgccttcctggaggagaagatccacctgaaggagctgtatgaagtcatcggctgtgtgcctgtggatgacctggaggtgtacctgaagcacctgctgcccaagattgagaacctgtcctatgatgccaagctggagcacctgatctacctgaagaaccggctgagcagcgctgaggagctgtctgagatcaaggagcagctgtttgagaagctggagagcctgctgatcatccatgatgccaacagccggctgaagcaggccaagcacttctatgacagaacagtgcgggtgtttgaggtgatgctgcctgagaagctgttcatccccaatgacttcttcaagaagctggagcagctgatcaagcccaagaaccacgtgaccttcatgacctcctgggtggagttcctgagaaatattggcctgaagtacatcctgagccagcagcagctgctgcagtttgccaaggagatctctgtgcgggccaacacagagaactggagcaaggagaccctgcagaacacagtggacatcctgctgcaccacatcttccaggagaggatggacctgctgagcggcaacttcctgaaggagctgagcctcatccccttcctgtgcccagagcgggccccagctgagttcatccgcttccacccccagtaccaggaggtgaatggcaccctgcccctcatcaagttcaatggagcccaggtgaaccccaagttcaagcagtgtgatgtgctgcagctgctgtggaccagctgccccatcctgcctgagaaggccacccccctgagcatcaaggagcaggagggcagtgacctgggcccccaggagcagctggagcaggtgctgaacatgctgaatgtgaacctggacccccccctggacaaggtgatcaacaactgcaggaacatctgcaacatcaccaccctggatgaggagatggtgaagacccgggccaaggtgctgcggagcatctatgagttcctgtctgctgagaagcgggagttccgcttccagctgcggggcgtggcctttgtgatggtggaggatggctggaagctgctgaagccagaggaggtggtgatcaacctggagtatgaaagtgacttcaagccctacctgtacaagctgcccctggagctgggcaccttccaccagctgttcaagcacctgggcacagaggacatcatcagcaccaagcagtatgtggaggtgctgagccgcatcttcaagaacagcgagggcaagcagctggaccccaatgagatgaggacagtgaagagggtggtgtctggcctcttccgcagcctgcagaatgacagcgtgaaggtgcggagtgacctggagaatgtgcgggacctggccctgtacctgcccagccaggacggccgcctggtgaagagcagcatcctggtgtttgatgatgccccccactacaagagccgcatccagggcaacatcggcgtgcagatgctggtggacctgagccagtgctacctgggcaaggaccacggcttccacaccaagctgatcatgctgttcccccagaagctgcggccccggctgctgagcagcatcctggaggagcagctggatgaggagacccccaaggtgtgccagtttggagccctgtgcagcctgcagggccgcctgcagctgctgctgagcagcgagcagttcatcaccggcctcatccgcatcatgaagcatgaaaatgacaatgccttcctggccaatgaggagaaggccatccggctgtgcaaggccctgcgggagggcctgaaggtgtcctgctttgagaagctgcagaccaccctgcgggtgaagggcttcaaccccatcccccacagccgctctgagacctttgccttcctgaagagatttggaaatgctgtgatcctgctgtacatccagcacagcgacagcaaggacatcaacttcctgctggccctggccatgaccctgaagagcgccacagacaacctgatcagtgacaccagctacctgattgccatgctgggctgcaatgacatctaccgcatcggggagaagctggacagcctgggcgtgaagtatgacagcagcgagcccagcaagctggagctgcccatgcctggcacccccatcccagctgagatccactacaccctgctgatggaccccatgaatgtgttctacccaggagaatatgtgggctacctggtggatgctgagggcggggacatctacggcagctaccagcccacctacacctacgccatcatcgtgcaggaggtggagagagaagatgctgacaacagcagcttcctgggcaagatctaccagattgatattggctacagcgagtacaagatcgtgagcagcctggacctgtacaagttcagcaggcctgaggagagcagccagagccgggacagcgcccccagcacccccaccagccccacagagttcctgaccccaggcctgcggagcatccccccactcttcagcggccgggagagccacaagaccagcagcaagcaccagagccccaagaagctgaaggtgaacagcctgcctgagatcctgaaggaggtgacctctgtggtggagcaggcctggaagctgcctgagagcgagaggaagaagatcatccggcggctgtacctgaagtggcacccagacaagaacccagaaaatcatgacatcgccaatgaggtgttcaagcacctgcagaatgagatcaaccggctggagaagcaggccttcctggaccagaatgctgaccgggccagcaggaggaccttcagcaccagcgccagccgcttccagagcgacaagtacagcttccagcgcttctacacctcctggaaccaggaggccaccagccacaagtctgagcggcagcagcagaacaaggagaagtgccccccatctgctggccagacctacagccagcgcttctttgtgccccccaccttcaagtctgtgggcaaccctgtggaggcccggcgctggctgcggcaggcccgggccaacttctctgctgccagaaatgacctgcacaagaatgccaatgagtgggtgtgcttcaagtgctacctgagcaccaagctggccctgattgctgctgactatgctgtgcggggcaagagtgacaaggatgtgaagcccacagccctggcccagaagattgaggagtacagccagcagctggagggcctgaccaatgatgtgcacaccctggaggcctatggagtggacagcctgaagacccgctacccagacctgctgcccttcccccagatccccaatgaccgcttcaccagcgaggtggccatgagggtgatggagtgcacagcctgcatcatcatcaagctggagaacttcatgcagcagaaggtgtag

SEQ ID NO: 179598 - DNA, 13740 bp, Artificial Sequence
  derived and/or modified sequence
atggagaccaaggagaaccggtgggtgcccgtgaccgtgctgcccggctgtgtgggatgtagaaccgtggccgctctggcctcatggacagtccgggatgtcaaggaaagaatcttcgccgaaacagggttccccgtgagtgaacagcggctgtggagaggtggaagagaactgtccgactggatcaagatcggggacctgacaagcaagaactgccaccttttcgtcaatctccagtctaaagggctcaagggcggtggaaggtttgggcagacgactcctcctctggtcgatttcttgaaggatattctccggcggtatccggaaggcggccaaatcttgaaagagcttatccagaacgcagaggacgcaggcgcaaccgaggtgaagttcctctatgatgaaacacagtacggaacagagactctgtggtctaaggacatggcaccctatcaggggcctgccctgtacgtatataacaacgccgtcttcactcctgaggactggcacggcatacaggagattgcccgctcccgcaagaaagatgatcccctgaaggttggcaggttcggcatcgggtttaactcagtgtatcacattacagacgtaccttgtatcttcagcggggaccagatcggcatgttggatccgcaccagacgctgtttggaccccatgagagcggacagtgctggaacctgaaggacgacagtaaagaaatctcagaactctcagaccagttcgcgccattcgtggggatcttcggctcgacgaaggaaactttcattaacggtaattttcccggtacattctttagatttccattgcggcttcagcctagccaactgagttcaaacttgtataacaagcagaaggttttggaactattcgagagctttcgagccgatgcagacactgtattactcttcctcaaatccgtccaggacgtttcactgtacgtgcgggaggcagacggcacagagaaattggttttccgggtaactagctctgagtctaaggccttgaaacatgagagaccgaatagtatcaaaattttgggcacagcaatctctaactactgcaagaagacaccaagtaacaacatcacctgtgtgacctaccacgtaaatatcgtgctagaggaagagtcaaccaaggacgcccagaagacctcatggctggtttgcaatagcgtcggggggagagggatatcgtctaagcttgacagcctcgccgacgaactcaagttcgtgcccattatcggtatcgcaatgccattaagctcaagagatgacgaggccaaaggagcaacaagcgacttttcaggcaaggccttctgcttcctgccacttccccctggggaggaaagctccacgggccttccagtgcatattagcggattcttcgggctaactgacaacaggcggtccatcaaatggcgagagctggaccagtggcgcgaccccgcagccctgtggaacgaatttcttgttatgaacgtcgtgcccaaggcctatgccactctgattttagactccattaagcgattagagatggaaaaaagctctgatttccccctgtctgttgacgtcatttataaattgtggcccgaagcttccaaggtgaaagttcattggcagccggtactcgaacctttatttagcgagttactccagaacgccgtcatctattctatttcctgcgactgggtccggctggaacaggtttacttctcagagctggacgaaaacctggagtacactaagactgttctgaactacctccagagttctgggaaacagatagcaaaagtacccgggaatgtcgatgccgccgttcagttgacagccgctagcggaactacccctgtgaggaaggttacacccgcatgggtacgtcaggttctccggaagtgcgcccacctgggttgtgctgaagaaaagcttcatctcctggagtttgttctctcagatcaggcctatagcgagttgttgggcttggagctgttgccactgcagaacgggaatttcgttcccttttctagtagcgttagtgatcaggatgtgatctatatcacatcagccgagtatccacggagcctttttccaagcttagaaggtagattcatacttgataacctgaaacctcatcttgtcgccgctcttaaggaggctgctcaaacaaggggcagaccctgtacgcaactgcaactactgaatcccgaacgctttgccaggctgatcaaagaggtgatgaatacgttctggccaggacgagagttaatagtgcaatggtatccatttgacgagaacagaaaccatccctccgtttcctggctgaagatggtttggaagaatctgtacatccatttttctgaggacctaacacttttcgatgaaatgccactcatcccgcgaacgatcctggaagagggccagacatgtgtggaactcataagactccgcatcccttctttggtcatactggacgatgagagcgaagcccaactcccagagtttttggctgatatcgtccagaagctgggggggtttgtccttaagaagcttgatgccagtattcagcatccgctgataaagaaatatatccacagccccctgcccagcgccgtcttgcagatcatggagaagatgccccttcagaaattgtgtaaccaaattacttcgctgctgccgacgcacaaagacgcgctgcgaaagtttctggccagcctaacggattcaagcgaaaaagagaaaaggattattcaggagctcgcgatcttcaagcggattaaccactcctctgatcaaggcattagcagctataccaaactcaaggggtgcaaggtgctgcaccacacagctaagctgcccgccgatctgcggttgtcaatatccgttatcgactcgtctgacgaggctacgataagattagcgaacatgcttaagattgagcaactcaaaactacttcatgcttaaagctagtgctcaaagacatcgaaaatgcattctacagtcatgaggaggtcacccagttaatgctttgggttctggagaacctgtcatctttaaagaacgaaaatcctaacgtcttggagtggctcactccactcaagtttatccagattagccaggagcagatggtgagtgctggggagctctttgaccctgacatcgaggtactgaaggatctgttctgtaatgaagagggaacatacttcccacctagtgtgttcaccagtcccgatattctgcacagtcttcggcagattggactgaagaatgaagcatctctgaaggagaaggatgttgtccaggtcgcgaaaaaaatcgaggcgcttcaggtgggcgcatgccccgatcaggacgttttgctgaagaaagccaaaactctgctcctggtgctaaataagaatcatactcttcttcaaagctctgagggcaagatgactctaaagaagatcaagtgggtgccagcgtgcaaagaacgtcctcctaattacccggggtctttggtgtggaagggcgacctctgtaacttgtgcgcccccccagatatgtgtgacgtcgggcacgcaatcctcattggttcatctctgcccctagtcgaaagtattcacgtaaatttggagaaagctctggggattttcacaaaaccttcccttagtgcggtgctgaaacacttcaaaattgtagtggactggtattcatccaagactttttcagacgaagactattaccagtttcagcacattctgcttgaaatatacggctttatgcacgaccacctcaacgagggtaaagactccttcagggccttgaagtttccctgggtgtggacgggaaaaaaattctgcccactggctcaagcagtaatcaaacccattcacgatcttgacctccagccatatttgcacaacgtgccaaagacaatggcgaagtttcaccagctttttaaggtgtgcggatctatagaggagttgacaagcgaccacatctctatggtgattcagaaaatttacttaaagagtgatcaagacctctctgagcaggaaagcaaacaaaatctccacctgatgcttaacatcatacgatggttgtacagcaatcaaatacctgcatctccgaacacccccgtgcccatccatcattcaaagaatcccagtaagctaatcatgaagccgattcacgaatgctgttattgtgacataaaggtggatgacttaaacgatctcctggaggacagcgtggaacctatcattctggtgcacgaggacatccctatgaaaactgccgaatggctcaaagtaccatgtctcagcacaagattgataaatccagaaaatatgggatttgaacagtcaggccagcgagagcctctcaccgtgcgaataaagaatattctggaggaatacccatccgtgagcgacatcttcaaggaactgctgcaaaacgctgacgacgccaacgcgacagaatgctctttcttgattgatatgcgccggaacatggatattagggagaatttacttgacccagggatggcagcctgtcacggcccggcgctgtggtcttttaacaattctcagttctccgattccgactttgtgaatatcactcgccttggagaatcactaaaacgtggagaagtagacaaggttggcaagtttggtctgggattcaactccgtttatcatatcacagacatccctatcatcatgtctagggaatttatgatcatgttcgatccaaacattaaccatattagtaaacacattaaagataagagcaatcctggaataaagattaattggtctaaacaacagaaacgtctgagaaaatttccaaaccagttcaagccctttatcgatgtgtttggatgtcagctgcctctcactgtcgaggctccttatagttacaatggcaccctcttccgactttctttccggacacaacaggaggccaaggtctccgaggtttctagtacttgttacaacacagccgacatctactctctcgtggatgaattctccttatgcggacacaggctcattatattcacgcagtccgtgaagtctatgtacttgaagtacctgaaaattgaagagaccaacccctcactcgctcaggataccgtgatcattaagaagaagtcctgctctagcaaggcactgaacactcccgttctgtccgtgcttaaggaagcagccaaactgatgaagacatgtagcagctccaacaagaagctgccatctgatgagcctaagagtagttgcatactgcaaatcacggtggaggaatttcaccacgtcttcagacgcatcgccgatctgcagtcccccctgttccgcggtccggatgacgatccagcagccctttttgagatggccaaatcaggccagtccaaaaaacccagcgacgagttatcacagaaaacagtggagtgcactacatggctgctctgcacatgcatggacaccggagaagcactgaaattctctctgtcagagagtggacggagactaggactggtgccctgtggggcggttggagtacaactgtcagagatccaggaccaaaaatggacagtaaagcctcatatcggagaggttttttgctacctgcccctcagaatcaaaacaggcctgcctgtccatattaacggatgcttcgccgttacttccaaccggaaagaaatctggaaaaccgataccaagggtcgctggaacaccacctttatgcggcatgtcattgtgaaggcctaccttcaagttctttcagtgcttcgcgacttggcaaccagcggcgagctcatggactacacgtattatgcagtgtggcccgaccccgatctggtgcacgatgacttcagcgtaatttgccagggattttacgaggacattgcacatggaaaggggaaagaactgacaaaggtgtttagcgatggcagtacatgggtatctatgaagaacgtcaggttcctggacgactctatcttgaagcgacgggacgtggggagcgcagcattcaagatttttctaaagtacctcaagaaaaccggctcaaaaaacctctgcgctgtcgaactgccatcatcagtgaagctggggtttgaggaggcaggctgcaagcagatcttgctggaaaacacgttcagtgagaagcagtttttttctgaggtgttttttcccaacattcaagaaattgaagcagagcttagggatccgctcatgatatttgtgctgaacgagaaagtggatgagtttagcggagtcctgagagttacaccctgtattccatgcagcctggaggggcaccccctagtgctaccctctaggttgatacatcctgaaggcagagtcgccaaactgttcgatatcaaggatgggaggtttccctacggatctacacaggactacctgaaccctattatcctcattaagctggtgcaactgggaatggcgaaggatgacattctgtgggacgacatgctcgaacgggccgtgagcgttgccgaaatcaacaaaagcgatcatgtagcggcttgtcttcgatccagcatactgcttagcctgattgacgagaagctgaaaatacgagatcctcgggctaaagactttgccgccaaataccagacgattcgcttcctgcccttcctcactaagccagccggattttccctggactggaaggggaattcattcaagcccgaaacaatgttcgctgcgaccgatctttataccgccgagcaccaggatatcgtgtgtcttctccagcctattttgaacgaaaacagccattcattcagaggatgtgggagcgtgtccctggccgtgaaggagtttctgggcctactaaagaagcccacagtcgacctagtgatcaaccagctaaaagaggtcgccaagtcagttgacgacggaatcacactgtatcaggagaatattactaatgcctgttataaataccttcacgaggcacttatgcaaaatgagataaccaaaatgtctatcatcgataagctcaagccctttagcttcattcttgtcgagaatgcttacgtggactccgaaaaggtttcctttcacttaaatttcgaagccgcaccttacctttatcagcttcctaacaaatacaagaataactttagagaactctttgagaccgtgggtgtaaggcagtcctgtacagtggaagacttcgcgctcgtgctggagtctatcgatcaggagcggggaactaagcagataaccgaagaaaatttccaattatgcagacgaattatctcagagggaatttggtcactcataagggagaagaagcaagagttttgcgagaagaattatggcaaaattctccttcctgatactaatctcatgcttttgcctgctaagagtctctgctacaacgattgtccctggataaaagtgaaagatactactgtcaagtattgccacgccgacatccctagggaagtggcagttaagctaggggcagtgcctaaacgccataaagctttggaacgctacgcaagcaacgtttgcttcaccactctcggcaccgaatttggtcagaaggagaaactgactagtcgcatcaaatctatcctaaatgcctacccaagtgaaaaagagatgctgaaagagctcctgcaaaacgcagatgatgccaaagccacagagatttgttttgtgttcgatccaagacaacaccctgtcgacaggatttttgatgacaagtgggctcccctccaaggccctgctctgtgtgtatataacaatcaacccttcactgaggacgacgtgaggggaatccagaatcttggcaaggggacaaaggaaggtaacccgtacaagacaggacagtatggcataggctttaattccgtatatcacattacggactgcccatctttcattagcggcaatgacatcctctgtatctttgacccgcatgcacggtatgcccccggcgccacaagcatcagtcctggtcgcatgttccgcgatttggacgcagactttcgaacccagtttagcgacgttcttgatttgtatttaggaacacactttaagcttgataattgcaccatgttccgattcccgctgcggaacgccgaaatggccaaggtatctgagatcagctcagtgcctgcctcagatagaatggtgcaaaatctcctcgacaagctgagatccgatggggcggaattactcatgttcctgaaccacatggagaaaatcagtatttgtgagatcgataagagtacaggcgccctgaacgtactgtactctgtgaagggaaaaataactgatggcgatcgccttaaaaggaagcaatttcacgcatctgtgatcgatagtgtgactaaaaaaaggcagcttaaggacatccctgtacaacagattacttacactatggacaccgaagacagcgaagggaacctgaccacttggctgatttgcaatcggagtggcttttcttcaatggaaaaggtcagtaaaagtgtcatctcagcccacaagaatcaggacatcactttgttccctagaggaggagttgctgcctgtatcacgcacaactacaaaaaaccgcatagggcattctgtttcttgccgttatcactggagacaggcctgccatttcacgtcaacgggcatttcgccttggatagcgcccgtcgaaacctgtggcgcgacgacaacggcgttggagtgcgaagcgactggaataacagcttgatgaccgctctgatagctcccgcttacgtggaactcttgattcagctgaagaaacgttatttccccggatccgatccaacgctctcagtactgcaaaatacacccatccacgttgtgaaggataccttgaagaagtttctgagcttttttccagtgaacaggctggacctacagcccgacctgtactgcctcgtcaaagccttatataattgcatccatgaggacatgaagagattactacccgttgtccgggcacccaatatagatgggtctgatctgcatagtgcagtaatcattacatggataaacatgtccacatccaataaaacccgaccttttttcgacaacctgcttcaggatgaactgcagcacttgaagaacgccgactataatatcaccacaaggaagacggtagccgagaacgtgtataggttaaagcatctgctcttagagatcgggttcaatctcgtgtataactgtgatgagaccgctaacctttatcactgcctgatagacgcagacattcctgtgagttatgtcacgcctgctgacataagaagttttctgatgacatttagctccccagatacaaactgccacatagggaagcttccctgccgactccagcagacgaacctgaaactgtttcattctctcaaactcttggtcgactactgttttaaggacgcagaggagaacgagatcgaagtggaaggacttcccctcttaataacactggattctgtcctgcagaccttcgacgccaagcgacctaaattcctgacgacctaccacgagctcatcccctctcggaaggatctattcatgaatacgttgtacctgaagtactcaaatatcttgctcaactgcaaggtggccaaggtttttgacatctccagcttcgcagacctgctgtcctctgtgctgccccgggagtataaaacaaagtcctgtaccaagtggaaggacaattttgccagcgagagctggctgaaaaacgcctggcactttatctctgagtcagtcagtgttaaggaggatcaggaagagactaaacctaccttcgacattgtggtcgacaccctcaaagattgggccctgcttcccggcactaaatttacggtttctgcaaaccaattggtggtgcctgagggtgatgttcttcttcccctgagcctcatgcatatcgctgttttccccaatgctcagagtgataaagtgttccatgctcttatgaaggccggatgtattcaattagccctcaataagatttgcagcaaggattccgcattcgtgccactgctcagctgtcacaccgctaatattgagagtcccacaagcatactgaaagccctgcactatatggtacagacatcgaccttccgcgccgaaaaattggtcgaaaatgactttgaggctttgctgatgtactttaactgcaatctgaatcatctgatgtcccaggacgacatcaagatactgaagtccctgccgtgctacaagtccatcagcggccggtatgtctccattggtaagttcggcacatgctacgtcctgacaaagtccatcccctcggcagaagtggagaagtggactcaaagttcctcaagcgctttcctggaggaaaagatccacctgaaagaattatacgaggttattggctgtgtgccagtggatgatcttgaagtgtatcttaaacatctgctgccgaagatagaaaacttgagttatgatgccaagctcgagcatctcatttatctgaaaaacaggttgtcatccgcggaagaattatccgaaataaaggagcaactgtttgagaagctcgagagtctgctgatcattcacgatgctaacagccgtctcaaacaggcgaaacatttctacgaccgcaccgtgagagttttcgaggtgatgctgccagaaaaactgtttattcctaatgatttttttaaaaagctggagcaactgattaagcccaagaaccatgtgacctttatgacctcttgggtcgagtttctgcgcaatattggcctgaagtatatccttagccagcagcagctgctgcaatttgccaaagaaatatctgtgagggccaatactgagaattggagcaaagagactctccagaacactgtggacatactactgcatcacatttttcaggagagaatggatctactctcaggcaactttctcaaagagttgagtctgatacccttcctgtgtcccgagcgggctccggccgagttcatcaggttccaccctcagtaccaggaagtgaatggcacactgcctctcatcaaatttaacggcgctcaggtcaaccctaaattcaagcagtgtgacgtgttacagcttctgtggacctcctgtcctattctgcctgaaaaagccactcccctgtctattaaagagcaagagggaagtgatcttggaccgcaggaacagctcgaacaggttctaaacatgctaaacgtgaacctcgaccctccgctcgataaagtaataaataactgtcggaacatttgtaatatcacaactctcgatgaagagatggttaagacccgggctaaagtcctgcggtctatttatgagttcttatccgcggaaaaacgcgagtttaggttccagcttcgcggagtagcctttgtgatggtggaggacgggtggaaattgcttaagccagaggaggtggttatcaatctagagtacgagagtgatttcaaaccatacctatacaaactgcctctcgagttaggtacttttcaccagctgtttaagcatctgggtaccgaggacataatttctacaaagcagtatgtggaagttctgtcccggatctttaagaactctgaaggtaagcagctggaccccaatgagatgagaactgtcaagagagtcgtgagtggactgttcaggagtctgcagaacgatagtgtcaaggtgcgaagtgatttggaaaacgtacgcgacctggctctctaccttcccagccaggacggacgcctggtgaagagctccatcctggtgtttgatgatgcccctcattacaaaagcagaatccagggcaatattggggtccagatgcttgttgatctgtcacaatgctatctggggaaggaccatggcttccacaccaagttgatcatgctctttccccagaagctgcggccccgattgttgtctagcattctggaagagcagctggacgaggaaacccctaaggtgtgccagtttggagccctctgctccctgcagggtaggctgcaacttctgctcagtagtgaacagttcattaccgggttaatcaggatcatgaagcatgagaacgacaatgcttttctcgccaatgaggaaaaagcaattagattatgcaaggccttgcgagaaggtttaaaggtttcttgcttcgagaaactgcaaaccacactgagagttaagggctttaatccaatcccacattctcgatctgagacctttgctttcctgaagagatttggtaatgcggtgatcctactttatattcaacatagcgactcaaaggatatcaactttctcctggctctggccatgacactcaagagcgccaccgataatctcatctcggacacctcttacctaattgctatgttgggatgcaacgatatttaccgcattggggaaaagctggattcacttggtgtaaaatatgactcctccgagccctccaagcttgaattacctatgcctggaactccaattcctgccgaaatacactacacattactcatggatcccatgaacgtcttttacccgggagagtatgttggatacttggtggatgctgagggcggagatatatacgggtcttaccaaccgacttacacttatgctatcattgtacaggaagtggaaagagaggacgccgataatagtagcttcttgggaaagatataccagattgacattggttatagcgagtacaaaattgtttcctcactggatctctacaagttcagccggccagaagaaagtagtcagtccagggactcagcgcctagtacaccaacctcacctacagaatttctaacaccgggactcaggagcatcccccccctcttcagcggcagggagtcccacaagaccagcagcaaacaccagtcacctaaaaagctgaaagtcaactctttgcccgagattctgaaggaggtgacatctgtcgtggagcaagcttggaaactgcctgagtccgaaagaaagaagatcattaggcggctctatctgaaatggcacccagataaaaatcctgagaaccatgatatagccaacgaggtttttaagcatttacagaacgaaattaatagactggagaagcaggcgtttttagatcagaatgccgaccgcgcaagccggcggaccttcagcacttcagcatcccgctttcagtcggacaaatattcattccaaaggttctatacttcttggaatcaggaggcaacaagtcacaaaagcgaacgtcaacagcaaaataaggaaaagtgcccaccaagcgccggccagacatactcacagcgtttcttcgttcccccgacatttaaaagcgtcggcaacccagtggaagcccgccggtggctgcgccaggcgcgagctaatttttccgccgccagaaacgatctgcataagaacgcaaatgaatgggtgtgcttcaaatgttacctgtccacgaagctcgctctgatcgcagcagactacgccgtcagaggcaagagtgataaggatgtgaaaccaaccgctctagcccagaaaattgaggaatatagccagcagctagaggggctcaccaacgacgtgcataccctcgaggcctatggggtagattccctgaaaacccgatatcccgatttgctgccgttcccccagatccctaacgatagatttactagcgaagtcgccatgcgcgtaatggagtgcactgcctgcatcataattaaactggagaactttatgcagcagaaagtatag
